United States Patent Application Publication US 2022/0102000 A1 - sequence listing, part 10

SEQ ID NO: 1973 - DNA, 4611 bp, Unknown
  16S sequences of unknown bacteria
cttttttatttacccctggttcctaccaggggttttgttaagcctaaaggcaacaaaaacagagaggcggcgagtcactcgccgcctctctgtttttgagaaaagaaagatgttttgattttatgtacccgccggaaaggcgggaaaggatcagagacagtcaccagaagtaggggtatagcgactggattcagtggccggggtataaaagcagtcaccggtattcgcaggagaaacaccgtttccgctgttaatgccgtcccctcctacaaaaccgttgccaaaaacgacttcataatttaccgttaccggaatgtactctgtgaaagatccaccgcagccttcatttctgcagccgcttcttccagtgttatagtttctgtaccgattacaattcatcatttcaatcctcccaatctgcggatttgtttccgccctataaagtatgctgcggcctgctgattggtgaaggatcaactctctgaatagttccgcatccaattttggagccggaatctcccgccggttgtgtggtgaaatcgtctcggttcgtatggacaacaacggcgcggcccaaaacctcccaaagtgaaaagtgatcggtataaaaagcaaaccaggcttggtctccactggcgatcaatggaggaagatccccagcgtgatctggatgctggcatccggcaggattgtaatggctccccacgttggcaaaaggatcgagctcattgccggaacagtcctctttttcatgaatgtgcaaaccgaaaactcggtgcggacaagaagagttttcggtaggaagtccggtaaaataagcagataaaaggacgcctcttcccaattgataaaactttacagtgcctgaaagattgggatgggagacatctccggccaattgtgcaatcgcttgcggcggacgggacagcatccggctaaaataggaatcaatttttaaatcatcttgcattggtatcacactcccgctccattttatgaaggaggtgaagaaaagttgctatgcaaatgattgcttgaattcaaagttcctgatagtttcccaaaaaagtgaaacttggaagctttttcgataaatcatccatcaaaagttgaatttgtaaagaagaagtatttcctgaaaaatccaaatagaaataatattcaaagtttttttcgcttacaggcctggactcaattttcgttagatttaaattcaacgatgcaaactgagagagtaactgatttaatgccccaggctgatgcggaagagaaaagaccagactgattttattggcgtgttcagtataaaagcttttccgggaaacagctacaaagcgggtggtattatgctgtgccgtttgaatattgggggaaagcacttgcagtccataaatttttgcacagtaagaggaagcaatagccgctttgtggatatctcccagcgcagcaaccatttttgctgccgctgctgtattttccataggaattgttctggcaagaggcagtttagcgcagaattttttgcattgggataatccctgaggatgagaataaatttcattgatatcatccagtgttgcattgggtaaggctaataaattttgttctaccggcagacggcatgccctgctgattgtgagacggtatcgtagcaatagatcataaacctgtcctactgaccccgccagggaattttctacgggaagcaccgcaaaatcacaatcgccttgagcgaccttttcaaaagcatcctcccagctataaacaaaaatctgttctcctcccggaaacatacagcgggccgcttctccggaaaaggcaccgggaaccccttggcaggcgactttggagtgagctggaaaatcagcttctgttttctgagacaactccgtaacatgattcatcaaagtccgttcgtaatctttacttacatccatcaggcattggtagacttgccgcagataggtcgctttttccgtggtcacactttgagcaatccgatccaaaacctgtttctcccgctttggatcgtatactggcagaccagctttttctttgatttttgccacttgggcaaccaaatccattcgttgagaaaacagacaacttaattctttatctgtttcattaattcgcagacgaatctgttctaattgaccgttcattcatttttcccctttttgacttagagagttctgccttctacctgaacatagcggcgcagactggtcataacgccgtcgaaggtttcggggcgtagggattgagcgccatcggacagggctttttccggattgttgtgaacctcaatcatcaagccgtctgctccggcaacaatcgcggattttgccatcggttccacaagccaagtaatcccggttccatggcttggatcaacaactaccggcaggtgagtcaaatgttttaagatcggcacagcagagatatccagagtatttcgggtaaaggtttcataggtgcggatgcctcgttcgcacaaaataacgcgttcattaccgccggccataatatattcggcactcatcagccattcttcaatggtactggaaaggccgcgttttaacaagattggtttgtccaaatgccccagttctttgagcagttcgaaattctgcatattccgtgcgcccacctgaatgatatcaacatcttgaaaaaacgggatttgcgccgcactcatcacttcggaaacgattggaaggccagtggcctcttttgctttcagcaacagttctaccccttctgcccgcaagccttggaaagcatatggagaagtacgaggtttaaatgccccgccgcggagaatatgagcgccggaggatttgacctttctggcgacatctatgatctgttcttctgattccaccgaacacgggccggccataaccaccacctgattgccgccgatttgcagaccattgtccaacgtaattactgtgttttgcggatgaaatttgcggttgaccattttatatggttcctgcacacgagttacccgctctacaatatcttgatgagccagaattgagtccatgtccacatgagaagtgtcgccgaccaggccaataattgtgacctgagtcccttccgtacaatggcaggcaacaccggcatactgggacttgatctcctcgatcagcatttctgttttttccttaggagtgttgggtctgagaacaactaccattttgaaacatcctttctaattcataaaacgttctgcaaagttgcaacaaaaaagggacttatgaaaatatcataagtccccgattttttacttatctgatgtgacctatcatattttaccgtattcaactaagccggtgctaaagaagaaagcccagctaaagaagaaggtaaagtttttagaataggttttactcataaagaaacctcgcatacattttaactggatatattttagcaccgacagaacaggttgtaaagagttttttaagattccattaaaaagatattatcaggaaaaaaggaaaacgtatttgtgtttctccaaatctttcttaaaaacctgttgcaagttttatttgatatttcatatatgatatgatacgataatcccataaggaggggtgtttatgtggacgagagaacaaataaaaggaaatgcaaagtatgttttgagttttagttattggaaagcgtttttggcctgcttgattgtgtccctggttgccggtgtatcgaatatgggaggcagttcaactggttatacaatgacctatcagatttccagtgaccatttttcttggcggattggcggcattttcttggcggtttttttgatactggcgtttatgggcgtgctgttcggaatttttgtagccaatccgatttcggtaggaaaatgtcgctttttccttgctaaccggcaaaatcgtgggaattatgatcagattttttctctttttaaaagcggcatttacctcaatgtggttaaaatcatgtttttgagagatttatatacttttttatggagccttttactgattattccgggagtagtaaaatcctatgaatatagcatgattccttatattttggcggaaaatccacaaattgactctgaccgggcttttgcggtttcacgttctatgacggacagggaaaaaatctcaatttttgttttagactggtcttttttcggatggattatactggggaccatggcatgcggtgtgggtacattgtttgtagcgccctatattcaggcaacttatacggaattgtatgaagttttaaaatataaagtcatttctggcggcatggctggcacagatgaactaggtggtccaaatggctatatgggagaggaagaacgaggatatcattcctatcatgctactcccaacagcactgaaaacggcgccagaatgtgcgattcggtaccctcttgccccagtcaaaaccattctccaacaggtttttcccaagaatctcaaaatccgatcactactgcacagaattccgttcagcaagaaacttatgaaaataagacctggtttgaacaacaggtagaacaggaaaaaagtgacggtttggaattgtaatttgaatgagggagctgtatag

SEQ ID NO: 1974 - DNA, 2784 bp, Unknown
  16S sequences of unknown bacteria
caaagcagcagccaagcctgtccctcataaatgccgaaacggcatcggaaacggcagccttgttggcaatgacctcggtggggcaaaagcttcccagctcgtttacaatgctttcgtcaacattttgacccgaaagctcggtaagatagaactgacccgtagaggtgtcaacaaaagcaattgccgcgccgtcgccgctcctgtaaaccgaggcaagaaaattgtttttgccctcgtcaagcatgctgctttcggtcaccgttccgggggtgaccacacggacgattccgcgtttcacaaggcccttggcggtggcgggatcctcggtctgttcgcatatagccaccttatatcccttgtctacaagtcgtgcgatataaccctcgcagctgtgaaagggcactccgcacatgggagccttttccgcctgaccgcaggccttttgagtgagggtcagctcaagttcttttgacacaagctttgcgtcatcgtagaacatttcatagaagtcgcccaaacggaaaaacaaaatcgtccccgggttttcttcttttattctgaaatattgcgccatcatgggagagagcaaagccatgaccctcacctacctttcaaagaaattaaatcagtggcagccgccgcaggaagaacagcttcccgagcagcctgcgggctcgcaggtctcgggatcggcaccctcgatgcacatggcgataatagaggttacacggttggaaacctcgtccatggcctgctttgcctcgttgtatttctgcatactttcgttgctcataacctgatcgtaaagcttttggagctgattgttgagctcctcaattttgctgcggctcttctgatcctcgggcttttgcagctcggtggcaagagacatacgctgaagattgaattctccgataagagcctgaagcttctcgtcggcgtcgtttgcctctttggcagctctgtatgctacataggcgtcctccttctgaatggcggcgccaagctgtcttgcaagttcgataatatccatttcttttcctccgaaatttattttatattagccgtttatctcgccctttaaaacaaatgaaaggggttcggtaacggtaacatttacaaattggtttataagggactcgtctccctcaaattccacgtttatattgccctcgctgcgcccgtttaaaaatccgggctttttcgccttgccctcgcaaagcacacggagggtttttcccatgtattttttgttgttttgctcggaaataatcctttgaacatccgaaagagccgtcagacggcgggacttttcctccggtgaaatctgatcctccatggctgcggcgggtgttccctcgcgcggagaataggcaaaggtgaaaagcgccgaatatccaacctcacgaacaagagagagtgtatcttcaaaatcctcggccgtttcaccgggaaaaccgacaataatatcgcttgtcagacaaatgtcgggaatgttttccttaacctttttgacaagatttaaataatgcttgcgggtatatactctgttcatggccttcagaatacggttgctgcccgactgaacaggaagatgaagatgaggcacgacctttttgcagtctctcaccgcctctataagctcatcggtgcaatccttgggatgagaggtcataaatcttatgataaaatctccgtcaagggcgtcaagccgtctcagcagctgcgcaaagcttatgggattttcaagattttttccgtaggagttgacattctggccgagcagggtaatttccttatatccgtcctctatcatctcccgcgcctcgtttatgacggcctcgggatcgcggctgcgttccctgcccctgacatagggcacaatacagtaggtgcagaaattgttgcagccgtacattaccggcagccagcctttaacgcccgttcttcttgtgggaacatcctcggcaataactccgctgcccgaaatgtcaaaaacacgcgcctctttggagagcacctcgtaaagaagctcgggaagcttgtgctgaacatgggttccgaaaagaaggtcgacgtgagggtatgactttctgaatttttcggcaaccgactgctgctgaaccatacagccgcacaaagcgacaattcggttctttcggtgctccttgaaggccttgagcgcaccgacgtttccgtatattctgtcctcggcatgtccccttacggcgcaggtgtcgaaaagcacaagatcggcgtcgtcgacctcgtcgcaaaattcaaagcccatgctttggagtattccttcaatgcgctggccgtcgctgatattttgctgacagccgtagacctttacaagcgccttaggcggcctgccgaatctggcgagaagcagttcgcggtctttttcgcaaaactccctctgacgttcggtttcgtcggcaccgacacggaaattacggttgttttgcaaagacgccatatcaaaattcctctcaaagcataataagtcactttagagtgaattatactatatattgtagaaacaatcaagtcaatttaataaatttatgagaaatatttgattttaattttttgcattaaatcctgacgctcaacagaaaataaataaaaaggagaaaaaatgaacaaacaaaaacagactgtaaaaaataacaataaaatttccggatatattttcctcgcacttcgcgcggggcttccctttattatttccacggtaatcggtcttatgacaaaactttggtggataggctggtttat

SEQ ID NO: 1975 - DNA, 2092 bp, Unknown
  16S sequences of unknown bacteria
tcatcagcggaacgatgctgattgtcatcggcgtatgcggaaatggggcgctctcgtttgactccggccgttccgccgcccttcccaccgcggttttgattctcaccagcggggccgccctcattttttccaatcagctctacaagtacaatcctctgagtaaaatcatgatcttctccctgctctctccggtactgggcgtgttcagctctgccatcatgctgggtgatcccctgaattccggctatgtgttcgccagcctcatcatcaactgcgtcggcgttgcactggttaccacggaaaagcagagcccgcagccctgccccgctcatcacaaaagcaactcatgacgcgcgcactttcgcgcgtccatgcaggcgcaccttctctttgatccggaaactgccccgcccgaaaacaggcggggcagtttcctgctctgattgtgcaggctgcgggatcgtacaaagctgtctgtccccgcagcgctgcgctcgtgtcaggacagtgtggcaagccggcgatactgtcccaaagtgtagccttctgcatatttgaaaaagcggttcaaggcatattcactggaaaaaccggacatcgacgcaatctccgcaaaggacaggctggacgtgccgatcagttccttgatgtaattgagcttctccgctccaatcagctgattgagcgtcttgccggactggctgcggcaaatccggttgagctgccgggagctgcgccccaaactggccgccacatcctccaccgtgattccgtcggcaatgtgctctgcgataaacttctgcacctcccgcaccatccgggcggaccggtccggcttcatatcccgctgggtaatgggctcgctctccggcagaaccgccgccagcagctgcagcagcaggcactgcagcagattggagatctcccgggacgcccagggggagcgtccttcggaaacctgcttcatcagttgaatataggcccccgcgctctccggcgcagtaaagacaccgctgcggtgaatctcctccagggcagacagtacgtaagggtccgtgctctcaatctgaaacgcaacactaaaacgcactcccgtctccgacgcttcgaccacctgatggtaccggttgggcggaacaatcatgaattgccccgcttccacggtatattgctgcacggttcctcccgtctccgccgtctggcgaatgaacccctcctgcatcagctgcagctcgtaaaaagagtgcttgttgcgttctgaaagcaggatctcactgtgcccggaccgcaaaaagatccaatagacatgcagccgcatattgggatcatcaatgcggatgatctgccggtttaagggctggttgctgttgaggatagctgtactgatcttttgtttcatggaacgctccttcccggctcttgggagcccgtttgccccgataaactgtctgattttagaacatttattatgttggaaatattttcaaaccttttgctttccaacgctgatttttttcaagtgcaaaaatcaaacgcgcaaaaaaagcaagaaattttctggatttaaaggaaattttttcagtcaaacagaaattcaacgttttattttattatagcaagccgccgggaacggaacaatggatatccgcaaaaaatgtccgaaattgtttgttttgtgactgcgcccgcaattgaccctgtcacaccggcctgttatagtaaaaatgtacaattacaggcgcgaaattacgtgtttttcgtgattgtgccatcattcggtcttgtggatcaaaagagaaaagagaaatggaggaactcatatgaaaagaatgtttgctctgcttttatccctgacgatggtcttctctctgaccgcctgcggcggtgggaacgaggagtcctccagcggcggcagcgaagccagcggtgaaaccatcaccatcaagctgccgcactgctattcggagggacacccgcttaccgacacgctggaaaacttcttcaagcccgagctggaaagccgttccggcggacggctgaccgtggatctctatcccaattccactctggccaccgaggagcagatttacga

SEQ ID NO: 1976 - DNA, 27052 bp, Unknown
  16S sequences of unknown bacteria
ctctgacgttaaagccagtgttttagagggctgggagagggatgcccaattttatggatgaaccgactgccgggcttgatgtggtggcgagagagacgatcctggatctgctgcgcagctacatggagcaggaaggacgggggattctgatcagctcccatatttcgtccgatctggagggactttgtgacgatttgtatctgatcgatgacggaaagatcgcgcttcatgaggagatggatgtgctgctggatcagtacgggcttttgaaaatggatgaggcgacgtggcagtcgattgacaaaagctggattctgcgttggaagaaggaaccgtggggcgtcagcgcactgacaagtgagcgaaggttctatcaggaaaattatccgaagatggtcgcggagaaaggctctgtggatgagatggtctatatggcggtgaaaggagaaaaggtatgagaggactgtggaaaaaagatctggcgctgatcgggacgaaccgttccatgctggctgcagttgtgctggtgacggttctgatgatccttgcgcagaattatcagtttgtgatgttttatgcagcattgatgggcggctttcagatacttgggacgatcacgtatgatatggcgaatgacgggatgcagtatcttctgacacttccggtgacgcgcagtcagtatacggctgagaagtatctgtttggctatggatttgggctggcgctgctgctttttggtacagttgtggcatttttatccgcagttgtcaccggaaatccgctcgatccggccgagatggcgtttacgctcgagtgtgccctgcagctccttggatttttgctggcagcgtttttaccaattcagtttaaatacggaagcgacaacggaagagtgatcatgtgcagcgtttttggtgtagcctttctgtgtgtgtttgcagcaggaaaagcagcggaatcctttggaattgatctggaagcgctgctgattcagcttcagtcgctcggtgtgccggtgatattcgcaggactggccgtgctgcttgtagttgtatcgtttatttcgtggaaaatcagctgtgggatactggagaagaaggaattttgataagtcaggcaagttttctgctttaagcgtgatgagcaacgaacagtgggagaattgcctgtattataaatgggaaagccttacttagaaagctggttatgaaatttgagtgaaaattgctgccgttaatgtgttgcttgttcttacatggaggtgtggcgggttgacaagctaagtggtgcatattaatatagtagagacagactcaataaatagttatatgcgatctttcagatactatatcatgcgagaaatagcaggcagccagaaagaaagtgcagaaaaaggagagcaacatgagcggaatgaaaaatatcagcaaagcagaagtaatggttttaaaagatcaggtgacctatcaggagggacaggtggtcagcaagacactggctcagaacgagcacgtgagcgtgaccctgttttcctttgacaaaggcgaggagatcagcacccacgagtcaggcggagacgcatttgtgacctgccttgacggtgtcggcaaagtgacgatcgacggtgtcgagtacattctgcacgagggagagtccatcgtgatgccagcaaagcatccgcatgctgtgtacggtgaggagcagtttaagatgctgctggtggtgatcttctaagagaatcaaataagagagaaaagtcgttttacacagacaaaagactgtctgtgtgaagcggcttttttgttatacaatgtttaaaaacggaaaaatgaaatacgaattcccaatatagttaaaatgtttctttacattcccgggtaactctgttacgatagaaacaacaattggccggagtaaaaacagcgattattttaccgaggcaagcaaggctcctgcttcaattgcacggagcaataagcagtgggtggggacttgcttgtatcataagtaaggcaagcttacttacgataacggttatgagcaagtagcgaagcggattgcgaatatccgcttttgattgctgttctatgcagtacagtgagacggatatacgaaatcagtttttgctgtctgtttaaactctgagcattaaaaatccggaaaagggaggaagagagtatgaaacatttaaaacgaaacatggtatccattctggccatgctggtgtgctgcatctgccttggaatggcaggacgtccgcttacagcatccgcagcggcgagctggtctacgctgaagtttggtgagtggatgagaaatggcactatcacgaaagattatgatacgaggtactacacgatcacggttccgaagccgggatatgtaaccgtgtacttcaacacatttttttatggcggcgtatggctgatgacggaggatatgcagacaactatccgggatggtttctggataagcggaaatgaatcagagccgggtgcttggaaaagcggtcagtgggtcgaagctggcacgtatctgatcaaggtgaaggcaaatcacagttacggtaatttctggctgaaagcagattataaagcggcaggcaatactgagacggagccgaataatacgtatgcacaggcaactaaaatgacgttcaataagaaaatgcgcggccttcgttctgcacaggatgcagatgactggtatgtttttacgattccggaagaaagacagcttaccctccagatgacaagctatctggacggtctgggagtagaagtccgaaattctgattttgagattataagcagtgacttctggatttatggaagtgaggaagccccaaaaacctggagtcgggacctggacctgacaaaaggaaaatactatattcatacatacagcaacagtggtaggacaggatactatgatctcaccttgaagccggtaaagattctggcgtccgagatcgtggtcaaccgcactgcagcaactatttacaagggtaataagctgcagctgagatcctacgtttccccgtccaatgcgacgaaccgcactgtaaaatggacgactaataacccgtatgtcgcaaccgtaagttctgccggtcttgtgaccgccaaaggtgcaggtaaagcgacaattaccgcccgcacgacagacggcacgaagctgactgcctcctgccagatcacagtccgcaataagacactgaacgttacacctgcaaaactgaccctggtgaagggcaaatacagaaccttaaaagtaaccggtgcaccggctgtgacgacaaagaatgtaaaattctatacgatgaacagcaggatcgcaacggtatcgaaaacaggaagaatctatgcgagaaatgtcggtacatgcaaaattaaggtagtgggaaatggactgacgaaatatgtcacactgacggtaaaagcaagataacgcagcgttgcagaacaaagaaaagagaaaaaggctgcagtctcatacgagaaaaataaaacagataaaaaagagcaatccgccgctttcctcggaaaaggaaagcggcggattttttgcacccacgcccctcttttcgacattattcctgtcaaccgcaaatttttgtcacaattatttcctgttttgaataaaaaaaagaagaccttatcaaaaaaatacagcactttgcaaacatctcctgccgaccctgtggtatgctttagtcatcttaaaatgaacgtaaagcaaaaggaggaaacaaactatgaaaaagaaaatcgcggtactcgcagtcgcaacagcacttagcgcagctgcacttggcacagtagcaggagctgaggagtccaaaggactgatcggtgttgcaatgccgacacaggatctgcagagatggaatcaggacggcgagaacatgaaggctgagcttgaggcgaagggatatgaggtagaccttcagttcgcaggcaatgactccgcgcagcaggcatcacagatcgagaacatgatcgcaaacggcgaccagctcctcgtagtagcatccatcgacggtgactctcttggaaccgttctggcacaggcaaaggaagccggcatcccggttatctcctatgaccgtctgatcatgaataccgatgcgatttcttattacgcaacattcgataattacctggtaggaaagacacagggtcagttcatcgtagacgctctggatcttgacaatcaggacggaccgttcaatattgagatggttaccggtgatccgggcgacaacaatgtaaacttcttcttcggcggcgctatggatgtgcttcagccgtacattgatgcaggcaagctggttgttccgtccggacagatgacaaaggacgaggttgcaactgcaaactgggcaacagacgcagcacaggcaagatttgagaatattctttcttccaactacgctgacggcactccgcttcatgcagtacttgcttctaatgactccaccgctcttggagtaacaaacgctctggcagcaaactacacgaacgacgtttatccggttatcaccggtcaggactgcgacatcgcaaacgttccgaacatcgtaaacggaaagcaggcaatgtccgtatttaaggatacccgtacactggcaacgaaggttgtagagatggttgacgcgatcatgacaggcggcgaagctccggttaatgataccgagacttacgacaacggcacaggcatcatcccgtcttacctctgcgagccggttgcagttaccgctgacaactacaaagagatcctgatcgattccggatactacacagaggatcagattcagtaaggacgcaaaagcggaagcagactccgcattatacaggcgggcatttcgcccgcctgttcttatgaagatggagaaagaagcccgtgttacagctgcatttgcagaaaaacagagggcaaatggaaagcaaaaagatctgcaaaggcagaaacaacgggcagaaaagtatcggaaataagtgagggagggagcaattttggcaaagatactgttggaaatgaaaaatatcaccaaaacattccccggcgtaaaagcacttgacaacgtaaacctgaaagtggaagagggcgagattcacgctctggtcggcgagaacggagccggaaaatcgactctgatgaacgtactctccggcgtgtatccatttggcagttacacgggtgatatcatttacaatggagaagtatgtaagtttcatgatattaagcaaagcgaagaaaaaggcatcgtaatcatccatcaggagctggcgctgattccgtatatgacgatcggcgaaaacctgttccttggaaatgaacgcggaaaaaaggctgccatcaactgggatgagacctatggaatggcagataaatatatcagacaggtaggtctgaccgagtcctcgagaacgctgatcaaggacatcggagtcggcaaacagcagcttgtagagatcgccaaggcacttgcaaagaatgcaaagcttctgatcctggacgagccgacctcttctttgaatgagcaggattcccaggcacttctggatctgctgctgaagttcaaaaaggagggcatgacctgtatcattatttcacacaaattaaacgaggtttcctacgtggcggacaagatcacagtcatccgtgacggctcgacgattgagacgctgacaaagggcgtggacgatttttcagaggaccggatcatccggggtatggtaggccgtgagattgcagaccgcttcccgaaacgtccgggtgtgaagatcggtgaagtaaatatggaagtgaaaaactggacggtacaccatccgatctacaccgagcgcaaggtggtggataatgtttccatcaaagtccgcaaaggagaagtagttggtatttccggactgatgggggccggccgtactgagctggctaagagtattttcggaaagagctacggaacgaatatcagcggccagctgtttctgaatggaaaggaagtccatctgaaaaatgccagggatgcgatccatcataagatcgcatacgtaaccgaggaccgcaagggtgacggactgatcctgagcaatccgatcaagacgaatacaacgcttgcaaatctggaggcagtcagcgagaagggaatcattgacaaagataaggaatatgcagtagcggtcgagtacaaggaaaaactgaaaacaaagtgcccgacggtagagcagaatgtcggaaacttaagcggcggcaatcagcagaaggtgcttcttgccaagtggatgtttgcggatccggatgtgctgatcctggacgagccgacaagaggtatcgatgtcggcgcaaagtatgagatttactgtatcattaatgatctggtggcagcgggcaaatccgtcatcatgatctcctccgagcttccggaagtacttggaatgtcggatcgtatctacgtcatgaacgaggggcgaattgccggagaattaaatgcgcaggaggcatcacaggagaaaattatgtcctgcatcctgcggtcatccgaccgaaaataaccaggcagcaaagcggacctgaaatatccgcctgttcgtaaataagaagtgggagcggagctgaaacacccgctttactcggaaaaggagagcaaaatggataaggcaaaattaaaagtaggaattcagaaatatacgatgattatcgtattgcttctcgtaacgttgtttttcacctggggtacacagggcaagatccttctgccacagaatatcacaaacctcatttcacagaatgcatacgtattcgtactggcaaccggtatgctgctgtgtatcctgacaggaggaaacattgacctgtcagttggctcagttgtctgctttgtcggagcagtcggcggtgtcatgatggaaaaaatgcatcttccggtcggaattgcgatcgtcctgatgctgctgcttggcgcagtcattggcgcatggcaggcattctggatcgcattcctgcgcatcccgccgtttattgttaccctgtcgggcatgctggtattccgtggactttccaacgtcgtgctcggcggtcagacgcttccgatcaagtcagaggcatttatcaaactgttcggcggtggtgcaaactgctatgttccggattttctcggcggaggagacggactgaaccgcgtggcgatggcagtcggtgtgattgcgtgtgtcgcttacatatttattacagtgcacggccatatgaaccgtgtgaaaaagggctacgagacaggaaatgtcggcgccatgtatgcgaaaatgatcgtgatctgcgcagtgatcctgtttgtcaccgtaaagctggcacagcacaaaggtattccgacctctctggtatgggtactgatcgtggtactggtttacggttatatcacgagcaagacgacagtaggacgttacttctacgcagtcggcggcaatgaaaaggcaacaaagctttccggtatcaacacggatatggtatactttatcgcttataccaacatgggatttctcgcagcactggcaggtatgctgacgatcgcacgtctgacgagtgcacagccgacttatggacagaactatgagatggatgcgatcggttcctgcttcatcggcggtgcttccgcatacggcggagtcggaacggttccgggcgttatcgtcggagcagtcctgatgggtatcatcaaccagggtatgtcaatcatgggtacagaccagaacatgcagaaggttgtaaagggccttgtgcttctggcagctgttatctttgatgtagtcagcaagaaaaaatctgagtaaacaaagtgaatagaaaaaatcggtatattttctgaattttggaaaatataccgaaaaataaaaagacacttgcaatttccatgaaaagagagtattttaatagtcagaacaagggtgttccgtaatattgcgttatggaatgccctcttttgctatatagttcaaaaacaagaatgtgtgtgatttatatggcaggggataaaagcggctgaggctccgatgatggttaatccggaaaaatggctgcaaaaataagttaaggaaagaggagaggacatgagcgaatatttcaatgtagcagacatcttcggtgaagatgtatttacagacaaagtaatgcaggaacgccttccgaaaaaagtataccgggctctgagaaagaccatcgaagagggtaaagagcttgacctcgcaacagcagacgtcattgcagcagcaatgaaggactgggcgatcgaaaaaggagcaacccattatacgcactggttccagccgctgaccggcgttaccgctgagaaacatgattcctttatcaccgcaccgagagaagacggaacaattctgatggagttttccggaaaagaattgatcaagggcgagccggatgcatcctctttcccgtcaggcggactgcgggcgacgtttgaggcgagaggctatacagcatgggactgcacctcaccggcattcgtacgtcacgatgcggcaggagctacgctttgtatcccgactgctttctgttcttatacaggagaagcacttgaccagaagacacctcttcttcgttccatggaggcgattaacaaggagtctttgcgccttctgaagctgtttggcaacacaacctccaaaaaggtgacaccgtcagtcggaccggagcaggagtacttcctggtagacgctgagaaatttttaaagagaaaagacctgatctttaccggtcgtaccttgtttggtgcaatgccgccgaaaggacaggagctggacgatcattatttcggaacgatccgtcagagaatcgcatctttcatgaaggatgtaaacgtagagctgtggaagcttggcgtatccgcaaagacacagcataacgaagtggctccggcacagcacgagctggctccgatctatgcggaggcaaacgtggcagtagaccacaaccagattgtcatgcagaccttaaagagagtagcatgccagcacggtatgaaatgtctgctgcatgagaaaccgttcgcaggtgtaaatggttccggtaagcacaacaactggtctctgaccacggacgatggcatcaacctgctggatccgggcaagacaccgcacgagaacgtacagttcctgctggtactgacctgtatcctgaaagcggtagatgagcatgcagatctgctccgtgagtccgcagcagatccaggcaacgaccacagactgggagcaaacgaggcaccgccggcgattatttccgtattccttggcgagcagctgcaggatgtaatggcgcagctgatcagcgttggtgaggcaacacactccttaaagggcggcgtgcttgagacaggtgttaagacacttccggacttcacaaaggatgcaaccgaccgcaaccgtacgtcaccgtttgcatttaccggcaacaagtttgagttccgtatggtaggatccagagattccatcggatccccgaacatcgtgctgaacacgatcgtggcagaggcattctccgatgcatgcgatatcctggagaaggctgacgatttcgatatggcagtgcatgatctgatcaagcagtatgcaaatgagcatcagcgcattgtcttcgacggaaacggctactctgatgagtgggtggcagaggcagagcgcagaggacttccgaacatcaagtccatggtagatgcgatcccggcactcgtgaccgacaaggcagttgccatgttcgataagtacggtgtattcacaaaggcagagctggagtcccgtgtggaagtcaagtatgagaactactccaaggcgctcaacattgaagcccgcacaatgatcgatatggcaagcaagcagatcatcccggcagtcatcaagtataccagaagtctggcagagacaatcaacgcagtcgtaaaggctggcgcagaggcttcggtacaggtggaactgctgaatgagacgagcgcactgctctctgataccaaggtagcgcttgcaaagctgatcgatgtgacagaggaagcagcaggtaaagcagaaggcgaagagcaggcaagattcttccatgatgttgttacggtggcaatgagtgaactgcgtgcaccggttgacaaacttgagatgatcgtggacaaagagatgtggccgatgccgtcttatggcgatctgttatttgaggtataataaagtttacaactttttgcagggatttccatgcgggaacgtggatggaaaaaacggcagacaaagaggcgctgggtgaagaattcagcgcctcttttgttgtgctctgaccaaatcaggcagaatttctgcaaaaggaaatatccgattcagctttatgcagacacaaaaaaggcctcgcaccatgcgaagctttttttgtaaaaataaaaagaagaaagggaggatgccaggtaaaacctggcgtattatgaaaaagtttatcgaaataaaacttgtaagcgatataggattgtgtttgaagaacttttttgttcctcttttgtatttcttaatgtaacaacagtataaaaagaagaagtgaaaaaaacgtgagggcttcttgaagattttttgaaagattcatgaataaaatgtgaacggcggaataaactaatcagggtatacttagtaaaagttcacaattatgattgattttttttgatacatatattaaaataataccagttacgcgacaacgcgaagaaagaaatcaggataatcgtgcattttgactggcaaaaaattgtgggggaagccagcagagccgcagagaaggaggatgggattgtgatttcaaatcaggttttacagacgacactggatggactgaaggcgatcagccgggtggatctttgcgtgctcgatacggaaggcatcatgctggcgacgacatttccggaggcagaagggtttcgtgattcggtgcttagttttgcagagtctccggcagacagtcaggtagtgtcgggatgtcagtttttcaaggtgtttgatgagcatcagctggagtatgtacttctggcaaacggcaacagcgatgatgttcatatggtgggaagaatggcggcgttccagatccagaatcttctggtagcctataaggagcgcttcgacaaggacaactttatcaagaatcttcttcttgataacctgcttctggttgacatttacaatcgcgcgaagaagctgcatattgacacggaggcacgtcgtgtggtatttatactggagatcagtcatgagaaggaaaatagttcccttgagactgtaagaggactgtttggttccaaatccggtgattttatcactgccgtggatgagaagagcattatcgtggtcaaggaactggcaccgcaggacggaagcgcagagatggatcacattgcagagatgatactggattctctcggcgaggaaaagaagaaaaatgcactcatcgcatacggtaccgtagtcggcgagatcaaggaagtttccaggtcctacaaggaagcgcggatggcactcaacgtcggcaagatcttttttgcagagcgtcaggtaatcgcatacagctctcttggcatcggccgtctgatttatcagcttccgattccactttgcaagatgttcatccgtgagatctttgacggcaaatcgccggatgatttcgacgaggaaacgcttgtgacgatcaacaaatttttcgagaacagcctgaacgtgtccgagacatcgcggcagctttatatccaccgcaataccctggtataccgcctcgacaaacttcagaaatcgacagggcttgatctgcgggtgtttgaagatgcgattacgtttaagattgcattaatggtagtgaagtacatgaaatatatggaaaaccaggaatattgataccaaaggggaccgaagtgacagattccgatcatgcttgcatgaggaggaatctgtcactttgggacccgcagccccaatggggaaggagcagctgtgctgcggattccgaacctgggcacggattgcgaagcaagccgtgggtatcaataaaagtggagagaaatatagaaaaataaggaggcgccggatggaccatttgccggagaaggacgaaagaaaagaagacctgatggaggaaacggaggcagcaccgcagcgacatcaaggcagctttacgaccggatttctcgcaggtgtcctgacggcgcttttttgcgtgtctgtttttctgatgggctggaacatcggcgagcggagatttgccaaaaaagatacgtcgtcggtggaggagacagaaaacggagcggagatcctgactgatccatcgaccttttcgatgctggaagaggtaaaaaatctgatcgaaaacaattatttaaatgacgtggacagtgacctgctatccgcttatctgtttaaagggatcgcggccgggctggatgatccgtacgccaattattatacggcagaggaactggaggatgtggtggatgcaagccgcggtgaatacaccggaatcggcgcagtgatcgaacaggacgcaaagacaggcgaattcagtgtgaatgacgtgtatgttggcagaccggcagagcaggcagggctgcaggcaggtgacattctggagcagatcaacgatacgccggtggatggaatgtcattaaatgatgtggtggatctgatcaagggagcggacggagcttttacgatgaaggtttatcggccgactgcggatgaggagttttcatttgagatcgagtgcggcgaggtgaaggttccggcggtgacgtataagatgctggaggacgggatcggctatattcgtctgaatgagtttacggaggttgcagtcggacagtttgtggatgcggcagaaatgctggaagatcaggggatgcagaaactgattgtggatttaagagacaatccgggcggattgctgacatcggtgtgcgatattctggacgaagtgctgccggaaggacttctggtctacacggaagataaggacggcagccgtgaagagtacaattcagacaggatgcgtaccgtgtactgtgagcttgcggtgcttgtgaatgaaaattccgcgagcgcatcggaaatttttgcgggagcgatccaggatcacaaggccggtacgatcatcggtacgaaaacttacggaaagggaatcgtacagaaaacgtttcctctctcggatggctcagcgtttaagatgacggtagagaaatattatacgccgcttggtcaggatatcaacggaaacgggattacgccggatattattgtggatagcgaagagaaaaatgcggtggctggtggagaaagcggcgcatcagcatccggggatggggaaaatattgacgaagcctctgatccggtgctgaaaaaagcattagaagtgctgagagaaaagatcgcggagcactaagcggtagatgggatgtttatgtcatgtcagtgggaggatatagataaaaatggacaacagaattatatttcgtgaaatactcggggatatacgcagggcggcggacgaagcgggaggcgtgatcacaaaagaggagatcaaagaacggctttcgcatcttccgcttggcgaagatcatctgaagatgatttatcagtatctgagtgaacagggcattcaggtaccggatgatgcacaggaagcagcagagcttccaaccggagaagaaggctttgcactttccatttatctggaagagctgcagcagctggccgaaagagaggacgaggatgagacggagcttttgaaggctgtggctgccggagaggcgcaggcgcgggagaagctgatccgctggtatctgccgctgatctgtgagatggcaggcgagtacgagggcgatgagatcgcggcggaggatctgatccaggagggaaatgtcggacttttgatggcgatggagagcttaaacgagtttgagaatgcagccgcgagccaggcacacctgcttaattccgtgaatgaggcgatgcaggccgcaatccacgcgaacgaggagacgaaaaaaagaaacgaagatgtggtaagtcaggtcaatcatcttgatgaggcgatcaaaaatctggaacgcgacctggagcgcaaggtttccgcggaggaactgtctgcgtacctggatatgccgctggagcagatccgggatatcctgaatatctccggtgatcagatcgaggtggatggaaggaagtaaagcgaatattcatgggtgttttataaaagtttgcctggttttgaacagtaacaaatctatgttaaaacgaggtaaagattaaaaaaatccgggcaatcgatgcaaaaatgtgctagaataaaacggataaagactggacaacaaaaaaataaaaatacaggaggcagagtataaatgaagaagacgaaaattatctgtacgatgggaccgaatgcggacaagcgtgagacgctgaaggcgctggtggaaaatggaatggatattgcacgtttcaacttttcacatggtgaccatgaggagcagaaggcgagatttgatctgcttaaaagtgtccgcgacgagatgaaaaagccgattgcgatcctgttggatacgaagggaccggaaattcgtacagggcttctggaaaacggcggcaaggtcgtgctgaaggaaggcgaagaatttattctgacctccaaagagataaagggcaatgagaaaatggtctatcagacgtattcgcagctggcaaaggacgtaaaaccgggcaatacaattctgatcgatgacggactgatcggactggaagtaaaagagatccgcggcggcgatattgtctgtaccgtccgcaatggcggcgagcttgggcagagaaagggcatcaatgtaccgaacgtaagagtaaatcttccgggaatcacgaaaaaagaccgtgatgatattatttttggcattgagcagggaatcgattttattgcagcatcgtttgtgcgtgatgcggaggcggtaaaagagatcagggcgatcttaaaggagcacaacgctgagcatgtggatatcattgccaagatcgagaacagtgaagggattgaaaacattgacaaaattgtcagcgcagcagatggaatcatggtagcccgcggtgacatgggggttgagattccggcttatgaagtaccgcatgtacagaaaatgatcgtagaaaaatgcaaccagaagtacaaaccggttattatcgcgacccagatgctggattccatgatccgtaatccgcgcccgacaagagccgaggtaaccgacgttgcaaatgcgatccgcgagggcgcagacgcaatcatgctttccggagagactgcaatgggcaaatatccggtagaggcgctgaagatgatggcgcagatcgcagaatccacagagcagtatctggattatgatatgatgccggagtatcgtaccctgcgcggtgatgcaaatgtatcaagtgcagtcggcgtagcggcagtgcgcacggcgacgaatctcgaggctgactgtattgtgacaccgacgatgtccgggcagacggcaaggctgatggcgaatttccgcccgaaacagccgatctatgcggtcacgccgaatgcatgggcacagcggaaaatgcagatctactggggcgttacaccgcttcgtggatatcaggaggatacgactgagcacatcatttcccatgcaatgtacgtggtaaagcgggaaggctacgtcagggaaggcgatatggttgtatttacagcaggtgacccggcgacaaatatggtaaaaggcaagggtgcaatgaccaacatgatgcacgtgattcaggcaaagtaagtgaaaacgcctgagcaggtgaaaagcctaaggaaaatttaataaaatattgacagaaaataaaacagcttctggtatactgagaacagacgtgtgctgctcagcacctggggctgttttttgaccgagtcaagctcaactgcatggagcaatgagcagtggggaagaacccgcttgcgggagaattttttatgaccctgtaagcagcgaagcggattgcgaatatcggcgctgatctcagatcaggcacaaaggcagatcatagatatggatcaggcaggaaaaagggggaagtattatgtatacaattttggtttgtgatgacgaaaaagatatcgtggatgcgatagagatttatctttctcaggagggataccggatcttaaaggcgtatgatggtctgcaggcgcttgagatcctgaaaacagaggaagtacacctgctgcttctggatgtgatgatgccgaagctggacggtatccacacaattatgaagatccgcgagacaagcagtatcccgatcattgtactgtccgcaaaatcgcaggacagcgacaaagtgctcgggctcaacctgggagcagatgattatattacaaagccgttcaatccaatggagctgctggcgcgggtgaaatcacagatccgccgctatacgaattttggcgcggcgggacaggaaacatcggagcagatatattcaaccggcggacttgtgatcaacgatgatcgaaaagaggttaccgtggacggagaaccggtgaagctgacgcggattgagtacaacatcctgttgtttcttgtgaaaaataaaggcaaggtcttttccatcgatcagatttatgaacaaatctggaaagaagaggcatatggcgcggacaatacagtgaccgtacatattcgccatatccgcgaaaagatcgagatcgatccgaagaacccgaaatatttaaaggtgatctggggcatcggctacaaggtggagaagctgtagaaggaaaggaaagaaacgagacaggcaggttttatgtaatgcagcagtgagtgacagaaatctgctttgaatttcagcctggcttgatagttatgaagaaaaaacggtcaggaaaaggggaaaagcggtgcatgcatttttagaaaggctgctttataaaaagaaaacaaaatggattctgctggcagtgcaggccatctgcgcgggagttctggccctgtgtcttctgacaatcggattctggatgggggattcctacagcctgcgtgagatgtccaaaaattttgaggaatcagatctgtttttccggcaggtggatacgatcctgcgcaataagatcgacgggcaggacaacgatgcactgtttgaagaggatggcgaatattccggcaataaggagatcgatattcagtcttatgggaagagcagcagctccgtgcaggatatgaatacgacgtaccttgtctctgatctcgtggtgttttgccaaaacggcggccagcaggcgctggagcaggcgattaacagggcaacacagggagacaacaggcagcttgcgggggaacgtctggaagcgcaggcacagactttggagacgatccatccggtgaccggcatctcgctggcggagtgtgcacggtggtattcagattccgccggatttgtgtttgatatgtatatgcagctgaatcaggtcagtaaacagatttatgagcggtatcagcagtatacacaggaacaggaggagagctggtctccggcggcaccaagcaacctgtgctactgtatcgaaaatacagcaaccggagaattatatacaaatcttgggatatcctcctatgaggaggcagcgtcggtacttccttcggatggtccctttgtaatgctttacgaaggagagcggagctacaatatcatggtcagcaatccggacaatgtgctgaatgatgcagcagctgactggtatctggaagaccgctttgtcaattccaatgaaaaaattttccttgcgatcaatacggagtatccggtgcaggatgaactgcgtatgtatgcggattacttttctcacagggaagtgatcgtgaaaggctgtgctgttctggcagttctttgcggagtgtttttagtcgctgcatttgttttttccgtaatcagtgcaggttggcaggagggaaggctggcgacgcgggtttactggatggaccggatcccgacggaaatcgctggcgggctgtatgtgattcttggaattcttgtgatgacagtacttaattttcgcacgccggagccaatgatgataagcggctgggagcggatcgtgtggtcgatcgccgcatctgcggcatggctgctggcgctttctgcatttaccggttttgtgcgaagactgcgtgcgcatcttctgtggcacaacagtatctgcaggatgctgttgtatacctggaagcgcgtgactgctgcgcgggcagcgtccggacagcttctgtttttctatatcatcttttttatcctgaatttcgcatttctcctgttttttggccgggtgggtatctttatggtatttgtactggatatggcggtgcttctgtatctgctgcgcgacatggcaggaaaacagagtgtctgggagggaatccatcagatatcaaagggggatctgcagtataagattgatcttgcaacgctgacgggtgagacgtatgagatggccagggcagtcaatgaaatgggagacggacttcaggaagcagtggaagcaatcgtgcgcaacgaacggttgaaagcagaactgatcacaaatgtttcccatgatctgaagacaccgcttacttccatcgtgaattacgttgatcttctgaagcgggagcatctggaaggagagcgtgtacaacattatattgaggtactggatcagaaatcgcagcgtttaaaacagctcactgaagacctggtggaggtcagcaagatcagttcaggcaatgtggagcttcatatgatgcggcttcaggtgcagagcatgcttgatcaggcgtacggggaatttgaggatcggcttgaggaaaaaggactgacggccggctgggatatggaaaaagagccggcatatatcatggcggacggcaggcagttctggcgcgtgctggagaacctgcttggcaacatctgcaagtacgcgctggaaaacagcaaagttcatatcggacttaaaaaagaggacaaagaggtgcagatcacgctcgaaaaccagatgaaagaagcacttggcatatcggctgaggatctgatggggcgttttgtgcgtggggaccgcagccgtaatacagagggaagcggcctgggactttccattgccaaaagcctgacagagctgcagggcggtacatttttacttgagcttaaggagaaccgctttattgtccggcttacgtttccggaggcagagggagaatgacgtgacggatccgccggatacactcccataaacatccgtaaaacacttgtgtttttaggctgtttatgggagtgtatttgcctctgtacggctgcactttataaaaatatcacatatctgaaatttatgtgaaatcggaggaggaggcgttgacattcagggatattggcggtacagttctgtatagattaagattagtcgattaagaatgtgaggttattcaaatgagaagacgactggaagaatttatgcagggacgctatggagcggatgagttttcaagatttatcatggcagtgacgctggtactgctgatcctgaatatgttcacgagaatcccgcttctttacctgctggcgcttgtactccttggttacggttatttccggatgttttccagaaatatttcaaagagaagcagtgaaaattatgcgtatcttcagaagacggagcgtatccgcgcatggtttgacaagatgaaacggcgcatcgtacagagcagggagtaccatatttataagtgcccgtcatgcggacagaagattcgggttccgcgtggaaaaggaaagatctgtatcacctgtccgaagtgccggaaagagtttgaaaagcgcagctgaaaaaggatgacagaatgtttggatatatttatgtgaatgaacaggagctgaagcttcgagagtacacggcataccgcagtttttactgcggattatgccgtaatttgtatcagaggtatggacggaccgcacagatgatgttaaactatgatctgacgtttctggccatccttctgacagggctgtatgagagtgagacaaaggtggaggagcggcgatgtattctccatccgctaaacaggcataaaagtgcagaaaacgatgcgatttcctatgcggcagacatgtgtgtgctgctctcgtatcacaagctgaaagatgactggacggatgagcacagtataatcggtgcgtcgggtgcggcacttctgaaaaagagctgcaaagagctgatgcagcgttatccgcgtcagggaaaagcaatcgaggaaaatatccggctgcttggcgaggcggaaaaagagcagaaaaaagacatcgattatgtggccggcctgaccggacattttctgggtgagatttttgtctggaaaaaggatgtctggcaggaggatctgcggcagatgggcttttatcttggaaaattcgtgtatctcatggatgcactggaggatctgccgaaggatcggaaaaagaagaattacaatctgtttctggactgcggcgatgtgttcgaagcgtccgaggaaccaaaataccggaagatgctgacggacgttctggcagagtcagcgcgcgcatttgagcggcttccgattctggaatatgcaggaatcctgagaaatgtactgtattcaggagtctgggggagatatgttctgataaaaaatgcacatgatgaaaagcagcaaaagcatcagagcaggaatgaggagacttgaaaaaagattatgaaaaatccatacgatgtactgggagtaccacagaatgcgtccgaggacgagattaaaaaggcataccggaagctgagcaggacgtatcatccggatgcaaatatcaataatccgaacaaggcggaggcagaggaaaaatttaaggaaattcagcaggcgtaccagcagattatgcaggaacgcgagcatggcaccagcggccagagcagctatggcgcaggagcgggcggttacggttcgcagggcggctatggaaattatggtggattcggagggtttggaggctttggcggattcggcggttacgacggcggtcagtcacagggcagccagaacacttcctggtctgaggaggacatgcggatgcaggcggcggaaaattatatccgcaaccgggcgtacgcggaggcgctgcacgtactttcggagatcaatcagcacacggcgcgctggtattatttaagcgccatggccaattccggacagggcaacaacattacggcgaaggagcatgcgcagaaagcggcggcgatggagccgaacaatatggcgtaccgccagcttgtgcagcagctcgaaaacggcgggcagtggtatcagacgatgggtgaatcctacgggaatccattcgagggcggcggagactggtgcatgaagctctgtgcactgaatctgttctgcaactgttgctgtggcggaagaatgttttactgctgattgtgagaaggacttgtcaaagcagatatttgtaattgaagcagggaacttgctttacctggttaaatgcgcaaaaaagctgccgcatgcatccatgccggaatgtatttgaaaatactccgggaaacatggatatgtggcagctttttattttatgcaagggttcagaaccaacagtcagactgcaggcatttctcttactcgttcagatcagatgcacagtgcggacattttactgcgtcgatgtggatctcggacttgcagaacgggcagatcttggtggtcggagccggctccggggccggtttgtgcagcttgttgatgcctttgatcaccaggaagatgacgaaagccgtcagcagaaactgtacgacgatctgaatgaaattaccgtatgcaatgaccggtgcagctgcgtcctgagcagctttgagggaagggtagctgttgccgtcgagtgcgatcagcatatcggtgaagttgatcttacccgtgatgagcgtgatgactggcatgacgatgtcgttgacgagcgagctgacgatgttgttgaaagcaccgccgatgataacgccgactgccatatcgatcacattgccgcgcatgatgaattccttgaattcttttacaaatactttcatggctttctcctttgaacagtaacaagattttataaagttttaataattatagcacgtcaatctgaaaaatgctatgatagagtagaagataattgttatggaggaaaaagtatgcgttttatgcacatcgcggacgtacatcttggtgctgcgccggatcacggatatccatgggcgaaggcgcgcggaaaggagctgtgggagggatttcgcagatgcattgcagatgcgaatgaaaaaaaggtggatcttttgctgatcgcgggggatctgtttgaccgcaggccggaaatcaaagagctgaatgaggtaaattatctgttttcaaccctggaaaagacagtagttgtgctgattgcgggtaaccgggattacctggaaccgtcatctccgtatctgacatatcagtggaatgaaaacgtgatcacgattttttccaggcagctggagcggattcgccttccggaactgaagctggagatttacgggatgagctatcatcacagggagattccggagccggttatgacaggtgtgtgcgcggaaaaggatgaatattttaagatcctgctgctgcacggaggagacgcttcccacattccgctgaacaaagatgagctgctggatgcaggttttgattatatcgcactggggcatcttcataatccgcaggtttacattcggaatctggctgtctatgccggagcgccggagccggtctgcgcggaggatacaggggaacatggatatgtgctcggtgaggtgcagagaaaaaaggtacatatttcatttgtggagatggaaggacgccgctacctggaaaaagcagttgaagtgaccgagtcagataatccctattccctgcaggaaaaaatcagcagtgtcgttgccagggacggtgcgcagaacatgtaccgcattacactcaccggagagagagatcccggatttgtgccgcaggtgcgcgaatatctgaaatgcgggcgcatcctttccgtgactgatcagacggttccggcgtttcatctggatgtactgcgaaaaaaatatgagggaaaactgatcggacgctttattgaatcgttcggagagggcggaccgaccggtgtgacagaagaaaaagcgctgtattatggactggaagcgctgctgtatccgggcggacagccagagaagaaaccaggaagaagggagaaaaacagtggagattgaaagactggatctgatccgatggggaaagttttcaggccatacgatcaggctgaaatccggcgtcaatattatctatgggggaaacgaatccggaaaatcgacgatccattcgtttctcggagcaatgctgtctggaacgccccggaaggcggaaaaaggccgcctggcatctgacaccttccttaccggaggggatggcgagggcgcgatgacaatctgggacggagggcagcgctatgaactccatcgtacctttgctccggctcccggaatcctttccataaggcaggaatcagaaggcgcggaagatctgaacagttgggaagagatcgatgaaccgcaggagatactgtcagacctgcttggcggtctggatgcagaaacatttgaaagtactgttttctggaagcagaaccagacggcatgggatctgtatgtggaggatggactgaaacactgcctgaaggtgtctaaaacaggagaaagcgtggacggagtacaggcacttcaggttctggaggagcgaagaggaaaggcagagcagaaaaaaaagaaagaagaggatgcattagaagaacggatccggaaacgtcagacggaggcagaatacgtgcgcagggaagccggacggctgcaggcacagtgcaatgcgctgcgcgttggagcgcagaaggaagaggacgaagaggactgggagagagagggatttaccgaaacagggaaaaatctgatccagatgcttctgctgctggctggtgtactcgcgctgctgggagcacttttgctgcagaatctcatcctgcgtgttttccttggaattttcggaggagcatttttactgctgtttttcccggtcaggcgttttctgctgggagaaagtgccgatggagaagcggaagggtacgatctttcgctcagggaagagcaactgaaggcggaaatccgaaaaaaagaggatacttatcaaaagcttcaggaagaactggagcagctttaccatcagcatatgaggatggagacggcagatacggaaattgcagccttaaatcttgcgatcgatcggatccgggagctgtcagaggaagaaaacggcggtccggcaggagaaatcagtgtgcgtgcatctgagatcatccgggaactggcctgcccgtcgtgtgaccgtattgttgtagagacgagcggacggctgcgtgcctgtcttggtggccatatcattgatcggaaaaaggtcagcagcagtacattgcagcagattcgttttgcggtccgtatggcagcgggagaagtgctggcaggcggggaggaattgccgtttctgctggatgagccctttgcaatgtatgatgatgagcggctgcgcagcgtcctttcgtggctggaacgcagcggccatcaggttgtgctgtttacgtgccagcagcgcgtaaggcagatcatggatgaggtgcgcagaaatgtatagtatgttcaggagattgtgccatttgcgaaaaagaaaaaggattatgtttttgagcagtatatggtgaagtcagataagaaaagttgacaggaaaagaaagtgcttgtagaaaaaaaggagggcaggtcatgcttcagattggatgtcatttatcatcctcgaaaggttttctgcatatgggagaggaagcagtctcaatcggtgcgacgacttttcagttttttacaagaaatccgcgcggcagcaaggcaaaggcagttaatgaaaaagatgttgcagcctaccttgcatttgcaaaagaaaatgaaatcggaacggtcgtggcacatgcgccatacaccttaaatccggcttctgcggatccgaaagtacgcgagtttgcacggatgacgcttgcggatgatttaaagcggatggaatatctgccgggcaatgtctataactttcatccgggcagccatgtcggacagggagtggaaaaaggaatccaggagatcgcggagatgctgaacgggattctcagcccggagcagcagacgacggtattgcttgagacgatggcgggtaagggaacggagatcggaagccggtttgaagaacttgcggaaatcatagagcgagtgcagcttcaagataagatcggtgtctgcctcgatacgtgccatgtgtatgatgcggggtatgatatcgtacaggatctggacggtgttctggaggagtttgaccggatcatcggattaaaacggctgaaggcgatccatgtaaatgacagcaaaaatccgttccgaagccacaaagaccgccacgaaaaaattggtgagggttctatcggatttaaagctttgcgaagcgttgtgcaccatccaaagctgcaggggcgtccgttctgcctggagacaccgaatgagctggacgggtatgcacgggagattcagatgctgagaagcagctactcggttatgaaatatcataaggaaggacccgcttgcgggaggatcccttatgatccggcaagtagcgaagcggacctggaatatccgctttgactaacgtcgacagtctttcggggagcagccatatttttttaaataggcacgatagaatgcactgtaagatggaaagccgctctggagcgcagcttctgtcaccgggcatccggactggatcagggtgcgtgcggcaaagagccgcttttctgtgagatagccgccgatcgtagtgccggtctcctgacggaacagatgcatcagataggagcggtgcaaaaagcaggcagaagcaatctggtcgatggacagttcgcttgaaagatgctgattgatataggaaatgacctgcaggatctgcgggctggaaattgatgaggcaggaaacgcaggcgagccttcttctgtccactggtttaagagcagcagaaactgaaccaggaccgatttctggtacagaaggtcagatggatcggccggccggcgggcgcactgtgaaagctcctgtaatggcgtgtacagcctgctttccgaaagatctgaaaaacgcagcacgtgcgacgcacgtgcagaacaaagagagaagcactggaagagatccaccgattcttttttgtatgcttcaaaaaaagcgggtgagaggtagaggatcaggcggcggtatggaaggctactgtggatgacgggacggtgcacttcgccagccggcacaagtacaaggtcgaacggctgaagctcgtacgtttctccttcaacgtagtaactgacgtttccggattcaaaaaagagcagcttgtgaaagctgtggtagtgcggctgaaattcgccttcctcttcgcttacaagggaaaaaatgcggaagtcatcgtcaagatagccggtctttatagaaagagcgggagatttgagctcctgtattttgtcggaggattgtttcgtgtacatagttgtgttctcctgtaagaatgcatagaatttctgtgaatggttttctctgagtatacagcattattcgaaagaaaaacagcacaaaatcaatttttattttaaataatattgaatagaatggagatgtgttgtgaaataaaatttttgcttctggtaagaggcaggcagtgattcggtaatgagtgtggctgcgggcagcagctttatttgaacgacaggtcgcgaagcgactgcgttcatgagcaagtagcgaagcggattgcgaatg

SEQ ID NO: 1977 - DNA, 2661 bp, Unknown
  16S sequences of unknown bacteria
gccgatcgtgccgccgatgaggccaccgccccagaccatgtgcgcgagcgggccgtagacgacgatgacccacacggagaggatggccgcgatagcgccgaacttgatacgaccagagacggagccgacgatgatgccgaccgtgatgcagcaaaacgcgccttggaacagcacgaacgccatatcgggaagtccctcgacgcgggtctcgattgcagcggtcatatcagtgcccgccaagaacagctgatcgaaaccgccaatgatctgaccgatgaaatcgcccgagtcggctgggaactgatacccgaaggcaatcgagtaccccaagatgacccagatcaccgagcagaccccgattgcgagaaacgccatgatgatcgtgttgccgacgtttttcttgcgcgacaggccgccgtagaaaaacgccacgccaggtgtcatgaacagcaccatcgacgcgcagatgagaatgaagaccgtcaatgcagtatccatgcgcatcctccttgatatgcgtaacgaataggacggtctctattcttgacctggggatgctggcgcaggttaagcacgtgttacaaacgattaagcctttgtttcgagaatattttcattttgtttcggcaccgttctcacactcgacgcgcaccatgagaagccactcgtccaccagcgtctcgaaagaaagcgcctcgacgacgctatcgcttcggacgcttcgcaagatggcgtcgccaccgtcgatgcccacgatgcggcgcatcgccgtcccgcgtttgagccgcacgagtgcgccatcgacgacgtcgtcatacgtgagcgggaccaggtcgtaggagacgccttgcaaggttaccttcgtgttcttcccgaacattgtattctccttgagaaagaatattgttcttacgggagaatattagcacatctcacatttacctcgcgtttcaggcaatcgcgcgcccatcgaggggagcaatgccgtgaaacgcgaggtaatccgaatagctaatgtgcaatcgcccagttggggccggtctggatatcggcggtgagcggaaccgagagctcgacgacgttgtccatgacgtcacccacgagctcggtcaggcgctcgacctcgtcgttggggcactcgaaatcaagctcgtcgtgcacttggatgaccatgcgggacttgagcccctcggcgcgcaggcgctgctcgacgcgaatcatcgcgagtttgatgatgtcggcggcgctcccctgcatgggatggttcatggccgtgcgctcgccgaagtggcgcatgttgacatttgatgagctgagctcggggatatggcgcttgcgcccgaacatcgtgacggcatatcccgtctcgtgcgcctcggcgaccgtgcgatccagatactcgcgcacacccgggtacgcgcggtagtagcggtcgatcatctcctgcgcctcggccatgggaatgtgcagcgactgcccgagcccaaaggcctgctggccgtagacgatgccgaagttgacggccttcgcatggctgcgcatctccggagtcacctcctcgaccggcacgccgaacacgcgcgcggcggtctgggcgtggaaatcctccccgcttctgaatgccgcgatgagcccctcgtctcccgagaggtgcgcgaggaggcgcagctcgatctgcgagtagtcggcgctcaggaacacgccgttttccggtgcgacgaacgccgtgcggatacggcgcccgagctcggtgcgcacggggatgttttgcaggttggggttcgagctcgacagccggcccgtcgtggtgaccgtctggttgaagctcgtgtgaatcctgccgtcgttggcgttgatgagctgcggcagggcgtcgagatacgtcgatttgagcttggccagctcgcggtactcgatgaccttggcagggacgggatggtcgtctttgagcttctcgaggactttctcgttggtcgaccagccgttcttgttcttcttggacttgcgcgaatcgagccccagcacgtcgaacaggatatgtccgagctgcttgggcgagttgatgttgaaatcctctcccgccagctcgatgatctggtcgtgcagctgctggatgcgcccttcgatgctgtccgaaatctgcttgagcacgtccgtgtcgatgtgcacgcccacatgctccatctgggtgagcacgggaagcagcggcatctcgatgtcggtgaacacgctgtagctcttgtcggacttgaggcgctgctcgagcacgtcgacgagcgccgcgcacacggccgcctcgaactgccccgaactcggcgctccctcgccagtgggctcagccaacagcaggtacttttccgcaagttccgttgccgtgtagctcttgcccgactcgagcagataggccgccaccccgcagtcgaacagccgcgcaccatcgatgttgtcgaagctgtagccgtgcttcgtgccgacggggaacacctcgcgcagcacgtgcttgatgtctgccgcggcgagtttgccggaatcgagaagctgtgccacgagcggggcggccttttcgagttccacctgggcaagcccggcaccgtccgaaaacacgaggttgtacgtgttgtcgaacagcgacagctccgtcggctcgtcgatggcgaccgc

SEQ ID NO: 1978 - DNA, 13778 bp, Unknown
  16S sequences of unknown bacteria
cccgccggcgtatttcatcctggtgcgcttttttctcctgccactcctgcaaaattccgcgtgctttttccaccagaggttcgatataccgcacatccacaaaatccatctgcattgccagatacgcctgggcgttggccggatctttctgagcccgctctttcatggccatgcgcatcacccaccggtgaaagcggcctaatttccggccgtctaccgcgccgggaaacgcaaagaaatgaattcgctttctcattttttccgtaaagttgcgggtatataaaaaagtatagtatccgtcttccgtcggctcggtcagccccgctgtaaacacaaaaagcgttttgtccgccaactcctgaaatcttctggtcagcgacgaaatgccgttgatccgccccatgtaaagaccgccgccaaaaatcagcattcggtattctaacagtgtggcggttttgacctgtgacaccggcattgcttcgcattccagtttctcggcaatccatttggcataacgctctacggcgccatatcgggatttataaaccacaagcacatctttcacgaattttccccatttccaaggacagtcacgccctttttctttattttatcacagcaaacccaaaaacaaaagaaaatttgagcgtctgctcattccccaaaacgcttcatggaaaagagcgattttttcctgctcttgagaaagattatccgtttaccgaaaagaaaaacgactatgtacccgccgtcagcaaagcggtttttccccttgtcaattccattaaggcggcaggcgccagttctacctgccagccaattttgcccgcgctgaccatcaccgtttcccatttttccacttcgctgtcaaaaaaggtggaaaacggtttcttcatgccaatgggcgaacagcctccccggacatagccagtcagcccaagcagttcgctgactgggaccatctccactgatttttcgcccgccgcttttgccgccttttttagatccagcgtgctttccgccgggatgacgaaaacataatgatttttgctgtgtccgtaggcaaccagcgttttgtaaacctgccgtgggtcctgccccagcagccgggccactgtcatcccgtccaccggctctttcccgtggggatagctgtgcgcctgataagggaccttcttctgctccaaaatccgcatgacattggttttcgtctgcgccatatttacatctcccattttcgttttggtacgacaaaagagcctcttccctgcggaggaggctctttttttatttttcttcaccgcccagagcgtccttcagcttttcaaagaagcccttgcgtttttcataattcttttccgtagtgaccttttcaaactctttcagcgcctgcttctgcttttgattcaggtttttcggcacttccaaaacaacggtcacatactggtcgccgcggccccgtccgttgacatacggaattcctttattgcgcagacggaacaccgttcccggctgcgttccctccggcaccgtgtatttcacctttccatcaatggtgggaaccaccacctcgtcgcccaaagcagcctgcataaaggtcagcggcacttcgcacagtacgttgtacccatcccgttcaaacagaggatcggggcgcaccgaaacggtgatgttcagatcccccgccgggcctgcgttgcggccatgatcgccctgcccctgcagtgcgaaagtctgcccatcgtcgattcccgccggaatattgactgtcattttgcgggtatggcgcacgcggcccttgccgttgcagccggtacagggcgcgttgattaccttgccggtaccgccgcaccgctggcagggccgggtagactgaatcaccccaaagggggtccggctctgtacccgaacctgacctgttcctttacagtctgggcaggtctcagggctggtacccttggctgcaccggtgccgccgcagtccgcacactgctccagccgctggatggtaacctccttggtacagccatgggccgcctccataaaggacaggttcagattgatattgacatcgttgccccggatgggtgcgttcggattgcgggtacgggtggatccgccgaatccgccgaatccgcctccgccgccgaagaaggtatcaaaaatatcgcctacatcaaagccgcccatgccgccaaagccaccggcgccggcgccggcgcccgctccataggacggatctactcccgcatgaccgaactggtcgtaccgggcgcgtttatccttgtcggacagcacctcataggcttcattaacctctttaaatttggcttcggcttctttatcaccgggatttaagtccgggtgatacttctttgccagctggcggtatgcttttttcagttcgtcgtcggagcatcccttttgaacgccgagaacctcataataatctcttttatcggccaaaaatatcaccctttgtcatctattttgtctttgaccgcaaaggctgccgcaaaggcgcatcccgcgtcccggcggcagcttgctgcaggttttataccacattatttctgagaatcgtctacctctttatagtccgcgtctacatatccgtcgtcaccggccggaccggactgagcgccggactgcggttccccctgcggtgcgccctgcgcgccagcagcgccgtatactttggacgatacctcatagaattttttctgcagatcttcctgttttgctttgatatcgtctacgttggaacctttgagcgcttcttttaacgcgttgatcttgttctccagctcgcctttgtcggtagcgtccagcttgtcgcccaagtcggtaatcgtcttttcggactggtataccatctgatcggcgttgttgcgcacatcgatctcttcccggcgttttttgtcctccgcagcgtatttttccgcttcttttactgctttctccacatcctctttgctcatgctggtagaggaagtgatggtgatgttctgctccttgccggtgcctttatcctgggctgaaacatggacgatgccattggcgtcgatatcaaaggttacttcgatctgcggtacgccgcggggtgctgcggggataccgtccagatggaacatgcccagagatttgttatccttcgccatctctcgctcgccctgcagcacatggatctcaaccgaggtctggccgtcggcagcggtggagaatatctgggattttttcgtcgggatggtggtattgcggtcaatgatcttggtgaatacgccgcccagggtttccagacccagggacaggggcgttacatccaacagcagcaggcctttgacctcaccgcccagcacgccgccctggatggccgcgccgatagcgacacactcatcagggttaatgcctttaaacggatctttgccagtcaagctcttaacagcctcctgtacagccgggattctggaggaaccgccgaccagcaggattttattcagctccgatactttcaacccggaatcagacaaagcctgacgaaccgggcccatggtcgcttccaccaaatcgtgggtcaattcgttaaatttcgcacgggtcaaggtcatgtccagatgcttcgggccggtggcatccgctgtgatgaacggcagattgatggatgcggtagtcatgccggacagctcaatttttgctttctccgccgcttctttcagccgctgcatcgccatcttgtcgccggtcaggtcaatgccggactccgccttgaagccctctatcagccagttgatgatccgctggtcaaagtcgtcgccgcctaaacggttgttaccgttggtggccagaacctcctgcacgccgtcgcccatctcaataatggatacgtcgaaggtaccaccgcccaggtcgtagaccataattttctgatcctgctctttgtctacaccgtaagccagcgctgccgcagtcggctcgttaataatccgttttacgtccaggcccgcaattttacctgcgtctttagtggcctggcgctgtgcgtcggtaaaataggccggcacggtgataaccgcttcggtaaccttttcacccaaatagctttccgcatcttctttgagtttggtcaggatcattgcggaaatttcctgaggtgtatagcgcttgccgtcgatctcaacggtatgggcggtgcccatctctcttttaatcgaagcgatagtccgctccggattggtgattgcctggcgttttgccacctgtcctaccattctctcgccggtcttggagaacgcaaccaccgacggcgtggttctagcaccttccgcgttggcgatcacaaccgcttcgccgccttccataacggctacacaggagtttgtagtacccaagtcaatgccgataatttttcccataataaattcctccttacagtacagcgcttttgggcgccttcccctcatctattgtatctaaaaaatttgctggcgttaatttgccacctgaaccatcgtatggcggatgaccctgtctcctaagcggtagcccttctggaacacctgcgcgattacgcctgcacccaaattttcatcctttacatgcatcaccgcattgtgtacggccggatcaaacgcgcttcccacctcagcgggaatctcctccgcgccggcggctgccaacgcttcataaaaggaatgaataatcatatccacgccttttttatactcctcatcgctgcaggcaaaacccgcagcccgctccatactgtccagaaccggcaggaatttggaaatagcgtctgccgtcgcttccggatagatagcttctttttcctttaccgaacgcttgcggaaattatcgtattctgccagcgtccgcaaaagtttatcgtttaaggccaggacctgctcctctgcctgccgcagcttttcctccaccggatcctcctgcggctgattctcttccacggaagaatcttttttttcctgcagctcctcttgaggctgctgcgtttcttttttctttttgtcgctcaattttaaggtccctcttttccttgtttattcctgtgcggggtttatggtgtcggacagcaggttccccaaggtttttgcaaaatactccaggtggggaatcagcttggaatagttcatccgcaccgggccgatcacaccgatcacgccggtgttatcctgacccacgttgtatctggccaccagcacagtggaattttccagctgcgccaagtggttctccttgccaattttgatattcagcgtttgattttccggtccctccagcgcgtcctgcaaaagggcccggttttccaatagcgtcagcaaatcgtaggctgaattgtgaaattccggatatcccagcagattggtgcttccctgcgtgtaaaattgtccgtcccggatttggcggcaaatctcaaaaataccggccaaaagcggtgtaaatacgcgggaatattcccccagcgccaccgccaccgaattgaggtatccagtagagatttcatcaatggaccggtctgcaaaccggtcgttggcaaacttgttgaaaaaatccaaaatttccggcgcgcagatcatatccagccggtaagccttgtttttaatgactccgttggatgccaataccacaatcatgaccacatgggcgcccaacgggatcagttcaatccgccgcactgtcacatgccgtggagggcgggtcgccgaaacagtcgcgcatccggtaaattgggccaacgcttgcgcagcgtctgccaacagacggtccggatccgggttgtgaatgttaaacagcgcgtcaatctcatctttttccacctcggtcaacgggtcacaggtcaacagcttgtcgaggtagacccgaaaccccaaatgggacgggattctccccgccgatgtgtgcggctgctccagcaaccccaagtcgaacagcagggacatttcattccggcaggtcgccggggacacctgcgtatccagcagctgcgccacccgtttggaacctaccggctctccggtccggatatattcgctcacaatggcgccgaggatcttcattttccgtcgatccaactccatatccggtttccttctttctttttgttgttagcactcttacttcttgagtgctaaagataatttatcacttattcttcagtatgtcaatacccttcataaattatttactttttcgctttaaaaatttcttttctttttacaaagcctctcaaaaagcgcaaaaagtccggaatttacggcaaatttaccacaaattccggactcttgtttttattttacactggcgccgggatagtaatactccagaatctccacatagctgtatccctgttttgccatttcaatagcgccccactggctcattcccacaccgtggccatagcccttagtggtaaagacgatatgattgccgctttcctcccaagtaaagcaggcagaacgcagattcagtacgttttcccgcagaatgcgtccggtaatggtcgcgccggtgcggaacgcggagctaccgcttttctgcacggtatcatagccgcccaccgtcatctcatcattgtagccgccgctggtgtaggactccaccgtaaaccaatcttctaccggcacctcgctcaaatcaatgcccagatattcccacacccggtcgatcactgtttctttgctgatgcttaccgagcgttggaatgcgctggaaacattctcatcccacgggctgtctaccgatccgtagcccgctaccgaagagccccaaacttcttgtggttcattggttcgtccggctgaaatggaaaagtagaatacatccatcagccgaccgcctgcataaagcgcctctccccaaacttctttcaccgcttgttttaccgtgctggaaggcgtccccatgctcaatccggttggataatttccgttctggttacgtttataaagcagagtgtaggtcgccaccgcctgtgctttgatcgactcgtaattgccgtttccgatctctgctgccaccacgcggcataccgcatcgtaagcatcgtagtcctttccgttgacccgaaagatttccccctcggacggcgtggacgtccccccgtttccaccggaatttccggaacttccggagttggatgaactggaggaatttccgccggacggtttgtcggacgagctttgtccaccctgagaagacgatgtggaagattccgacaaggtcgattcatccactcctacctccggcggctccgattcggaagaagccgcgctggacgacagtaccggcggcaccgaagaggacggttggctgctggtctggctggaaatcgacgtaacgctgctggaagaagccgcgttttgactggaagagtccgtttcttctttctcagacgaaatttccccggaagagctggggtccccgccggaaagcagggaagaagctgaagattctgccgcgctatccagtatcggccggttgtcctcctgatccggtgccgggatatctccctgtacctgctgcatctgctcgggaagcaccggctccgcattataaacggcatcgtccaccttcacggttttcacttcgccgctgcgggtctggcgggccattacgatcaagcgggcgcccttaaaatcttccgcctcggtcgataaggtcagcagtttgtccccttcccggatatctaccggcgtacaaatcaggctgcgggcctccatctcttcaaccaatgcctcccattgggctgaatcctccggattctgaagattttcgtaatcaaaacagccctgctcctccgggtcggttacaaacatggcacaaaccttgtaatgaccggaaccgtaaaccgtatcaaaggaaagaatcgggtgttcccggtaataagtgagctttcgatagttttccaactgggcgaacatctgcccatcttccatatggttgccatacaatgtgacgttggtatcctcacgcaggctggccggcgcatttaaaaaggttgtcccatacaggctgggttcctttttgaaatttctcagagaataaaaggtattgtcttttccctgcaccaccggaaaagaaaaatccgtatccggtacactcagccatccgacaatatcctgattctgttcccacaacaacgtaaactgccggccatattccgccggatatccgtccggcaccgcaccgcctccagactgatataaactcagcatagcggtacgcaactgtccggaacgatatgcctgccaataaaaagaacccaccgctccggccgccagcagcgccgccgacaaaagcactcccagcgctactttcccaactgtcgccaagggacgggtcggttctttttctctacggttctttcccgcctttccctttactggcaccgcttcgcccggcaaacgccaaacagccgtcccgtccggggcaaaagtgcaaacccgctcctgcccgatcttgccggataaagccgtcagcaggtcctcgccgccggcaaggaaaacgccgtctgcatccgcataccggcgagccatgtccaaagccgccgtcgccgccagctctgtatcaaaattcagccgctcttccggcaccagaacacgtgccacccacactttatcccggtcgcacagcgccgcataagcgatatcattatggcggttgaccgcccggaatccggttaatcccacgccgattgtcgcgccaaaacgttcccgggcgctgcgggccatatgtactgccaatggggcagaaacccctttgtattttttcaagatccgccccggaatgccagtggtcttgccgtttttgcgccctacctccaggcgcggaatttccctgcctgcgccggaaacctgtcccagcagccgacggatttcgttctgcccctctttttccgcagccgcaaccgtcacctctgaccgcgcggccgcagcggaaaaagcggccgcaaccgacccgcttcccgggaaaaagccgccctccagcgcgctttttaccagccctgcggcagtttctgtattatttttctccccttccggaagaatacggatcaaaaggcccagcccttcttttttcaccacaacctttgccagctctctggccggttccagcttgcgggacgcctgctccagcgaaatgccgaaagcgcctccctccaccggctgggaatgatccaaaaaaatcttctgtaaataaggcagcagtttctcttccgccatggcggccagttccgcggcgccatcgggcagcgcggcaatacactgatcttccgccaccagcgcatagccggggcaatccccccagcggtttaaaaacgggtgagaacccgccggtatctttaccttgaaaaggtcctctttggacagggcctcttcctcgaccttataacgctttttcatctgctccagtgccgcagggcaaatttcttcccgcagccccagcccttcgcacaaaagcggcgtggtaaaatccgaccggccgctccccaagccgccgatcaaaagaaccacatcgctgcggcgcagcgccgtgaccagcgcgctctccatcgccttgcggtctgattttgcttcggtcatcgtgtgtttgtcaatccccagcggagacagcagatccagcagcagtttttcctgctgctcgtcctttgccgcaccggcaaaaatgatgtccagcttcatcccacattctcctcactttttcatcaaccggtcttatctttttatctcgaccagttctattcctgcaatcgcctgggcaatcagcctgtctgcatccagcgcctgctctgccgcttctaccaagtccaagcgcgggcgggtacggggatgctttggtgtaaataccgtacagcagtcctcgtacggcagaatggatgtttcaaaggtgtcaatttcattggcgatggcgatgatctcccgcttgtccattccaatcaccggcctgaataccggcagatcggtgacaatgtcggtacaggcaatggctttgaccgtctggcttgccacctgccctacgctttcgccggtaatcagcgccccgcagtcctgctttctggctacctgatcggcaatgcgcatcataaaccgccgcatgatgatggtgaacaactcttccgggcacttgtcccgaatctgttcttgaatttcggtgaacggtaccacaaaaagcttcatccggccgcagtattcggccattttctccatcagggcaatgactttctgcttcgcccgctcgctggtatagggcggacttgcaaaatgcacgccgcaaagctccagcccccgcttggccatcatatatccggccacggggctgtcgatgccgccggaaatcagtatcgccgccttgccagaggtgccgatggggattccccccgcccccggcagctgctttccgtggatgtaggccgccgcctcccggatttctaccattaccagcacatccggatgctctacgtctactttcaaatgaggatagcgctccaaaatccgaccgcccagctcccggcagatttccggtgacttcatggggaaagatttgtccgcccgcttggcctctactttaaaggtggccgcgtattccaactcctcccccaaaaaatccagcgtgttctcacaaatatcctcaaaatccttggcggccacccgcgcccggctgaatgccgcgataccaaacacatgcgacactctccggcaggcttcgtccaaatccatatcgtccgactgcggctcgcagtagatggtggactgggctttgcggaacttgaattgtcccaggctgtgcagccgccactttgtatttttgaccagcacatcttcgaaagaggatttatttaaccccttcagtgcgatttctcctgttttaatcagtatgatttccttcatcctgacgctccttaataccttattatataaaagccggtttccgcccgtcagcgatgggccagcgtgcagattccctgctgtaaagccagaacgaaatcctccacatccgctttggtgttgtaccgcccaaagcttactcgcagcgcgctgtcaacaagcgctgggtccagccccatggcggacagcacatggcttttcgctcctttggaacaggccgatccgctggacacggaaatgccccgttcctccaaaaagtgcatcatcgtctccgaacggtagcccggcacgctgatgttgagcaccgccggcagggcatccgccggagagttgatcaccacctgcggcatagacagcagccggcagcgcatttcctgattgaggtcggcaatccgccgggcgtcttccgccagatgttcaccggccagcgccgccgccacgccgaatcccacgatcagcgccgccgcctcagtacccgggcgcagctttttctcctgttcgccgcccagctgccgcggcagtacccgtatgccccggcgcacgtacaaagcgccggaaccttttggtccgtaaattttgtgagcgctcaccgtcgccaaatccaaatccagtcgccgcatggaaagcggcagtttgcccagtgcctgcacgcagtcgcagtggacaagcgtttccggatttttgcgccgcactcctttgacaatctgcccgatgggcagaatggtgcccacctcattgttcacgcacatgcaggataccaaaacagtggaacggtctaccgccgccaccacttcgtttgcgtcaatatggcccatcacatccggcttcacccggatgacctcccagcccagttgttccagccggtccgcggccgcctccaccgacgaatgttccatcgctgtggtcacaatccgcttgcccttgcgcgcacgggcctccgccacacccagcaaggccaggttgttggcttccgtcccaccggaagtaaaggtaatttcggccggatcgcagtccaaaagctttgccagcgactttcttgccgctgtgatccggttttccgcttccaatcctttgcggtgcagcgaggagggattgccgtaacaggaaaccagcatttcatacactgccttggccgccggctccgccacctgcgtggtggcgctgttatccagataaatctctctcatgatttcatctccgttttcaaaggtttgccaaaagcaggagccggattttcccatactcttatttattatagctcatccgtcctcctgtttcaagaaagggtgccgaaaaaaggggaattttcaaagaaaaaatccgtttatgccaaaaacaaagcgcaacttccggcacggcctgttccattataagctgtttttctctttttggtgcatctttcccgcccaatggacctacctcgtgggaaccggttgcataaataagatccaccgtgctatactaggaatagttttccggcgcgggctggaaaaaatgacagaaaaatccgcttttttctgtgttctggaaaaaaataatgaaaaaataaaaaaagttattacaaagtatttacaaaatgatttgactgtgttatattatggttacagatccggaaaaccttcgttaccaggtaagggagagttgctttggcagcgcgggtcggatactgaatattattttggaggaaatactaccatgaaaaaagtacttgctctggttctgtctgtactgatggttctgagcctgtctgtggttgctttcgctgcgaatggttctacccctagcgatacaaacaccacgcctggccaggctggcgttgacaatgctgacaaaaaatacgacctgggcttcggcgatctgggcaaagaggaggatgctactcctgacaaacccggcgctacctactactacaccattatggaccagaacgatgcgtccaaaatgctgaccgacgctgagattgcgaaacatctgactgtttccatcaaagagtctggcgacaaaatgatcgattcttactccatcgtaaaacagaatggcgtatacaaagtgaaagttgtcaccaaagagacctacaccaccgacaaaactaaggctacttggactatcactctgaaaaaagacaagaagtataaagtagctgaggcggaagtagagattgctcagaaatgggctgagatctgcgacaagaacattgagaaggatacctatggcgaatatgtattcaatgtagatctggctgacgcccatgacggcaacgaaggtgcttcttacccgaactacaccgatgacaaaaacgttgaagctctggctgtaatcccgaaagctgcaaaatatgctgagctgtattttgatggcactgaattctggtactctgtaaagaattccgctaaaaccactgctaacgtttacttcgagacttccaacaagaaaatgtccaccatctacgaggatgctgatctggagatgatcttcttcaaaggtactcccgagttcgattacactggtgttatgcatgctccttacgataaggatgcctttgtttacgctgtaatcggcggcaaactggttgaagacaaattcacttggaacaaagaggctgagtgctgggaaatgaacgctaagaaaatcgagggcgttgttgtttctgacatcaaactggatgttagcaaatacaactccaccatcggcggcaaagacaacaacaaaaacaaccccggaaccggttctgttgactttgtaaacgttgctgttgctctgggcgttgtttctctggctgctgctggcgcagttgctctgaagaaataatttcagttgctgactgatctttgctttgtgtctctccaaatcgcataaagtaagaacaaaaaaggctgccgt

SEQ ID NO: 1979 - DNA, 17430 bp, Unknown
  16S sequences of unknown bacteria
aaagcttcgacagtctgcccatcgcggcctgcttcttcgataaaaacggtgtggtgcggctcatcaactgccggatgcttgccattgcgaaccagctgcaaaagggcggcatacagtcgcttgcagagatgcagcgcgtcctgcagtcgccgcccgcaaatgtgcgctgtctggatccgcaccttcggatctaccgctttccgaacggggaggcgctgcgttttgcgcaggagcagattataacaaaagctggcatccgttatacgcagatcaccgccgcagacgtgacggagctgatacggaagcagaaccagttgaaagctgaaaacgcgaggctggcggaagcaaatgagcggcttcggctgctgctcgcgcagatgccggagattgtccgggaggaagagacactggcaatgaagctgcgtgtgcacgatgacatcggacacagcatcctcgcggcgcgccgggcgctgctccagcacacagagcaggagggaatccgtgcaagcgcggcgctgtgggaacagtcaatttcagtgctttaccgttccaggcagataacggcgcaatccgaaccgctggaggtggcaaaaaaacgagcggaagaactgggcgtcagcgttctgctgacaggggatgagccgcaaacgcagcgggcacgctcactgagcgcactggcgatctgcgaatgtgcggcgaactgtgttcgtcacgcaaacggcacagaattgtatgtgtgcttttggcagaagccggactgcatggaggtcgccctaaccaacaacggtgcagtgccaaaggaaaagatcacagagggcggcggcctttccatgctgcgccaacgcacagaagaagcaggcggcaaaatggaggttcaaagtatccctcgctttaagctgatgctcagtctgccagaacaggaggaagcagcatatgagagtgatgatcgttgaagaccagaccataatccgcagtctgatggaaagctattttcgtgctgaggacggataccggatcgtagcgtccattccaggcgcaaagcaggccgcagaggtgtgccggacaagctctgtcgatctgattttgatggatgtgcaaacagagaaccgtgagaacgggttgacagccgttcgccagattaaagccatgcaaccgaatagcaaaatcattgttgtaacctcgctgatcgacggtgccgttctggacgaggcaaagaaggccggcgccgacagcctgtggtacaaggattctacgcagaagcgcctgatggatgtcgtccggcagacgatggcgggtgaacatatctttccggacgcgcctccaacggttgagatcggtatggcaaaaagcacggaatttacaaaaacggagctgaaggttctgcggtatctgctgcggggactgtcctacacgcgtatcgcggcagagatgggctgcgaaatgtcaactgtgaaatttcatgtggcgaatatgctgcaaaaaacggggctggaaaacaagcttcagcttgcgctggcagtcagcgacgtcaagctgatcgccgatctggcggaggattaatggtacttgccgcttaccttgcccactgttgctgcctaatgtgaaacccccaacaaattctggctcgatgtgttttcccagcagcgcttcctatctcatgcggcctctttgattttctgcttgcgcagccacagatatttattagaaaggaaaaaccgcatttgagacgttacacttgtgtttgaccgcaggcttgatggtgtgccaggaacttcgcgacctccgctttgagcacccgtccggttagcttcgttgcgctgatgacgagggtcactgtcctgttttcaacctcttcctgcaatgataaacgcctccttccgtgatgattgcagtatacacaggcgcacggcctacaacgcaatggccgggagcgtttcgtctccgtgacggagctgctcggtgcgctcttcaaaaagccgccacaccagatcggcatcccccgaagatacatcccacagctcatcatcgaggcagtagaacacaatggcggagccggtcaggtacgatttaccgttgacggtcacgactgcttttttctcgtaggccatgtaaagatcgaaggtcggcacctgccgcacatgtgtacagcggcagacggcttctgcactgaaatataatagcatccggttttgccgcaaaaggtgcagccctctgtctgcttccagaaatagcagtaccggcagtctttcggtttgtcctctgtctgttcctagctctcgcctccattcccgcccataccgggcaacaaaaaagcacaccctccggccccgtcatggagcaagtgggtgcgctatgtacatcatcatttcttaacgattcgtggctagaattgtctcagatggaaatgatacatttctgcgcctaagggtgattgtccgttcgattctggcagggaagccaccgccgcaagccatcgcttgcggcggtgtgcttttcaaaaatatatttttgaaaagagctcaaacgtgattccgctgtataaggctcgaggggcaaaatcagcacgctgtgtaagctcaagtgacaaaaacagaggttttgactctcgcttaccgctacactgggctcgcgtttgaaggagatcgcaccctgctgcgcgcataattcctgcgctttccgtgcagaaattccacagtgctgtatgggttcgacttagccaatcgcgctgcgcgctcttggggtctcactcactttccgccggagaaaacaattttgactttatttgcgccgtgtgcagcgcaaactctgcgaggcttttgacagtataaggcccgtgcagacttcctagtctgtacgggcctgttcttttttcttctattcagggcgcgtcctgcgggcagacggggtagcgctcgctgtcccagctgtagcctgtcatggcggcgtcgccccgcagcggcagctgcgtaagcccggcctgtaaggaacgcagcagatccgcatggtaatacacgccgtccagctgcagaatattccaggtatacgccgtgccgtcattctctccctcgaccagcatacagctgagccccgcctgctggcaaagcagacggtagaccgccgcaaagctcgccgcgtccccctgcccctggcacaggacgctgtaggccggtgtctgcgggtcctgctgcgcgccggtatactgggcctgcaggaattggtaaagcagcgctgccgtctcctgctcgctgctgcctgccagggccgccgcggcctgcagctgcgcctcgacctggctgcgcatctgccgcagctgcgcggcggccaccggataggcatagcgcagctccacgacccggacactgcccgtctccggccagcacgtcccgctgacctggggcagctgcagcacctgatccggatgctccagcagatagctgcggcacagcgccgcaaaatccacattggaaaagccggagatcatcagtgtctgccgcccgcgcccggcggtgatggcttcgccgatcgtattttccaagttttccatccgcacctgggtgatctgctccatctcccaggcgctgtgggaataggtcagctgcagctgcagctggtagaacgacgccacctggacgatctcatacgtcgcatcttccagggcgtaggcgcccatagggtagctggactgaatataatccagcgcccgctgcaggtcctgctccacatccccagcgtaggaataggtcaccatactgacctgctcggcatgccggtccacctgctggacgaggttgctgcgcatggccgcatagttttccacggtgatgacatcgctgttctcgccccgctggctgttatggggcgtgacaagcagatagctctccggcacgcacccgggcagcgccaccaagcacagtaaaagcagcagcaaacaggcccttcgcatagcgctcccccttccagctcgcaaaattttcaaatctctcgtaaatattcgtcacagctccaggctgatctgctcctggccgatatcctccgggcggagcaggctgccggccgccgggatcgacttggcccggtagcgggtctggttgcccaggccgctggcagaggccagctgcatccgcgccagcgtcgctttcttcttcagactcatgaccgcgacgccctgggtcgaccgggtcgccttcagtgccaactgtgctgttgagaacagcagagcccgaccatcggacgcctgcaggacaatctccgtctcctcccgcagcagctgcaccccaatcagaggcgctttatcgctgtaagcgccggtcaggcggcggcggttcgatttggtatcgtacgccgccaagtcgaccttggccaccttgccgttggcaaaggcaaacagcacaaagccccggtaatcctccggcaggcagacggcgacggtctgctcctcgggctccatctccagctttgaggcgaggaaatcgcccagctcgctggctttggtctctttaaactcagcaagccgcgccttatagacctgctggcggtccgtaaagaccagaagctgtgtccggttcgtgcattgacaggtaaaggccaggctgtcgccctccttaaagcgctgctggccggacatccgcagggactggggcgtgatctttttcagatacccctcccgggagataaacaggtgcacggggtaatccggcgtctcgtcctccggctcggcgatctcttctgcctccggcacagccagacccgtccgccggggctggccatatttctttgccacctgggtcaattcgtccataatgacccggcgaacccggcgctcgctcttgagggtcgcctccaggtccgcgatctggcgctctaactcgccgatctgctgtgtatgcttgaggatatattctttattgatattgcgcagcttgatctccgcaacgtattcggcctgggtctggtcgatgccgaagccgatcatcagattcggcacgacctcagcgtccgactctgtctgccggatgatggcgatggccttgtcgatatccagcaggatcttttgcaggccctgcagcaaatgcagcttctcctgcttcttttgcagctggaaatagattctgcggcggacgcactcgcagcgccaagccgtccactcctccagaatttcccggatgcccaggacccggggcatcccggcgatgagaatattgaaattgcagccatagctgtcgcacagcggggtcgaccgcatgagcttctgcatcagcttctctggatcgacaccgcgcttgaggtcgatggtcagcttcatgccggaaaggtccgtctcgtcgcgcatatcgctgatctctcggatcttgccctgcttaaccagatcctcgaccttgtccataatggcttccgtcgtcgtcgtataggggatctcaaagatttcaatgagattgccctgcttttgatagcgccagcgggcacgaatcttgaacgaaccgcggccggtgcggtagatttccgccatctcccgggggtcgtagagaatctcgccgccagtggtaaaatccggggccggtagcgtctccagcaggtcgcaggacgggtcctgcatccaggcgatggccgtattacagacctcctgcaaattaaagccacaaatattgctggccatgcccacggcgatgccggtgttgctggaaactaggacattggggaatgtcgtcggcagcagggccggttccttcatcgtcgcgtcatagttatcgaccatatccaccgtgtccaggtcaatatcccggaacagctcctggcagatgggcgccagcttggcctccgtgtaccggggcgcagcgtaggacatatcccgggagtagaccttgccgaagttgcccttggagtcgataaacggcgtcagcagtgcctcgtttcccttagccagacgcaccatcgtatcatagatcgctgcgtcgccatgggggttcagcttcatcgtcgcaccgacgatattggccgatttcgttcgcccaccgttcagcaggcccattttatacatcgtatacagcagcttccggtgcgatggcttgaagccatcgatctccggaatggcacgggagacgatgacgctcatggcatagggcatataattgcgctcgagcgtgtcgcagatgggctgctccacgaccgccgcatgcaggcccatgacattggggttctccacgtgctgcttttcctggggttcttttttctttgccatgctgactccttatgatagatcggccagttccaggaacttatagccgttttccgcgatatgctccttgcgacctgccaggttatcccccagcagcaggtcgaagtattcgcctgtccgggcggcgtcctcgggcatgaccttgatgaggcggcgggtcgccgggttcatcgtcgtcatccacatcatctccgggtcgttctcgcccaggcccttggagcgctgcagctggtactttttgccctccagccttttgaggatctcgaccttctcctgctcattataggcaaaccatgtcttgtccttgcaggtaatctcaaacaggggcgactcggcaatatacacataccccgcctggatcagcgtcgggcagagccgccagatcatcgttaggattagcgtccggatttggaagccgtccacatcggcatcggtacagatgatgaccttgttccagcgcagattggaaaggtcaaaggacgccagctccttcgttttctttccctcgacctctacgccacagcccaggaccttcatcaagtccgtgataatctccgatttaaaaatgcggccataatccgccttgaggcaattgaggatcttgccccggacgggcatgatgccctgaaattccgcatcccgggagagcttgaccgagcccaaggcggaatcgccctcgacgatatagatctcccgcttgtccgtatcccggctgcgacagtcgacaaatttctgcacccggtttgcaatatcaatgctgccggagagcttctttttgacagagatctttgccctctccgccgactctcgggcccgcttattgaccagcacctggtcggcaatcttctgggcctcggcactgttttccaggaaatagacgtgcagttgctcccggaagaacgtgttcatggcctcctggataaacttattcgtgacggcctttttcgtctggttctcataggacgcctgggtggagaagcagttcgtcacaagcacaaggcaatcagcgatatccggccaggtcaccttgctctcggatttgttgtatttgttgttctgcttgagataggcgtcgatagcatagacaaaagcgctcttgacggccttatccggtgcgccgccgtactccagccacgaggagttgtggtaatactccacccggctgaccgtcctggaaaagcacagcgccgccgtgatgcgcagcttgtactctggcttatccgcccggtcgcggcccttgcgctcggcctgccagtactggggcatcgtgaaggatttgccctcggtgagttcattgaggtaatcctggatgccgttttcgtagtaataatccgtcgtctcgaagccgctgcctgtctggttgcggaagcggaacgtgatgccctggttggcgatggcctggcgcttgagcgtctcccggtagtactcgacggggatggcgatatcggaaaagacctccaagtccggccgccagtggaagcaggagccggtctttttccggtccgccggttcctttttcatcttgccgaccagctcgcctttttcaaaatggagcgtgtatttaaagccgtcgcggcggatgaccgcgtcaaaatactcggcgctgtactgggtcgcgcaggtacccaggccgttcaggcccagggagtattcgtagttatcgcccacgtcgttctgatatttgccgccggcgtacatttcgcagaagaccagctcccagttgtagcgctgctcggcctcgttccaatccaccgggcagccccggccaaagtcctcgatctcgatggagcggtcttcaaatcttgtcacgacgatgagattgccgtagccctcccgcgcttcgtcgatggcgttggagaggatctcaaagacagcatgctggcagccgtcgagcccgtcggagccgaaaataacgccaggccgacgccgcacccgctccgcccccttcagggcggtaatgctctcattgccataggatttcttttttgccatagttttcctcacatttttgcagaaatactcgctattttcccattattaagaatattatacccattttcccaaacagagtcaagcccggccccaaacaggggccgggccatagcacttgtcaaaaattattttgccgacaggtccacctggcgtcgcagcatggagcggggcggcacggggcggggcagttggatttggaagaccatctgcggatgccgaggctgcagcaggggcgcgccgtcggcgtccgtcatctccggggcctggaaggaaaacgcagccaggtccgggccaacgagctccagcgtatcgccggcaatgaatttattgcgcagcgagcaggtcgcgtagcccgctgcatcgcagtctagcacgatggcgcagacctggtactcccggatataccgggaattttccgtgtactgccccggcgcgccgtagtaaaagccggtggaatagtgccggtgggagatcttctccacctcgtcgcgccatcgctggtcgacgggccggtcggcggcgacatcgtcaagaacatggcgataggccgccgtcaccagagcggcgtaataagcagattttgcccgcccctccagcttgatgcagtcgatcccggcgtccatcacatcgtccagatggtcgatcatgcacatatcccggctgttgaggatataggtccccttttcgtcctcttcaatggggaagtattcgccagggcgcttttcctccatcagggcgtattggtagcggcagggctgggcgcaggcgccccggttggaatcccgccctgtcatataattggagagcaggcagcgcccggagtaggagacgcacatcgcgccgtgggcaaaggtctccagctccagctccggcggtgttttggcccggatctcgcggatctccgccaggctcagttccctggccaggacgacccgctgcgcacccaggtcataccacgcccgggccgcttcgtaattggcgatggagcactgggtcgagacatggcgctggcagtggggcgcataacgcccggcctgcataaacgcgccaaggtccgccaggatcagggcatcgaccccgaccgcatccagccgccggagataatccggcaggcgggctgcctcagcgttgcggggcatggtattgacggtgacatggaccttcacgccgtgggcgtggcagtaagccacggcctggggcagctcctccggggagaaattccccgcaaaggagcgcataccaaagctcgtgcccgccagatagaccgcatccgcaccatagtcgacggccatatacagccgttccatatcccccgccggggccagaatttccggttttcttctcatgccttaccccgcgtattcatcgctgttcaggaaggccgagaagctgtcaaagtcacgatagaagtggctgacaccgtcggtgccgtaagcgaagtagtaatagtccgtctcattgggggccaaggcagcccggatggaattcatgcccggattgtcgatggggccgggaggcaggccctcgtagcggtaggtgttatagggattgtcgaggttcgtatcaaagctctcgcccatcagatccgctgcgtagtagaccgtcgagtccagctgcaggtacggcagctccttgcttgccaggcggttatagatgaccgaggcaatatccgcccgctcgccctccgaggccgcctcttcttcaatgagggacgccacggtgatgatctcatgcaggctgtggccggactgctccacctgggcccgaagggtatcgtcaatcttcgcgtcgaagttatccaggatcttccggaggaccacctgggcgtcagcctgggtatagaattcgtaggtatccgggtagagatatccctcgagccggtttgcaccgtccttcggcaggtcggatgcgaaccagtactcggagtaatcgccgctgcttgcggcctgctccagctgctctacggagcagacaccggcgtccgccaaaagctggaagatctgcttacagctgtagccctcgatgagcgtgaccttgaccgtctcccgcgcctcgccggagctgaggccgttgacgatggcgtgatagtcatacaagcggttcagttcataggtcccggccttgacccggtcggccacgtgggcatagttgccgtaaattttaaacagccagggataattgatgaggtccgcgtcgtgcagcgcgtcggcgatctcccccagcgtcgcattctccccaatggtgaccgtcgtcacctcgtccggctttgtcagggccaggacatcgtcggcgcagagccacgcgaatttggccaacagcagtgagactgccgccaccatcccgatataaattaccgtgctgaatgccacaaccacggcgctgcggcgctttttgggcttgcgggtacgctttccgcggcggcggggccgccggatctgcatctcctcagcctcctcctcgagaatgtcgtccatcgcgtcatcatcaggcgtctcgtccgccgcgccgtcggcgacaaagccggagggcagattatcgccaaaggtatccagatattcctggtcgcggaattccgtgggctggactgtctccggggtgctctgggggtagtccggctcgtcgctgtccagctcctggcgcaggtcctggagcatccggtcgacatcgctgccgtatttttgcgcataggcgtccaccaacgcatccagctcctgctggtccatctgaccctcttgctggctgctctgctgttcgtcgcgctgcttttcgtctgccatgttgtcactccttttgctcgccgcggcgccggtagaccaggctctcccgcagcgtgtctgcggcctgcgggccgcgcagcgcttctacgagcgccagtgaaaattccattgccgtccccgcggcggtcgaggtgatgagcttgccgtcgcgcacgaccggcgcgtccgggtccatccgggcctcacccatctcaggttccatccccggataacaggtcgcccggcggccatctgtcacatgccgggccgcaaggaccgtcggcgcggcgcagatggcggcaagccaatcccccgcccggtgctgtcggtcaatacaggccagcgccgcggggcttccggaaatcgccgccacgccgcccatcccgccaggcaggatcagcagctccagctgctccggcagtgcctccaccaggcagtctgccgtgacggtgatgccatgggcaccggtcacctgcagcgccgcgccgacggccgccagcttgacctccacgccagcccggcgcaggcagtcacaggggcacagggcctccatttcctcaaacccatctcctaataagattgcgaccatgctatgcctccaaacagttctgtaccaatgcaaaaatttcctcgtgaatttctttgatcgggcggggcgcgccgtctcgggcgcaggagatgacccgccagccatagtagctagcagcctccagccccgtctggcggcaaagggccagataggcaagatccttttcatggatatccgccgtggtgctcgtctcccgctcccgctttcgcatcagctgacgtgtcacctccgtgggcatatccagatagatcaccaggtccggccggggcagctccatccggtcgtattccatctcatagagccactggaaaaacgcctcccgcgccgggggctccagcttcgcgccctggtgcacggcgttggacgtcgtgtaccggtcggataggatcggcgtccccgcttcgtagatcggcttccagaccttgcggtaggacgcgaagcggtccaccgcgtaaaatgtcgaggcggcgtaggcgttgacatcgccgggccggttgccaaattctccggccagatacatccggatcagcgccgaggattcctcctggtactggggaaagaccagccggaaaaacggctgcccctgcacctccaggcgcttggtcaaaagggagaactgggtggattttccagagccgtccgtcccctcaaatacgattagtttacccatggctgcctccagacaagcggcggcggtacaccgccagcaaaaacttcggcaggcgcatcatccgccccagccgcttcggttccttacaaagccggtagagccactccagctgcagccgaatcatccaggccggcgcccggcggacatttccggcaaagccatccagactgccgcccaggccgatcataaatgagacctgcagctgcgcctggtggcgctgcataaagcgctcctgcttcggcgcgcccaggcagacaaacagcacatccgccgccgccgcgttgatcttttccacgacggcgtcttcctcttccggcttaaaatagccgtccgccgtaccgcagatctgcagctgcgggtgcgcctcgcgcattttgcgcgccgcctgctccgccacgccgggcttgctgcccagcaaatacagccgcttgccctgggccgcgagaacatccagcagcgccgcggcaaaatcaatgcccgcgaccttctgctgcaggggcgtacccaaaattctggccgccttgacaacgcccgcgccatccggcaggaccagcgccgctccattgatgagctgagcaaaggccgcgtcatgcatcgcctcatagacgatctctgcattgggcgtcacgcagtaatccgccccggggcgctccaggagcgtctgcgccatctccagcgcctgctgcatcgtcacattatcaaactgcacgcccattacatctactttcacagccgtaccccgcaatctatcagatagtcttgcggaaattttaccacagatttccccgtttgtccactgcgggacgtttcacattccccgctctgcggcataaaatagggtgaaagccgcttaagctttaagaaaattaaggaggccaacaaatggttgagaagaattctgcgcaagccggctgcacccaatgccccggcaaagaaactgcgtgtattcataccaagcggattatggacagctgtctggacaaagactgcatcgaagatctgcgggtctatctgacaaaatcctcccagcaggcgctggagcgctgcaccggcgtcaaggtccgcagcgtagagctgctgcatgtttacatcgatgtggagcccgcgccctataaacgcgggtgctacagcctggacctcaccttcttctaccgggtcctcagcgacgcgatgctctgcgggacgcggccggagacgctgtgcggcctggctgtcttcagcaagcgggtcatcctttacggcggaaccggctgcgccaaggtattttcgagccagacccggctgcgtgagttggataaagagacactcctttccgaggacgtgccgcaggctgtcgtggaagtgctggacccgatggtcctctcggccaaggtcgtggagctttgcgactgctgccgctgcgagccctcgaccggcgatattcccggctgcatcgccagctgctttgactctgagctggtctttaccggcgagagcaaacggttgatggtgaccatcgggcaattttccacgatccgcctggagcgggacgcccagctgcagctgccggagctcagctactgcatcccgcagaaggcctgctgcgacgagcccggctgcgccgaagacccctgcgagctcttcggcaagatcgacttccccacagaggccttcttcccctcggggcaaggccaagggccgtccccctgcgtccgttttgatgaaactgcggacacctgccgccggtaaccggcggcccagcgtcctagaaggccaatttcaacgccagcgccgccaagcccaggctgcgctggcgtttttttcgaattacagtggcttttttcgtccgtttctgctaaactgagcttaacacacgccacaagccgtcgagaggaggtctgccttatgccccacgcgccgcttcgccgcatcgtctccggcgcagatgccgccgttctgctgatccatgggattctgggcacaccggatcattttgccccgctgctgccctgcatcccggaaaactggtcctttgaggcactgctgttggccgggcacggcggcagcgtccgggatttttccgccgcccggatggcagactggaagcagcaggtccaccaggcgctggcccgcctgcgtgccgcccaccggcacgtttacctcgccgcccactcgatggggacgctctttgcgctgcaggaggccgcacaatccccggtggcagggctttttctgctcaatgtgccgttgcgcctgcaactgaagccccggctcttgcagacggtcacccgcatttaccgcggcaagatttccccgggtgacgcttggacacaggccgccttggcgggctacagcatcgggcccgatccaaacccgctgcattacctcggctgggttccccggtatctttcactgtttgccgagatccgcgcgacgcggcaggtgcttccccgggtcacatcgccggggctggcgtatctctcccagcacgacgaaatggtctcgctggcctctgcccggtgcctggcccaatgcccgcacctggagaccaggaccctgccggattccggccacttctactatacgccgcaggacttagaaacacttcagcaggcattttctgctctgctgaccgcctccgaggcataacaaagcccggcacagcacactattttggggtgcgctgtgccgggtttttcattgcaatcacagtttctctgtccgtgctttttccgccgggatcacgatggggcggcctgccatatagcccgccaggatttcgattccggaaaaagccagcagcatagccaaggggaccgtccagttgcttgccagggaaaaggtcttccccagggcaaagggcccgaccgcccccagaaaatagcccaggctctgcgccatgccggacaactctgccgcatcggcggcattttccgtatggatagagaacgacgcgataccgaagctcaacaccgcactcttccccacaccgcacaggagcatcgcacagaggacgccggctgacgatctggccagaatcagcagcagaacgccgctgaaattcagcacgccaacgcaaatgcccagtgccgactgccgccgcatccggttggccaggatgggaatcacaaagctgaccggtatgccgatgagcacaaacagggaactgtaaaaccccgctgtttgggcgtcaacccccttggactggacgatcgtcgccacccaggcgagcaggctgtaaaacagcagcgccgaaatgccgcagtgcagggtaatccaccagctgatgccgctgcgccgcaccgcactgccggtggttttctgctccgctacgatactgcagcgaagattgggcagccaaagcagcatcgcaatcagtgcaactacagcccagatgcccaaagagaaattccagctgaccgccttggccagcggcacactgacgccgccagcaatccccggcataacgggcattgctgtggcgaatatgctggtcatgggaccgatcttcgtcgggaaatatgccttgatgaccgccgggagcaggacgctgcccacggcaatgctgatgccgattaagatcatgccgccgtataaccccgctttccccagggcagcacagcacaatatgcccacagcggagcatgccatcccagcaaagcaaacccggcccgcgccgcagtgctgagccagctggctgataaagagcgaaacaatggcaaacgccagcagcggcaggctgttcagtaggcccgccgcgctgctgctcagtcccagatccgcttggatgcggtcgagcagcgaagctaccgccgtcagtggcgttttgatgatgcaggaggtcaaaataatggccagcgtcagcaataccggattcgtccgtttcatcggtctaaccccatttcttatattccagcatctgccggtaaaaaattctcctggtcaggtcgctaacgggatttttatctattatcacataaaaagctggtgttgtcaatggatttttcgtcttttttcatatatctgcaggatgagaatcgtttcccgcggtgtacatgccgcctgcgaaactgcgtttgacttgatttgcacctgcaaacgcaagctctgcgcggcttttttgcaccgcaaaatcacaaagcggcgcagcgctctgatccaagtgcgctgcgccgagtttttcgttttaatcacagtttctccgccggtgtgctcgccgccgggattacaatggggcggcctgccatatagcccaccagaatttcaaggccagcaaaggccaacagcatcgccaaggggatcgtccagttgctcgccagggaaaagacctttcccagggcaaagggcccgactgcccccaggaaatagcccaagctctgggccataccggacagagccgccgcatcggcggcattttccgtgtgaatggagaacgatgcgatcccgaagctgaacactgtactcgtacccaccccgcacaggagcatcgcacagaggacgctggccgacgatctggccagaatcagcagcagaatgccgctgaaatacagcgcgcccacgcaaattcccagcgccgactgccgccgcatccggttggccaggatggggatcaggaagctgcccgggataccgatgagcacgaacagggagctgtaaaatcccgccgtctgggcgtcgaaccccttggactggacgatcgtcgccatccaggcgagcaggctgtaaaacagcagcgccgaaatgccgcagtgcagggtaatccaccagctgatgccgctgcgccgcaccgcactgccggtggttttctgctccgctacgatactgcagcgaagattgggcagccaaagcagcattgtaatcaacgcaaccacggcccagatgcctaacgagaaattccagctgaccgccttggccaatggtacactgaccccaccggcgatccccggcataacggacatcgccgtggtgaatatgctggtcatggggccgatcttcgtcgggaaatacgccttgatgaccgccgggagcaaaacgctgcccacagcaatactgatgccgattaagatcatgccgccgtacagccccgctttccccagggcagcgcagcacaaaatgcctacggcagagcacaccattccgacaaagcagacccggcccgcgccgcagcgctgggccagttggctgataaagagcgaaacaatggcaaacgcca

SEQ ID NO: 1980 - DNA, 15412 bp, Unknown
  16S sequences of unknown bacteria
gtgctcgcctttttccgccgtcaaaatgggcgggcctttttccctccgctgcctatcgccgctctgctcccccacagttggcgttgggcagactcaaccaacgcgagttgggatattacgttgcagcttgggtggtctcgccgcatagggaaacaggcttgtttttttcccactacggttggcactatgcctactcaatcagcgccgcttgggatgcttcgccgtaacttggatatttctgcaacgcaaaaggccagcgtgggttcaaatccacactggccttttgtgtaagccatgaggcctttcgccgaatggcggccttctctattcaactggcgggaaaccacaccagactcgcgagccgcgagacccgttgccgagcggcggtaaaaccccggccaactggcatgtccctctacgcccctgcgcggcaaggccgcgcagagatgggtgcagggctttagctctgctgctggtcggagtccagcatgtcctgatattttttgagaagctcctggaaggacttgcggtagtcggctgcggcggcgcggagggtatccatgtttttggtcagggtttccttttcctcctgcgcgtcgtccaccagacggctggcctgatcctccgcatccttgatgatctgtgcggccttttccttggccttctccacttcctcatccgccagacgctgggcgctgagcaaaatgctctccagcgtggagctggtcttggcgatgggcgtttctacaggctgggcctgcgccacgggcgcgggctttaccgcttcgcgggcggccttcagctcgtcctgagccttctgcaggtcgctctccaaagaggtgatcttctcctgcatgttggtcatttcgtcgcagatctcgtccagaaattggtctacatcgtcccggtcgtatccgccgcccttgagggcaaactctttgtcgtaaatatcgtcgatcgtgatggccatgtgggtcgctcctttcatgcgttgggctttatggatttcgcttgtctccgaagagaagcattttgaggggataacgtccttttcgggtgggggagccgatctcctgaacctgcagacggccgaagccccgcacggagatcatgtctccagcttccacctgcgcgtcggtgcgctgcgtgggcagatgcctcaatttcacctgaccgccgttgatgagatcggcggctttggatcgggacaggcggcagccggaggctaccaccgcgtccagccgcgggctggcgacggtgtcgcgccactctgttccttccgggggagccagttcgggcagctccgataacagcgccgtctgaaggcggattcgaccggcggaaagcagactgtcccgcagatgctccgccatgctgtgctcgcagaacaggatggcccgctccgcttccagcacgatgtcgccaatgcagtgccgctccaagcccagccccatcacactgcccagaatgtcccggtgagcgggcgcactctggtggggccagcggagctccagcgcatccatgggaaactcgggaacttcatcctccggggaaaagcaggcgatcacccgctctgcgtccggatagccgccgttcagcactgtgaagacctgcgccttttttccggctgttaaagcccattgcgcttcagccggggaaagaaagccggtgaacagcggcctgtcctgtcgaaaactgcgctcggccagctcctgaaagcgtcggcgcagcagttcctcgttttgctcttctcgcatggacttacagcgcccgctgaagcatacgcagcagctgaagaagaatatcgatcaccagccacaccgccagcggggaaaagtccacgggagagttcatcagcttgggaaaccatttgtacaacagctgccggaaggggttcaggattccctccatgtagggacggagaaactccatcacccggctggccggggccacgaaggaaagcagacaatagatcagcagtgcggtgctgacgacctgcaggaaaagaatcaggataccgaagagcgtggatagcatggaacgcgcctcctgtgatcactggggatagtccaccgcccggtagcggccggaggtctgaccggcggtgccggtggcggcatagctgcccgtgaagctgcccgccacggcggaagccatgctgatggggtgattccgctgggtgccctgcgcgaagaaccgggccgtaggggattcggtgctgaaggttcggggtgcgggctgctgcggagcctcataggaagcggactgttgggcttgctgataattttgagcgggctgctgatagccgccgttgggttgctgtgcctgctgctgataaccggcggcggactgctgactctgctgcgcctgcgcgtaaccggcggagtagccctcctgctcgtagcgctgacgggcgtaaccctgggcttcaggagccgctgcagccttctgcatggcgggatccagcaccaccttcaccgtgggggcggagataaggtaaatgccccggggcgaaattttgttcagcgcgcagcccagcgtataggccgcgccgctgagcatgtccacacagcgctgccgttcgctgtcgctggcgataaactccatgttcaggaacacggaagcgttggtcttgatatagccgatgacgtccttgcattcgttacggctgcgaaggagcaccacatattccacgtgggtataagccatgccttcggggttctgctgcatcccggggaacatgaccacgttgccgttcaccgggccgtagccctgcgcatagccgttgggggccattccctgctgtgcgggggctacctgttgagcgggagccgcctgctgcatgggctgcttctgcgcctgagcgcgctgctgggctgcggcctgcgccgccgcctgcttctgctgctcataagcggcctgctgctgttggtaggcttccatttccagatcgcgcttgctgcggtagggaacccgtccgccgtattcgccctcgccacgtccaaagggatccagcggttcccggcgctcggaggtttccccggccgcctgactcatctcatcctcgatggtcgcgccgccgtaagcgtcctgcgcgtcccgggaagcataatagccgctttcgtgatccgcgctgccgcgaatgagccggtcactcttttccgacagccagctgctcaccttctgaaagatacccaatgttcaaaacccccctggaatcattgccggtgcaatgctcagtcctgatacagcgccgtgcctacgcgcaccatggtcgcgccctcctgggcggcgatccgataatcccgggacatccccatggaaagctcccgcatttccacgttgggcagagcctcgtcccgaagctggtcaaataaacggcgcattccgcgaaacagcccgcgcagttcgtcctctccggcgtactggggcatgatgctcatcagcccttctacatgcagaccggaaaaatcccgcattttccgaagaaacgggagaacttcctccacaggcataccgcccttctggggctcctgcgcaatgttgacctgaaccagcaccggcagcgcccgtccccgctgcccggcgcggcggtcgatctcctgcgccaaatccatccgatccagcgcgtggagcaggcatacatgatctattatatatttaactttgttggtttgcaaccttccgatccagtgtaaatgaaattccggggaaatttcgggaagtttgggcagggccacctgcgcccggttctcgccgatatcccaaatttccatgggcttgaggaggttgatgacccggggcgtgacggttttggtcacggccaccagcttggcgggaggagagtcctgataacggttttccgccagcgtttccagtacttttgccacattccggcgcagcgtttcttccgtcacactgtccagaagcggcggatgaacggccggagccgtctgcaaatccatggtttctccctccctttgaaatttggtggatcggtcagaacagacgcacggtcatgccgtcggtcaggtagccggttcggatggaagtgacgtaagccttgccgccttcttcccgcagcaccgtcaccggcacgaacagaggctcggactcggtgacgatgaccacgcccaccgcgtcgttctgggtgtacagcgcccgggagggcacctccatgcaatccacatattcgcccagctgagcccggcaggtgcgcatatacagcacatcggacacatcgcccagcacagccagtcgaaccagcagctcaccgccggaacgggtggaggacagcacctgcgcgtccaccaccgtgctggaaaactgttccagcaccagcttgtaggtgtccccgtcccgggggctccacgtgtcgtttttcaccagcatcaggacggcgtagttgccctccttcaccagccggtacaggtcggtgcggcccctcgcggcggtgccacggtcgggcttcacgccgttgatcatggaacgcacctgagagggcgtgtagctttcataggcgctgggggtcagcgcgtattcgaagccgtcggtgtaaaagctgacgatgctctgctgcatggcccgcttgggcttgatccagctttcgatgcgtttttcctgcgtggcttcgtcgtcgtagagacggttcaggcgcatatcggtggaatatttggtgcggaagtagtcctgccgctgggtgatggccgtggccagaatctgctcctgattggtcagattgccccgtgcgccgtgcaccagactgcgcacctccagtccacgctccagcacctcgttttccagtcgctccatgcgctggtcaaagtccgtttcgctggccagaaggctttgctgatagtcgttgatggcgtcccggtcgtcctgcagagcggtcatttcggcggtactgtagccggtggaatacacgtagcaaagaatatcgccgctgtagaccacgctgccctcctgggctacgtattcgatggactgaacgccctcgtcgtcaaaggccgtctcgtttcggacgatcagcgcgtcaccggtataggtggtgccgatggaactggcctttaccgtagcggtggcggtccgctgcccggagccgaagcggctgtaggcataaacgccgccgccgatgatggccgcgcccagaagaagcgccaacacccgttttccgccgcccggtttccggggctttttcggcttcttgagcttcttccccggctgattgtaggggttgggctgaatggggggcatctgcgggggcatattgggcggcacaaaggctccgccctgcatgggctgggaaagatccggctgctgcatgatgggctgctggccgaagtcctgcaccggctgactgtatacgccgccttggggcacaaaggctcccggctgctgaaagggcggcatttgctggggctgctgggaaaaatccccataccccggcatgaccggcggcatctgctgcgtataatcaaagggctggccctgcggcacagaagcaccgggctgaactgcgccgtaggggggcgcgaaggttccgcctgcgggctgaccattctggggcggaacggcgttgggcgaaaagccggcgggcgctccgccctgaccgtaaaaatttggatcctgctgcatcgccgttctccctccttctgtgaattctaccgtatttccatagggcgctgcggtcaacgagcgccctccatggcgcgcaggcgctccagcacccggcgctccatccgggaaacctgcatctgggaaacgcccagccgtctggccgtctcccgctggcccagccgctcctcatagcgcaggagcaagagttgtttttcctgcggggtcacgcggctcaggatccattccatccactggctgcgttcctgacgctccagctccgggtcgtcttcgcccaaaagatcggccagatcggtctcgccggtctcgtccaccggcgcgtccagcgataccacttccgtctgccgtttcagattgatgagggcgatcatttcctcgggagtaatgcccatttcctgcgccagctccatggcgctgggggtgcgcaggtgctcctgctcgaagcgctcctgcagccgggccaactggtacagccgctgccgtgcgtcccggggagcacgcaccatgctgcccttatcccgcagataattgcgcagatcgccggtgatggtgggcaccgcgtaggtaacgaagcgcaggttccggtctggctcgtagcgttccagcgccttcagaagtcccatggccgccacctgctccagatcctcccggggcatgccccgaccggtgaacttggcggcaatggctttcgacagcgggagcagcccctcgaacagacggtcacgcagctcccgatcccgggtctgggcatattcgtgcagtccctgtgacagttgctcgtttttcatcggagccaccgcctactctgccagagaaccgcaaatgccgtacacgccgtgctcgtcggtctccagacggacttccggcagcagcgtttccagcacgcagcgggcgatctccgcgtccagcgcatccgccgggccctgtcctgcttccccttcggcggaaaagcggaattgcagccgtcctttttccgcccgggcgctgagtaccagcgtttcgggggtggtggtctgatgaaggaggcagtcgcagcattcgttgacggcagtctgcaggtcgccgatcagatcagcgtccagctccgccagcatacccagcccgctcagggccatgcgggcgatcagccagtcctcctgccgcgccgacagccgaagaaccatttcgtggggcctgtccatagccagtttgcctccttccggcggaaatacccaaggatagccataattgtaacataaatgtaaagaacaacgcaagcaattaagaaaactttgttacgcctttttcatgattcttttcgggagttttggcagaaaagctggttttttcgggaaatggcaggaaccgctgggcgcacaggcacaggggcgtcagagccgccacaaaggagaagaaccgcgcgtcctgcccgcagagcagcagcatggtggccagacagtagcacaggaggggaaagaccggcaaaagcctttccgtgccgccgtggtacagcgcccacagggtcgcgagcagcaggagcagcagctgcgcgccggtgtttcggctcagccagcgcaggggaagaaattccagcggcgcggacagaaggtccgtcacggcctgaccgacggcgtgaaattggcggggtgctttttgagcgacgtccagatcgccggaattggtcactcgctggtagctgcgatcctgccccgatacatcccataccagcccggtgacctcgttgaaggtctcgaaggccagccggggatccgccgccgccgtccgggcggccatggaaagcaggctcgtcatcgtctgagactgaatcttttcccggaagaatgtgaacttgatggaattatagtccgaccggcggtaggtgttctgccagccgtcctcgtcggccagcgtgtccagaaacgcccgagtctcgccatccagaagctccggctcccgctggcgggcgttgcacagcagggtcatgggcaggcccacggcctcttccagcgtgttgtcgggatagacgatgtccagccggctgtacagcccgccctggatcagcgcaagacagccgaggcagcacagcgcgcccgtcagcacaccttttttctgtctgcggaaataacacccggcggccagcagccccaacggaagggtcagcagaaagccgttctgccgcaccagcgtggtaaaggccaacgccagcccgaagcagagggcgtggcaggttttggaaagccatgcgccccgggtgcggatcagctgaaccgtctgcccgaaaagtagcagacagccgatggtcatggcgttgtccttgccgacgtacatcatcgtgttgcgcacgggctccatcagcgccgtcagataggcgcacaaaaggcacagccagcggggcgcgccggtgcggcgcacagatgcggcggcgtagcccagcgccagcgagaagcacacgatctgcaccagcaccgcgaagctgtaatggttgtacacccgcgtgaccagccagatcagcagcgtatggaacaccgggtgccagttgttgaactggccgctttgggcctgctgccactgattggccgcgtcgtagctgaccccgccgggatagcagccgagaaaggcgaaccccagcacgaaaagagcaagagcggcgctgccaaggaacaccggcaggtcaaaggagtccttttgctgaaccgccgcgggccgcagccggggacaggcccacaggaacagaagaaacagccccgcgctgaaaagcaggaaccagagaaccgccgcggcggtctgtacgcccccggtcaggaacgcgctctggctgaaataaagcgcataggccccgtaaaacgccaaacacaccgcgcacaggaaaaaccatgcgcggtgtgccttgctttgccaatgatcgtgccggaaacatgaatgcaccttcatcgctcctttgtggaaaaagacgatcattccgaaacaaattcgtcgtaaatggcccgaatggcctgctgaaattctccgctgtccacgcccaccagaatactcaactcgctgctgccctggtcgatcatgcggacgttgatgtgatagcggctcaacgcagtgaacagccgggcggcggtgccgggattgtgcaccatgccccggcctacggtggcgatgatgcccatgttatcgtgaatggtcagggtgtcggggttggtggtttcccagatgcgccgggtcagctgttccttcaccggctccagttcggcggtggaaagcaccacgcacatggtgtcgatgcccgtgggcatgtgctcaaaggacagaccgaactcctccaccgcctgcagcaccttgcggccgaagcccacctcgccgttcatcatggccttttccacagagatgacgctgaagccaagccgccccgcgatgccggtgatgacataggggttaggttcctccaccgcgccgtgggtgatcatggtgccgatctcctccggggcgttggtgttgcggatgttggtggggatgcccgcccggtggacgggaaatacgctgtcctcgtggagcacggtcgcgcccatatagctcagctcccgcagctcccggtaggtaatgtggcggatgggccgggcgttgggcacgatgtgggggtcggccatcagaaagccgttcacgtccgtccagttttcatacatctccgcataggcagcccgggccacgatggagccggaaatgtcgctgccgccccgggagaaggtgtggacttcgccattgcggatactgccgtagaaaccggggatcacggcctgaggcacggctttcagcttctcggccatcacatcgttggtgcgctcgctgtcaaaggtgccgtcgtcgttgaaaaacaccagatctttaggatccagaaaggcaaagcccagatagtccgccagcagcaggccgttgagatactcgccccggctggcgcagaaatcctcgctggccccttcccggatgagccgttccacctcgtccagctcccgggcgatggggaaggaaagccccagttcttccgcgatggacagatagcgctcccgtacccggcgaaaaatcggctcgatgttttcgccgtttcgctgggcgcggtaggtctggtagagcaggtcggtgattttttcatcctccggaaaacgccgcccgggcgcgctgggcaccacgtagcagcggcgcggatccattcggataatatcgcgcacttttcggaactgagctgcgtccgccagggaactgccgccgaatttgaccacaatttttcccatggaatcgtttcctccaatatcacggagagctagccgcctccgaagctttattttatccgattttcggcctgaaagtcaatactgcctcccgggggcggctttcaggccgaaaaaacgccatccctcgaaacggcgaaagccgaaaaacaagggatggtgtagaatatgcatttgaactgaaccgcgttaccgggcgtattcctcccggaggatgctcatcatgcccacgtcgcagaaagcgccatgggcgaaaaaggcgtggcacttcacgccttccagccggaaaccggcccgctcatagcagcggcgggcggcggcgttgtccatgcggacttccagctccagccgctccagtcccagcgtcaggaaaacgtgcttttccagaagcagcagcgcttccgtgccaaggccccggccccggttttccgccccggcgatcaccatgcccagcttgccgcagcgcagccgccagtccacggtgaacatgtccagctgacccagatagcgtccgctttcccggtctgcaatgacgaaattaaaggagttgtggctgctctgaagcatccgctgcagaaattcttccgtatccaccatggtctggggcggccagtaggccgtggaaaggaagcaggtggtggactcgtcgttgacccattggcggatggcttccagatcgtccgcctgatattcccgcagctgaatgcgttcgcccagcagtctcggcatggcttactcctcgtcaccctcgtcttcgtcgggttccagctccagtgcgtcggccatggcgtcttcttcttccatggcggccatgcacttttcgaacacggcgttgaattcgtcctcgtcctcgatggtggcgtaaacgtcctcatcgctgtcttcgtcccggatgatcttcaggatgatggcttcgccttccttgcagtcgtccatatcctcggtggcctccagcagcacatagtagctgccttcatgctccagcgtcatcaggtgttcaaagttcaggtcgttgccgttttcatcctgcagctgcaccagattgttgttttcttcattcgccataagtcattcctctttccgccgccccgctctgcgaggccagccattgttccaggatcaccgccgcggccagcttgtccacgtattgcttccggttttcccggcggacgctgccggagatcagcacccgctcggcggtgacggtggtcattcgttcgtcctgatagcgcacgtccagcccggcgtccgacaacactttgccgaaagcctgcgccttttccgcctgcccgccccgggtgccgtccatgttcagcggcagcccgagcagcaccgtcgcggtgtcgaaacggcggcaaagctcctgtacataccggcagtccggcccgtagccgacccgcttgtatacctccagcggctgggcgatggttcccgtgggatcggtcacggccacgccgatgcgcacgtcgcccacatccaaagcgatcacgcgtcccatcagccgtccagtcctttcaggtacacccgaaccagctcctccatgatctcatcccgttccagacggcagatcatgctgcgggcctgcccatagctagtgatataggtaggatcgccggagatcagatagccgacgatctgggtgacgggatcgtagcccttggcctgcagcgctcggtacacatggttcaggatcgctcccgcatcccgtgcgccttccataacgggcgtaaatttggtggttccgttttccgtcatgaaagaaccccctctcaaggtaatcaagactagtatactccctttttcggcaaaagaaaagcccggaatttgacggaaagtttttttagctgcggagatatgtttgaccttcccccgctcctgcgctataatgagacgcgctttttgcgcatcctaactgattccctgaataaggagaaaaaccctatggagcagaaaccgaacgtccttccccttcggatggaggatgtgagctatcaatacgaacccgacgcacggcccgccgtcagccacgtaacgctggaggtggagcggggcagctttgtggcggtgctgggccataacggctcgggcaagagcacgctggccaagctgatgaacgccctgttcctgcccacggagggccgggtgctggtgtgcggcatggacaccctgaccgaagaaaaggtatggaatatccgccgccacgcgggcatggtgttccagaacccggataaccagatcgtggccaacgtggtgcgggaggatgtggccttcgggctggaaaacctgggcgtgccgcaggacgaaatggtccgccgggtggaggcggccctcagcgccgtgcgcatgagcgagtttgccgagaccgcgccccatatgctttccggcggccagaagcagcgcgtggccatcgcgggcgcgctggccatggagcctgaactcatcatcatggacgaagccaccgccatgctggacccctccggccgggcggaggtgctggccaccgtacgcaagctgaaccgggaaaaaggcatgaccgtggtctggatcacccattttatggaggaagccgccgtggccgaccggctggtggtcatgaacgacggttccgtggcgatggaaggcacgccccggcaggtgttctcccgggtggaggagatcaaggcgctggggctggacgtgccgcccatggccgaactggcccagaccctgcgggacaagggactgcctctcccggaagggattctcaccgtcagcgatatggtaaaggagctgaaagacgtactatgcccatccaagtagagcatctgacccatacctatatgacggacagtccctttgccgccacggcgttggaggacgtgagcctgaccatcgaggacggcgagctgatcggtctgctgggccacaccggctccggcaagaccacgctggtgcagcatttgaacggcctgctcaagcccacctccggcaaggtggtggtggatgggctggacattactgaaaaagacgtgagcctgctggaggtgcgccgccgggtgggactggtgttccagtacccggagtaccagctgtttgaggagaccgtcgccaaggacgtagcctttggcccgaagaatctgggcctttccgagcaggaggtggacgaacgcgtccgctatgccctgcaggaagtggggctcgtttatgaggatattgcggagcgctcgccctttgaactcagcggcggccagatgcgccgggtggctatcgcgggcgtgctggccatgcggcctaaaacgctgattctggacgaaccgaccgccggactggaccctgccggacggcgcagcattctgggcatgatccgggagctgcacgccgcgggcggactgacggtggtcatggtcagccacaatatggacgatatttcctcactggcgacccggctggtggtcatgagccgggggaagatggtgctgaccggcacgccccgggaagtgttccagcaccgggagctgctgcattccatcggtctgggtattcctcaggcggcggagctgacgcagcagctgatcgcggagggctaccccctgcccgccgatctgtacaccccggcggaggtggccgaggcgctgctgaagcttccccggaaggaggaaaaaacatgctgaaggacattacgctggggcagtatttgccgggaaaatccctggttcaccagctggacccccggacgaagatcctgctgaccatcgtttatatcgccatgatcttctgcgtgtccaacccggtgtggtacgttatcccgctggcgttcctgattctgtgcgccaagatgtccgggctgaaggcggcgcagcttctgaaaactgtgaagcccctgcggttcctgctgatcctgaccttcgtactgaacctgttcttttccagcggcgagacggtgctggtcagctggggcattctgcgcattacccgggaagggctgatcaccgccgtgcatttctgcatgcggctgatctttctggtggcgggcacctcggtgctgacgctgaccacgtcgcccatttccctgtgcgacggtatggagacgctgctcaagcccttgagcaagctgcattttcctgctcacgagctggcgatgatgatgaccatcgccctgcgcttcatcccgaccctgatcgaggaagccgacaagatcatgaaggcgcagatggcccggggcgcggattttgaaagcggcaatctcatcaagcgggccaaggccatggtgcccctgctggtgccgctgttcgtcagcgctttccgccgggcgggagagctggccatggccatggaagcccgctgctatcacggcggcgagggccgcacccggctccgggtgctgcacttccagaagatcgactggcaggcctcgctggtgacggcggcggcgctgcttgtgaccattctgtgcagaaggtggaatctgctatgacccagctgccacccctcatcaagggctgctgcccggagggaaagcgccgggtgctgttgaccgtcagctacgatggcacggcctacgcgggctggcagcgccagcagaacgcgctggcggtgcagcaggtgctggaagaggccctgcggaagctgactggcgagaaaaccctgaccgtgaccggctccagccggacggacgcgggcgttcacgcgctggggcagcgggtgcatttcgatactgccagccgcattccgccggagaaatttccctttgcgctgaatacctgcctgcctgccgacatccgcgtgctggacggacggtacgtcccggcggcgttccatgcccggttcgacgcggcgggcaagcggtatacctaccgcatccacaacgcgccccatgccagcgccctgtaccgccatctctgcgcccacgtgccggttccgctgcaaatggaacccatggagcgcagtctgcaaacgctgctgggcacccatgacttttctgcctttcaggcggcgggcggcacggccaagaccaccgtccgcaccattgaacaggtggagctgacccggcagggcgacgacctgacgctgaccattcgaggcaatgctttcctatacaatatggtgcgcatcatcgccggaaccatgatcggcgtcggcatgagccgtctgccggaggacagcttcgagcaggccctccgcaccggcgaccggctgaagctgggcatgaccgccccggcctgcgggctggagctgacagaagtgttctaccgcgataaagacctgaacggagaaaaatgaaaatgcaaacacgcctcccgcaggaaattcccgcgggaggcacctgaatattgattggctgccagcgcccgcgaacagcgctctgcggcccgctcccctacggggcgcgggcttcggactgcggtagccctttcagggctgccctcgtcctcggtgttgcgcacccttaagctggttcgcgggaaaagtgctgcggcacaaggcttaggggctccgttccgcaacctcaatcgtcgtctttggcactgccgtgccaaatcctcgtt

SEQ ID NO: 1981 - DNA, 32759 bp, Unknown
  16S sequences of unknown bacteria
tgacacagcgaatttgaagctgacgcttcaaatgtcgtggcaaggtaaatcagaggcaacttggcagcgcggcgagttttgcttcgcaaaacatcgtggcgactcctgacacagcgaatttgaagctgacgcttcaaatgtcgtggcaaggtaaatcagagataacttggcagcacagccgcacaggagtccgatccttctgaagcggctgcggctgcaggaaagcggcacagtggattctgaagaagtgcacagaacaccgctgacgccgccatgggaaagacggatatggtgaatccgaccggtccagaggtttgattgctgctgccgggtggcagtgatccagctttcccgtaagatccggcccagaccgacagtgccggagatgggcagatcaacccggatagaaaaccgattgcagtcaaggttttccccctcactggcggcactccaaccgccggctcacatcgtcgaaacagagtgagcatctcttcttacaaacagatttgtttttcttccatccaagcaaaaaggcagggccattacgggctctgcctttttctatgggtggaattttggttttggatggatcgccggacagttcctggcagtcccaagaactttctggaagtaatttctaagaaaatacaaaattatgtattttataccaattttggatactgtaacaattttgtcatatttcccaaattcacccaagtggaacatttgtataaatcggcttatttgtttgattttaagttcaaaatggcccaaaattcacataaatctgttatatttgtaacgatctgttcactgatatggaattttttgtgcgacaaatgttaataaattacgaaagaattacaaacaagcaacaattaccattgcctttttcgacagcttcctgtatgatttggggcgtagggagaacaaacctatgaaacactcaaaggaggcaaaaaatatgaacaagatttttgcaactgtactggcagctgttatgactgtcagcctgacatcggtggctttcgccgataccaccaaggatatgggctttgtcctgggttacaagactgacgcaacaggtaatggagcaactgtttacgcagatcaggacgatgacggcaagtatgatgacgatactctggctggtctgaagaacctggaagctggttccaagatctacattccgatcctgaagtgggacgacaagaactccgactccaatgtggacagcggcgagctgactcagcccaccagcagcgacatcaagggttacaaggcctatgccaactggaaggtcggcagcctggatgagaaccccgagatcaagtatgtaaagttcaagggcgttgacggcaattacggctatggttacgctgtggttgtaaccctgcccgagaccgagtcttccaaggtattcgacctggctggtactctgagcgttgccaagaccagctccaaggccaatgatgccatcaagcagaacaagttcgcgttcgacaccagctatgcttccaccaccaccatgctggacaagtatgacggcggtgatctgggcaagggcggcgccattgtaaagtttgctgaggactgcggcgagatcgatatcgagttcggcgaagaggcactgttcactgtcaacgcaagcggccagggcaagctgaacctgaagtacaacactgacttcaatgctgagtttgctgctatgtacaaggatgccaacattgacttcctgaacttcgctggtgagccttccttcaaccgcaatggtactctgtacatctacgccaaggaggacagctacctgtacgaggtaactgctgacggcgctaaggagctggatgccaagtgggacgaggactacgaggcttggaagctgaccacccgtaccctgaccagctatgctgtatccgacaccaagctggacaccaagaccaccactgaggacaaggaagagggcagctcttccaccggttccagcagcaccgacagcggcaaggagaaccccgataccggtcggtaagtctttgacttaccgacacagcgaatttggctttgccaaatatcgcctttgggttcaaggtctgagctgacgcttcagatgtcgtggcaaggcaaaacagagagaacccggcggcgagttttgtttcgcgcgatgttgtggtgtaaaagatggcctctggtcccggcgggcttcacacagatgtgatccaccgccccgggactgagcctggaactgtgttccgaacatcgccgggccatctcaggttcccggtttcccttgaagggtcggaacggtgttccgatcctcgccgggattgtcaaaaaaccttcgggttccggctgtggggcggacagtgcccgctcccgcaggactgacagatgggctgtgtccatctgccaaagccgggaaaccagcctttctttccggtggaaaaccggaggcggtcgcgccgaaaacagcgcaggaatcccgatttcgggcagcagggggttccggtgattctctcccgatctctgcccgaatggggatttcccgccccaaggggaatcctggcggctgttctgccgcaggctcacaccgtcgacacaggtgagcatatcttcttataaacagttttgttttcttccatccaagcaaaaaggcagggccattacgggctctgccttttttacagcataaaaaagaacccctgtcccaggggacagaggtcctttgagtcaacgggttcagaatcagagcttgcttctccagaagtccatgttggcggcattcttcatgtctaccagctccagagcggtctgctctgcccactcccaggccttctgtgcctgagcagcggtgtagtcggtgagcagctgacgggcatactccggagaggtctcagccagcttgcggtaagcctcgtcgatcagcggcttggcagcagtcatggcagcttccatcttctcgatgtcgccatgaaccttctcctcgcagaactgatagtcgaactccatgatgttctccagcatgtggaaggcccagtaagcccggctgctgtcatagcggaactcagcggggtcaacggcaaagtgggaagccagtgcggtcttggcgccgaagttctcatagcccttgggcagcttggtgatgcctacataccagggcagatagggagcgatgcagggacgcgggaaagcacgccatacgcaggtcagctcaggaatatcggcaaagtcgatcaccatgctctccacagtggtatcacggcagatgccatagcggtgggggctcatcttgggatcggtcttgaggtcctcctcatggccgtcgtagtgggagcgcaggatcttcttgaggtcctccacgccatacttgcggggtgccttgatggagaaggtgcggtgcggaaccggttctgtgccggtgatctgacgccaggccaggtcggaacgccacatattggaggggatcactacgctgccttcctgataggtcagagcaaagtcgaagtcggagtaatcgccttccttggcgggcttgtaccagccattttccagagcgtcggacagcagggtcttggagaagtagaacttcttgtgctcggtatcgttgaagtccacattccggatggtcagccagttggggatatactggatttcatcatcgcccacacgctgtgccacaaagttgtgaccgattacaacctggaaaatccagccctcgtccttatcgcagatggcataggaacgggtggagtagtagccgtacttttccaccagggcagcggcgatctccacgccttcccgggcagagtgggcacgctcagcgatcagacggcgcagggcataacccataccgccggttacaccttcggggtgcttggaatccacacagccattggaaaccaccgatacgccatattcattgataaaggcatcggcaaaggcctcgccattcaggctgcggaactcggaccagtaataagcgcaggtttcaggaacctggtcgataacggcagtgccgtctgcaaagcggactgtttcaccctcagcatgctgcatgcggggtaccagatgggactgtaccatacagccggggtcgtcctcattgtggcctaccagcacccgaccggttgtggtagcgttcttgcccacaatgatggtgctgcagtccgtacggggatatttttctgtatctgccatgaaacggatcatgttcagaactcctttctgctcgatgaatagtcattattattactataccatttttgtgcagtcaaatcaacgcatttcggtaaaaaccacgaagaactgccgcaatatcccggtcaaaattcccgtaggaaacgctctccatattgaaaaacagccaaaatactgataatattataggtgcaaggggggatctgtatggcaagaatctcaaaacaggacgcagcctttctggagcggtttcacaatggaacagagcccagagcccatacctatttcggtgcgcatctgacccgcaaacgcaccggagaagaaggggttaccttccgggtctgggcacccaatgccactggcgtatcggtggtaggggacttcaatggctgggaccccaaggctgcccggatgcgccgggtggacgatcagggtgtctgggagtgctttatttccggtctgccggcaggcacggcctataaatattgtatgatcgctgccaatgggaacacattgctcaagatggacccctatggagtgcgtaccacaccgcagccccagaatgattcgatggtggctggggcggactgctatgcctggggtgatgacgactggatgaccgagcggaagagctttggtcacggacggcccatcaatatctatcaggtgcatgcgggttcctggcgccgccatgaggacggacggctctgcacctatgcggaactggctgataccctgccggattatgtccatgaaatgggctacaactatctggaactgaccccgctgatggaatacagctttgacggggcctggggttaccgcaccaccaattatttctcgcccaccttccggtacggcgatcctgacggactccggaagctggtggaccggtgccatcagctgggcatcggcgtgctcatggactggaatattgcccacttccccaaggacagctatggcctgatcgatctggacggcggcagctgctatgaatacagcgaccccatgaagcgggagcacagccagtgggatacccgtgtctttgactacggacggcaggaggtacgggagttcctgatctccaatgccctctactggctggaggagtaccacatggacggcctgcggctcaacaatgtctcctcgatgctctatctggactatggcaaggaatcctgggaatggacccccaatatccagggcggacgggagaacctcgaagccatcgacttcctcaagcgtctcaatgaaacagtccaggcggaggtgccgggcgcactgatgatcggcgaggagtttgccggctttgagaacatgaccctgccggtgctgcatggcggtctgggctttacccacatgtggaatgtgcgctggaccgaggcgatgatgaactacttctcgctggcgccggaataccgtgcctacaatctggaccgtctggtgttcagtgccaccaccgcctttgaggaggactatatcctgcctctctcctataaggagtttgtctacggcaagcgcagcctgctggagaagttccccggcctggaggccgagaagatggcgggtgtccgcagtttcttcggctttatgatggccttcccgggcaagaagatgagcttcatgggcagcgagttcggtcaggtgagccagtgggattaccacggtcagctggaatgggatctgctcgagaatgaggggcaccgtcagatgcagacctgcatccgggagctcaaccatatctatgccaggaactgtcccctctggcaggacgagtccaacaagggcagcttctactggatcgacccgggccgtaccgacccggatgtagtggccttctcccggatcgatgaggagggggacgagctgctggtggtgtgcaacttctcggataccgcctgcaattacaagctgggcctgcccgaggaaaagacctacaccgtgatctttgactccaacctgacccggtacggcggcacccagaccgaggagaaccggcggattctgccggtgccccgggagtatggcagctttgaccagtatgccgaactggaactggctccgtacagtgtgctgtacctgcggtacgatgtccagcccgactgacagaaccataaaaagccctctgccggctggcagggggcttttctgcgtcctggggaaggttatgagttggacgccagttccggtacggcggcggtgcggtgttccggtttgggcgccggggtataggagtgggagagatagagcgccagcttggcacaccccggtccgatgagctcatagagcacactggacgccatgatgatggtgtagaggtcgctgccgatgccgcctcccagggtgcgggcgcagagggcagccagtccgatggacacaccggcctgggggatcagcgccagccccagacagcggcagaccggctgggagagcccggccgtgcggcagcccagccaggctccggcatactttccgatgatgcgggcaaagaagtagagaatgccgatggtgagcagtgactcggagccgtccgggctggcggagaagagggcgccgaggtcaaagcagagccccgaccgcacgaagaagagcagcagaatgggcggggagaagctcgccagctgggcaaagagcaggtcgtcgccggtgaggttgatatacaccatgcccatggacatgcaccccagcagcggggaaacttccagcatatcgcagagcccgcagaaggcaaagagaacgcccagggccaggatcagacggttgtcagtggtgcgggtggcggggagcagccatttgagcagcagtccgcatacgccgcccagtatcagcatgcccagggtagtgccgatgggcaccagcaggtcgcccaccgggtccgaggagcgtccggtgaggctgtgcagggcaaaggcaatggcagcgctgtacgccagcaggctcaccacatcgtccagagccaccacctgcagcagggtatccaccagttccccctgagcgccggtctggcggatggtcatcatggtggaggccggggcggtggcgctggcgagggcagccagcaccacgcagaagggcaggttcagccccagcaggaaccgggtgaccccgaataccaccagcgaagcggcacaggcttcggcgatggtgacccagaccaccttccagccgtttttgcgcagggtttcgagcttgaagaactccccggcgctgaaggcgatgaagcagagagccagatccgccaggaaatcggtcttttcgatcatgggctgggggatcaggttcaggcagcagggcccgatgagaatgccggcggtgaggtaggcggtgacgctgggcagacgcagccgtttggtgatacgggtcatgccgaaggcgcagaagaacatgatggcaaggggtatgataatcagggcggcgggcgagaggtccgccagtctgagatacagggaatcgagcatgggaaacttcctccttctgaaaaaagatgggatgctttagcagagccgggttggaaaaacatctgctttatgatatactgggacttggataaaagcaaattatagttttattggatatgataaaaataatttatgatgaaggagggacagttccatgcttgatcccaagctggatacgctgctgctggtggcggagaagaggaatttcacccgggcagcccaggcgctctcgctgacccagccggcggtgagccatcacatcagccagctggaacaggagctgggagtgcggctgtttgtgcggggaaacggcgatctgatgctgactcccgagggggagaccgtactgcggtatgtgcgccggatgaaggcgctggagaagaagatggcggaggaactgcaggaggcgggacggcgtctcacccggctgcgcatcggcatcacccacacggcggagagcagcattgtggcagaggtactggcccgttacaccaatgaaaaccccggtatctccataacgattgttacggacaatataaataatctttatgatatgctggaaaacttcgagctggatctggcggtggtggagggtcgttccacccgtccggagctgagtgccctgatgctggacaccgattatctggtgtgcgtgctggcaaatacccatccgctctcccacagttccatgatcaccctggacgagatccggcaggaaaaactgatcctgcgcctgcccaattccgagacccgggtgcggttcgaatcggcgctggctgccatcggggagtccattgccgacttccaggtgatcctggaggtggacaatgtggcgaccatcaaggatctgatccgcaagaacctgggcatctccattctggcccggagcgcctgtatggacgagctgcgcaagggcaagctcacggccctgcccatcgagaacctgagcatggcccgggagaccaacctggtctatcaccgggattttgcccacaaggagacgctgcaggatattctggcgctgtacaaaaaacagctccgggaatatggccgggcttgacagagtagggagggtctggtatagtagtacggtatcgggaatgaagttctcccgcgggaaaccggaaccgccgtatgactggctgatgacttctgtgattcgtaaggtcgcaggaggcatcagccttttttgcgtccaaaacccctgaaggaggaaatttgttatgctcacttcccttgcgctgattttcctggcgggactcgccatggcagccctgtgcagcctgctgcgcctgccccggatcatcggcatgctcttcaccggaatcctgctcggcccctatgtcctggggctgctggacccgttcatcctcgccatcagtgccgacctgcggcagatggcactcatcatcattctcatcaaggcggggctttcgctggacctcggcgacctgcgccgggtgggacgcccggcagtgctcatgtccttcctgcccgccagctttgagatcctggcctatatcctgtttgctcccatgctgctgggcatcacccggctggaagccgccgtcatgggcgccgtgctgggggctgtgtccccggcagtggtggtgccccggatggtccgcctgatggaggagggccggggcacccgggaaggcgttccccagctcattctcgccggagcctcctgcgatgatgtctttgtcatcgtcctcttttccgccttcaccggcatggcccagggcggcagtgtcaatctggcggagttcgtgggcattccggtatccatctgcaccggaatcctgctgggtctggctgtgggctggctcctctgccggttcttcgacctggcctggaaccggggactgccggtgcggggcagcatgaaggtgctgatcgtgctgggcatctccttcctgctggtggctgccgaggactggctggagggaatccttcccctgtccggactgctggcagtgatgagcatggcctgcgctctgcggctgtggggcgtgtccagtgtcaccgaccggctctcggagaaattcggcaagctgtggatcgctgccgaagtgctgctcttcgtgctggtgggcgcggcagtggatatccgctacaccctccaggccggagccgccgccgtggtgatgatcctgctggccctctgtgtccgggcggtgggcgttctgctggctctggccggcacccgtctggactggaaggagcggctcttctgcgtcattgcctatctgcccaaggccacagtacaggctgccatcggttcggtgccgctggcaatgggtctgccctgcggagctctggtgctctcggtggcagtgctggcgatccttatcacagcgccgctgggagccatcggcatcgacagtacctgccgccgtctgctgcgtcccgcagactgatcttcccattttccccaaataaaaaaccggagctctccgcacgggaaagctccggtttttgttttatttcacagtattacaggatctccacctgcagcgccttcatggcattgagggcgttttcatgggcttcgggggtcacgccggcacagcagcttgcccggactgtcatgggcacttccgggcagtaggccttgagcagcgccacattggcaagcacacagatgtcggtgcagaggccgatgacctcgatggcatcgggattgagcgaccggacatactcagccagctccaggctgccgaagctgcccttttcaaagatggagctgcccaccgagagatcctggagctctgccgggaactgccagccgtcgctgccccgcagacagtgcattaccgggaggtttctgccctcctgggtcttgaggtagtcgatgctgtgggtatccttggtgaagatcacctgccagcggtcacccatggcctcgacgatgcgctccttgacagccgggacaatggcctgggcttccgctgtgcccagcgagccatcgataaagtccttctgcatatccacaacgataagaagattcatagggattcctcctgttttataaaattgccaaagtttcagagcgggcggcgtccgccggcacaccggggaacacctgccagatcggtctgacagaacacctccgcaaagccccgctgacgcagcagttccgggacgctttcgccctggtcatagccgatttcgaagatgagccagccgccgggacggagatggtcatagcagctccgggtgagctgccggtagaaccgcagtccgtcctcgccgccgtagagcgccagttccggttcgtgccgtacctggggagagagggtctgcatatccgccccggtgatatagggcgggttggatacaatgaggtcgcagacaccgtcgggcagacgggtgagcacatcggtctgcaccgcctccacctgaccgggggccagggcggcgatgttccggcgcaggtaggaaagcgcctcatccgagagctctgccgccaggatacgggcatcggggcggcagctggcaagggccagggcaatggcgccgctgccgctgcacagatcccagatcaccgggccaggtgagggggtgagccgttccagacaggcgtccaccaccgtttcggtgtccgcccgggggatcagcacaccgggccccactgccagggtcaggccgtagaactcccattcccccagcaggtactggagcggttcgccgccccggagccgggccagggcgtcctctgcccggaactgccagtcctcggggcaggggtcggcggcatgggcaatgagccaggcctgttcctgccccgaaagccaccgcagcagctgggcagcgtcaaaacgggggctttccgcccccagttctgtgagtttctgttccagactgcgctggaacgcatggatcgtcatctcagttcccccactggtcgctgccgtcactggggatacagggcagcatcgaggcaatggctacttcgatgtgttcggtatccggttcggcagtggtgagccgctgcagccacaggccgggagcggagatcagccgggtgagggggttggaatagcgtccggcatagcggatgatctcaaaggagatgcccactgtcaccggcagcaggacgagcttgagcagcacccggatcaccaggctgttccaggtgacaaaggagaacaccagcaccgacaccaccaggacgatcagcaggaagctggtgccgcaccgggggtggaaccgggtgtacttcttcacattttcgggggtgagctcctcgccggcctcatagcaggcgatggtcttgtgttcggcgccatggtactggaacatccggtgcatatccttgctgcggctgaccacggcaagatagagcacaaagagggtgatcttcagcacaccctccagaatggtgcgggaccagtcgggaatgagatctcccagcagtcccaccaggaaggcaggcagcaccatgaagagcagcacggcagccaccacgccgatgagcatggcaaggtaggtgagggcatccgatgccttttttccgaatttgtcgatgagtttcttttcaaaggcggagggttcctcctcatagccggcgaggtctgccgaacgcatcaggcagcgatagcctacccgcagcgattccacaaagctcacacagccccggacgatgggaaccgaatgataccacttcttgccgccggagaaggtctcccaggtttcggtggtgatggatttgtcgggacggcgcaccgccatggcggactggtgcggtccccgcatcataatgccttcgatgagtgcctgaccgccgatggaagtctgtttgcaggcgcaggcgttctgattcttttctatttgggattcctcctttatgggccaaaacccccggtgctttccgggggtcagttgtcctcgatgtcgctgagatccagcttgttcaggtgtacagctgcgtcactgggcggagcagccttttcggcagtggcttcggaaatctgggtggagtcgtcgccccgctccataatgggcagggtgatggtgacagtggtgccttcgccctccaccgagctcacatccagccgtccgccgtgcatctggatgatctcatccgccacagccaggccaatgcccgaaccacgccgggtgagattggccttgtagaatttggtcttgatcttggggaggtcggcagcactgatgccgcagccggtgtcctccacctcgatgatgatattgtttccctccacccgggccgataccgtggtggtgtcgccgggatcggagtatttgagggcgttgtcaatgacattgatgaacacctggcgcagcttgccccggtcaccgaataccggcacaaacagatcgggctcgtcgtagatgaggagcattccctcccgcttggcacgctcggtatacatgatgactgcttcgctgagttccgccagcacatccatcttgctcttgaccagcttcatgcgtccggactgcatccgggagaagtccagcagctcctccaccatgtccgagaggcgttcggtctcccgcatgatcacccccatgccggtttccagggtggcatggtcgatattctcgtccatgagcatggtttcgccccagccgcggatggcggtgaggggagtgcgcagctcatgggataccgaggagatgaagtcgttcttgagcttttccgagttggcaagttcctccgccatgtagttgatcacatcgctgagctcgccgatttcatcgtcatttttcttttccagccgggccttgaagtcgccctgggcaatgcgccgggcggtttcagcgatctcacttaccggattgacgatggagttgatgaagtaggagctggagaagataacaaacagaatgattgccagacacaccgaaccgatgatggcggtgagcagcaggatctggttgtccacctgttccagcgagaccacataccgggtggcggccagattttcactggcagaaccggcagccaccgaaacagccatgatattttccccgctgatgcggccctgatagacatcaatgccgtccggagaggacatggcgccttcaaaatcgggcatgggcagatcctcttcgggcaggaagccggaggaggtcatcatcaccttgccgctgctgtcaatggccatgagttccatggtctcccggtactcgaaggtttccacgatgttctgcagttcctgggagaagttcaccgaactgtcctgggcataggtctgcagcagggtggagatgactgacgaccgggagatgatgatctgctggacgctgctgtaatagaaactgcgtacgccaaaggaaaaggcgatcatgaccccgagcaggatcacaaagatgacgccgaggccgttgaccagccagcgccgggtgatttttttcatggccacagccggaaggcctcctttcgggtcagaatgggaacagggttacgggttccacttgtagccgtaaccccagacagtggtgagatagcggggttcactgggctcgtcctcgatcttcatgcgaagccgccggatattcacatccacgatcttcacatcgcccatatagttttctccccagatattggagaggatctcgctgcgttccagggccttgttggggttctgcatgaagaactccatgatctggaattccacctgggtcaggtcgatgaggttgccgctcttggtgagggtacggctggagagattgaggataaacgggccggaatggatttcatcggcagtcttgccgccgccggacagggatacccggcgatagatggcatccacccgggccagcagttcggacggggagaagggcttggtgatatagtcgtcagcgccgagcatcaggccctggaccttgtccatctcctggctcttggcggagagcatgataatgccgatgctgctgctctgttcccggatgcggcggcacacttcaaagccatcgatgcccgggagcatgatgtccaggatggcgatgtcaaagtcgccgcctgcctgggcaaaggcttcgagcgctgcttcgccgctggcgacatccactacatcatagcccacccgcttgaggttgagcaccacaaaggcacggatattgtcttcgtcctccataacaaggatcttacgcatgaggaaaatacctcctttatatacagattgattgaaagtaatccgcaccgggcagtaccggcacgggagtttgcgggatcagctgagcaggaaccgggagcgtacctccgattcggtgatgctcagttcatggtcggtggtggggatactggctgtgtattcaaagatccccttggttgccagcgtgaagtagacatcggtgctgaacttatcctggtagtcctgatgggagctgaccttcagggtgagcagcactgtccccgaggagttgaggtcgccgttatagaccacaaactgccattcgttggtctcggtgacccggcgcactgtcacattgtccacccagctgtccggcatgaggaagatatagcccatctcccggttggataccaccgaataggcgggcagcagttctccgtcatggaggttctggtagtctatgcggtagatattctcgtcctcatcgctggaggaatatcccggcatcagggtggaaatgggaatatcaatgatgccgtcgccgttatagtcctggcaggtgagttctgctgggcggacggtctggtcatagaggctgtccgctgcctcctcctcttcgtcatcgccggtttcagccgctgtgacaacctccatattgaagccgtccagcaccacaatgtcggtggcggcggaggaggagctgatgagctcgtccacatagatggcggtgtcgccgtccagggtcttgcccagggtcaggccggtgaagtcaatggcacggctgctgagaatggtctcgtcccgggcaatgacccggctgcccgcccgccggacaatctgaatggacgggtcacggctgctggcccagccaagcagcaccatttcactgtaaccatcctcgttgatgtccatgaagtagagccggtcgccggcgccgctgaacagattggacagcgtccccttttcataggagtagatctcgatgtccagttcggtgcggccccggtccttccagctgatgatgaggtcattgcggtccagggtggagatggtcgccagatccaccgtgtagatgtcatcaccggcgccagccatgtcatagaccgattcccattcgccctggtcattctgatccaggatattcatgcggatggtgtcggtgccggtgagctggtagaacaccaccgcctcattggaggactcatcgtccaggttgcacaggatgtaggcggagcggttttcgccggagatgggatatttcagggtgaagtcatcggtgcccagtccccgttccagcgcctctgccagggcagcctggtcagggctgagcttggggggctcgagcaggtcttcggtattggcagggaccatactgcaggaggagagcagcccggtgagcaggcagacccccagcaaggccaggacaggtttcatcgggacagttccctcctttccggttgcgccgggaaatcaccagcggttctcgtgaatcttatcgggctctacccggtcgagggtttccttttcctcggcgggcatgcccagaacgatgagcgaataggtcttgatgtgctccggcaggccgagcagttccccgaagggctgctgacgctcggtgtgatccacaccgcaccatacggcgccgattcccaggctgtgggcagccagcaggatattctgggtggcagcggcacagtcgtccatgtagaacggcccggataccgactcgtccccgcagacagtgatggcccagtccgcctggggcagcatcttggcataggggtgcaggtcggagagcttctgcatgagctcccggtcggtaatggatacgaagtggaacggacggcggttcatggcgctgggcgcatagaaaccggcttccaggatggcacggcggaccggttccgcgatggactcaccggtatatttgcgaatgctgcggcgggatcggatcgcgtcgagcacaggattgttttccagcataaagcgcacctctttcttatggtattcccgatgaaggccccggagggggtgcccgcagtcaggagtcaaaaatctgctatatagcgaaaaaactactatatagattatatcaaaccgggcggctgtgtcaatgaaaaacggctgtctggaaaaggacggcagaggaggaaaaatggtgggaatcccagtaaaaaagccgtccggaccagccggacggcagatgaaaaagctaagccatgagattggacatataccggaagctgccgtcctcctggggacgcaccgacagcacccggctgctgtccggcaggggttcgccggtacagggatcgtacaggcagtagctgatgcgcagcagttcctcctgctcatgggcggacaggacccggacccggggaagttccgcttcatagtcccgttcaaaggtgtagcgcatgcagtcactggcatagtcgaagtcgtagacggtgtagaccaccgcccggcggtcgatgccgtcaaagtagcgggagagtgtctccaccaggtagttcaccggaatccagccgtcgggataggtctcccggaaggagatcccgtccacagcccaggcaatatcctctgccagcatgagcaggtcgccggcttcctccgggctgctccaggtcttttccccgatggcagtggcggcaatgggtttcagataggtgtcatagagctggcgcagctcggcgatgttcccgtagagctcggcgtcattcaccgcccggaaaccaaagtcctcgccgctgccggtctgggcggtgaagaacccatagcgggtgagctggggctcagtgagggtatcggtctgttccggttcagcggaggtgatccagtcctgtgtttcacttcgggagagggtgatctcctcgccggtgtttttgcagagaatccgggtgcaggcggcggtatcgcctgagccgctgaactggtacatctccaccgtgccgcccttcttggcaagggaggcggtggcttcctctgccatagccttggtggtgatgggctcctcttcatagctgatcaggctgcccgaatggaccgcctgctgccagagttcactctgagtgagttcttccggcaccggggcagccagcagggagctgtccagcagttcgctgccggattggaagctgcaggacgccaggaacagacaggcggcagctgccagggaaagcagacatcgtttcatggaatacctccgtagattcagaaaaaaacggctggcaccggggagttcccggcatcagccgcggcatggacaaaacttatgcctcccgcatcggggagagccggttaccggtcgccgggaacgcttccggtcacagcggattcggcatttttcaccaggctgagcagcgaggtggcaaagagcggatagagttcacccatccgctgggtggtgaggggctcggcgccctgatccaggtcgccgctctccaccagggcggcaatatcagcctcccgcagctgcatcacagcatcggcatagcggtcggagagcacccggggcagcgagaagagattctgctggttcttgggattggcggaatagaccagccggaacatccggtagaccgacagcatcaggaattcactgacggcagtgatgagccggcggtttccggtgcgggccatctggtcaaagaggatattcagcgaattggcaatgagcttcttattgaggaccggcaggataccggcactgcccatgacattttccttaccgcccatatcgggttcgggaatctcgtccaccgagagggtagtgccgtcccggtcagccgagcgtcccagcaggtaatcacaggatacgccatagaaatcggcgcattttaccaggaagcccaggccgcattcccggatgccgttttcataatgggagagcagcgcctgggagatccccagttcagccgcagcctgtttctggctgatatttttttctttgcgcaacagggtgatcacacgggaaaactcggatttcacggcgcagcctcctccagtggttgattaaaaatccggctattccccaaaacagccggcttgtaataagaattataagcgaattaaaactgtttgtaaagtggatttccccgaattgttcaagaatttgtcgaggaaagttcaggaatcccttacaaaaccgttgataattccggaaaatcccatggtatactggttgaagattgattcacagacggatttcgattatacttatggtatatcttccggctgtccggccggacgcgtacaaaggagaatgaatcgatatgatcacctataaactgcatctgatccgtcatggacagaccgaaggcaatcagaagggcctgtttgtgggccggactgatatgccggtctcggaagagggatttgatgagctgtcccggctgcgggatacctatgaatatccccgggtaggagcggtctacacctcaccgctgcgccgctgtatccagacagcggagttcctctatccgaacaatatgctcacggtggtggacgacctgcaggagatggacttcggcgagtttgaaggcaagtcggtggcggaactggaggacaatgaggacttcggacgctggctggcggattccgcccacaatgcgcctcccggaggagaaaccggcctgcagatggcagaacgcctgatgaaggcactcagtgagatctttgcccacatgatgcagaaccgcatcaccagtgcggcagtggtcacccatggcggtgtgatcatgaccctgctcaccgccttcggctatcccaagcgggagctgggcagctggagtgtggaaaacggcaagggctataccatcctgatgtcgccgcagatgtggatgcgggacaacagcttcgagatctatgatactgtgccgtccatgctggaagaaggggacaaccgttgggatacccgcagctgggccatggatctggaggatctggaagacctggaggacgaggaataaaattcccccgccgcgggggaaaagacgcataaaccgcgggttctgctgcccatactttccagagaaacacaaaagggacggcagtatgactggcaaaggagatttctgtgtatgaactatctgaatgagatgatccggcgcaacacccgggatatgctccggcgcaactggggcaaggcggtggcgctcacggtgaccgtgatggcagtgctgctgctggggtccatgctggagagcgccatcggcgggctcaccgggacctatgggctgggaacgctgctcaccatctaccgcagcagtctttccgccctgactccggcccgtctggcagcgtccactgccctgaccctcagtgtggggctggtggaactgctgctgctctgtccgttgctgctgggcatctcggaatggctcaccggcctgagctatggcatctgtgaaaacgatatgggttcggtgttccgccattaccgcagcccccgccggttcttccgggcagtgtggctctatctgaatattgcggtgcgcagctggctctataccaccctgctgctcctgcccggcagcctgatgatcggcgccagtgagctgtttacccggggaaaccccagctccctggaccggattatggcagtcatgggcatggcaatgggtgtctgcctgctgatcctcggcggtatcaccgcctggatcttcacccggcggtattccctggcgccctatctggtgatccgccaggacagccttaccgcacggcaggccatccgggagtccatccaggccacccgcggcttcaagaccagctatgcctggttccagttcagcttcattggctggtggctcttctcgctgttcatgctgccgctgttctacaccattccctatgtgtggggcggcaacgcactctatgcccgtaccctgctggaagcccggcgggtgatcccccgtcccggcgaagcagcccagcccgcctgattctttccgatatgcagaacaccccccgttccgaacgggcagccgggggtgttttttatctgccggggatcagagccccagttcctcaccgatgagaaagacatggatgcgtccggcaggacggcaggcccgggtgagcaggatctggttgcagatgcagtccgggctcaggcagttgtggcagaggccgtccgcggcacagggggtctttccgccgaaccgcagggcattggccggggcggcagtgttccgggcccggctcaccgctgtttcggtggtgggctggatcttgccggcactgcacagcaccagcacctgcttcggcccgaaacagagcgccgccagacggttgccggtgccgtcgatgttcaccagcaccccttccgccgagatggcattggcactcatcagataccagtcggagagcagtccctgccggtgcagttctgcccgttcctccgggttctttgccagatcccggtcgatcaccttccagttcccggcgtgaaccgcctcggtgagccccatatcccggatggtggcagagcctccccaggccaccgtgcagccctcaggcagcagccgcagcgccgcggcctttgcctcctcggcggtggcaaaccactcggcctcaaagccccggcggcgcagctgggtgatggtcgcccgggccagctgttcataatgtttctgcatcagttcctgcataacagggtcgctcctttcagtcctttttctctattgtagcatgggctgtcccggctgcaaagcgttttccccataaaacaggaaaagcagtacagccggacggccatactgctttccataagggagggattttttacttggcgttcagggtatcgctgatggactggtagatggcgtcggaattttcacccatcaccataaccacatagccattgatggtctcgcacttggcgttcttggcaatggcatactgatcctggaggtaggtttcaaagttcttctgctgcagttctacaaagttctggcaggcagagagaacggtctcctccttgccctcagccggcttgatgagagccatgccgtaggcacgcacattgatcagcgaaatggacagggcacccgcttcaatatcttcagcggaaaggcccagggtctcaaagatcatctgggaggaacgggcagtgccttcagcctgctggaaggctgcgatctcctcagcggtgaagcccttctcagtgagagtggcgtcgatgtcctcatagggcagagcattgtactcctccatgaaggtgttggcctcgtcctcgctcatgcccttgttggcggtgagccagtcgatggcggcattcagcgaatcggtggtgatgacctccgccataccatcggaattctccgaaatagccgaggacaggatctgggacagctcttcagtggtatactccttggtctccggagcgttggagcaggctgccagcgaaagggtcagtacggctgccagagcagcggaaagcagttttttcatgagaatgaactccttgttttttgataaatttggtttgtgtacccagccggcagacatttactgaccggctgcattacaatagtgtacccgatgggcgaaattattgcaagggcaggacagagttttttgatcgggctgggcggcagggataaaatatgctacaatgagaacagatttattgaagaaggggtggaaaggagatggaatatcttctctatctgctcaccgggctgacagcggtgctgctggtgctggtgattcttttgctggtgcggcagaaccggaccgtccgggaccaggaggcggaatttgaccgcctggctgaggaactgcgccgccagcagacggtgagcgccggggaactgagccgactcaagatggaactggatgactcggtgggccgcagcaccgagcggatggccaaggtgctcaccgataaccagcggctgatgcaggaagtgacagcggaacagctcagccgtctggaccggcggtttgcgagctttgccatggagaacgaacagaagctggagcaggtgcgccagaccaccgaacagcggcttctggccatgcagcggcagaacgccgaaaagctggatgagatgcggggcgtagtggacgaaaagctgcagcgcaccctggaggagcgcatgacccagtccttccggctggtgaatgagcggctggaacaggtctataaaggtctgggcgagatgcagaccctggcagccggtgtaggcgacctcaagaaggtgctctccaatgtcaagacccggggcattctcggggagatccagctgggctccattctgcgggagatcctggccccggaacagtatgatgagaatgtcgccacccgtccgggcagccgggagcgggtggaattcgcggtgaagctgcccaacctggatggaagttttacctatctgcccatcgacgccaagtttcacggcgatgcctatgcccagctccgggacgcctatgagagcggggacgccgcggcagtggatgcggcagcggcagtgctcaccgcccgggtgcggcagtccgccaaggatatccatgacaagtacatcgacccgccgcacaccaccgaattcggtatcctgttcgtgccctttgagggactctatgccgagctggtgaaccggggcatggtggaggtgctccagcgggactatatgatcaacatcgccggccccagcaccatggcggcactgctcaacagcctgcagatgggcttccgcagtgtggcgatccagcgccggagcagcgaggtctgggaggtactgcgggcagtgcgcaccgagttcgagagcttcgagaaggtgctcaccctcactcagaaccggctggatcaggcttcccgggagctggataagctggtgggcgtgcgcacccggcagatccgccggcggctcaaggatgtggagaccctggacagctccaccgcccgggagatcctggaactggacgagcccgaggaatacaccgccctgccggagccggaagagcccgaccgggcagcggagccgggcaccttcgtcccggacggggaatgaccccagacagaacagaaaaaccggcgcttccatgcaggggcgccggttctttttatgggagtattgtgcggcggggaaatcctctgttctgccggagccggaggaacccgaccggtcagcagacccggacacccctgtcccgtgcgggggaatgaccccatacagaacagaaaaaccggcgctccgatacaaggggcgccggttcttttttatgatggacagtcagcgccgggccagccagaagcaggactgttctgcctgggtcatacccagcttgcgctgcagggagagggatttttcgttgtcggtgaagatctgggcaaaggggatcttgccctggttgaagtgccggtcgatcatgaagctctccagatcataggcatagccgtgccggcggaattccggcagcacttccagaatgccgatgctgccctcggggtgttccccgatgaaacccaccagtttgtccccaaggaagccgccgaacaggtgtccccggcggatatgggcgatcacctgctcctcattgaggtgctcatagtgatcggcaatcacgccagccagctcctccgacggggtgcggatctccagacggcccgcaggttccggcggacggttctccagataggccacatgatagtattcaaaatccagccggagtcccagcagttcctccgccttgcggcagaggtcggcccgggtgacgctcagctcccggacatcgtcccgttccaggagcaggttcagcagagcctctccgggggcatagtcccgggcatagagcatatagacgccggagtttttctcccggagcaggacagcgccccgctctgccgagagaatctccgcattgccccggcggactgcctcgctcatggcaatattgagcatcctttcttcattgagatatttgagtgcttgggtatgcatgacaaaacttcccttcctgacgctgacaggccggctgctgcaccggcagagatcaatggttccaaaaatgcgtatgggttactgtttctttcccagtctgcgggcggcaaggagcagctggaactgggcttccagagcggaccgggtccggttcgactcccggacactgctgccctgggagcggtagtggcgggtgagggtgtattccccgtcgggggtggagacgccgaagcagacggtgcccaccggcttttccggagtgccgccgcccggtccggcaatgccggtgaccgatacggcaaggtcagctcccatgagtttccggacgccccgtgccatttcagcggcacaggcttcggatacagcgccgtgctcccggagggtctcctccgaaacgcccagcagaccggccttgacggcgttggcatagctgcacacaccgccgtcaaacacctccgatgccccggcaaccgaggtgatggcagcggtgaccataccgccggtgcagctttccgcggcggtggcatggagcccgttttcccgcagggtgcgcaccagcacctccgaaaggctctcgccgttcagactgtatgcgtggtcgccgaattcagcggcaatctcccgggcgggggcttcggtgagggcataggctgcctcctcggtgtcggcccaggcacgcagacggatctccacttcgccatccttgacatagggggcgatgacagggttccgggaagcggtcatgcggtcatgcagacggctctcggctgccgcttcggggataccgaagaggcgtaccgaccgggtcacccgcttctgaccggtgcgctcacgcagccggggcagtaccgattcccggaagatgggcaggcattcccggggcgggccggggagctgtaccaggatcttgctgtccttctccagccagatgcccggtgcggtgccgttgaggttcaccagggcttcgccgccctcgggaatcatggcctgccgccagttgttgtcggtgagttcccggcctgtggcagtgaaatactcccggatgcgccgctctgtttccgggtcccggaccagcgggacccccatctgctctgccgcggattcccgggtgatgtcgtcataggtggggcccaggccgccgatggtcaggattacatcgctgcggtcaaaggcctctgccagcgtctggcggatctcagcgggattgtcgctggtcacaatctgccggcgcacccgcacaccggcatcttccagcccggctgcgatttcccgggcattggtattcacaatatcaccggtgagcacctcatcgcccaccgctataatctcacagttcaaattcattccctcctgtcgggacgccggaaaaaaccatccgtctgttccggtatcgttctgctgaatatcagtatatacgcatctgtcggatttttcaaatttttatggggataaatacaagaaaacccatgcataaactgggaaatgtggtataatagccgtaagacggctattataccactcttatgaccggacgactcgtcccaatgaccaattatatcatttcgctgcgctccacgatataatcccagccgtaagacagctattataccactcctatggctggatgattataccattttccatataaaacagtggaatagcctgactgcagcggactgcttttgcagtttcgtatgggacgctcctgcgttcccggagcctctggaccagactgccgggtgcggcctggaaaagggggcattctgtctttcccggcctggcgaacgggcatgggaacgagcttaacccagccggacagcgggacagtccccgtctggcccgggctggatcagagaactgttttctccggcaagtgggagttttttagaacggataaaccaaaggaacggttgacgcacatgtccatggaactgaagaacagaatcaaattgggaatgggtctgctgcttgtgattgcggtgggccttgcggtctatttcggcttttttgccgccaaggctccggcagagatcccggatctggcagaacgtaccggcactgtgacggtcacccatggcaatgccctgctggatgcccggatggacgaggcggattctgccaagctgatcgaactgctggcccatgcccggttctcccccaatgaggaggcccagatccaggattacagcggcggcatccgcattctgtttgcggacggcggggagatcaccctgctgcggggcgaggaaaaggtctttgcccgggcggtgaatgccgccggggagaccggctattacaccgtcagcaccgatgtatatgaacaggtgcggctgcatatctacactgtgttccctgacggcgtgacctttgaggaactccagccctggtgggacgaatacttctatattgccagcctgaccctgatggattccgatttcaactcggcccaggagatcccgccggaatcagtggcaaagtataccctgtaccagatgatcgcggatggttccgctgaaggctatctgaccaccgggcagaagggaagctggtaccagatcccctattcggaattcctgggacgggcgcagtattactttgcggacggcgccaatgtttcgctcaaggagacccggtactaccgggaagaggataagtccatgctgttttccacagcgcagctcccggagctgaccggtgagcggcctgcctttgatgatccggcggagaatggcggatactgtctggtatcggtgcgccgggacctgatgggcgtgctcactgccgaggtctatgactataacgaagtcggctttaccgagggaggtgtccacacccgtacccattactttaccatggtctgcggctcggacggacgctaccggtttgtgagcaagcgcagccagatcatcgacccggcccaggtgtcggtggagggctacttcctgagcatcggacagatcggtgagatcactccggagatcgaagcggaatttgccctgacccaggcgggaatcctggatgggaatattctgctctatcatatccagcacaccgcatcggggtatcagatgtacctgtatggggtcaatccccggaccggcggtgtgatccgttcggctgagattccggaacagccggaatcctccgcactgctccgggcagaggtcacagcggatggcacgggcgtcctggtctttgccgaagaccgggtgatcctgctggacagccggctcagccaggtggaggaactggtgcttcccgaggaggcccagggcctggaatatgactgctccgatgatggggaacagctctgctatgtggacgacacgggactgtggctgctccggactgaggatacagagcccattctgctggcagcgcatcccacccagccggagggcgagccggagatccgtctggcgcgtccgcggtttatccagcagagccagctcgatctgacagcggaagtccaggacggcagcaccctgtactatacccggtatgacctggatgagctggaagaaaagctggaggagcaggaagccgaccgcaggaagaaccagaagaaggacgatgaggacgaagaggttctcaccggtctgctggaaggccggcgggtatccatctatcccgggacagtgatcaccgaggtcagcaccgatgactatctggtagtactgtatcccaaccgggacaccgaagaactcaccgggtatattgccggtacagtgcattactttgaaagtgatgccaccttctcctttatcctgccggataacgcagaggccggtctccggctgattctcaatgaccgggtttactacttcgagcaggtctcccagcccggagaggagaatgtggtctttgagctgaaggtgctggaactgggcagtgccatgaaccggatttccaccgggctcaaggtgagcaatgccgagccccgaatcctgggcgctgatgccgagggacgggtgctgttcagctttgtatcgccctcgggttcgggtatgggaattaccgatccggtccgtcagaagggaaccgaatccaactgacccctgtaatatggaatttgagtcggacagatgccgctgaaaggcgtctgtccgatttgtattttcaaaagataaaatttctccttgactattgggaaaggatatggtagaatagcttacagttcaaccgatatggagagatgtccgagcggtttaaggagccggtcttgaaaaccggtgactcgaaagagccgtgggttcgaatcccactctctccgccaacatcgttccgaacaagttcataattttattggttaacttcactatggagatgtactcaagttggtgaagaggcgcccctgctaagggcgtaggtcgggaaactggcgcgagggttcgagtccctccatctccgccaaataaaagagcacccaaagggttaagccccataggttcacgttgtgtacctatggggcttaacgccgtgtatggggaagattagggcttgtggaacaccacaagccctaatttcttattgagcagataactactggctctcgcaaaagtggtaagttttctacccacggacagcggtgtatggtctgcaaaaccaatgataaggaatttattgaaatacaaatattccagtggcttttcacgctaacttgtggtatgttgtcttgctgcaaggaggcagagcatatgaacaacgccctgaaaaaattctactacagattttacacgccactgcctatggcagagtctgagcaggaaattgaaacttgccaccaacaactcattgagagattggaaaagccagagagaaagctggtgttgcggatcatggacgcacagaacctcattgcagaggaacgctctatgcacagtttcctttgcggattccaattggcatgggaattggcatacgagttgaatcactttgagacagacaggcatccctttccggcagaagcggagagggatgcctgattcgtataaaacaactgtgcagaactttaagatatagacatacagtgattgggcgtttagtcggccatgccgatttgcccaatggcatagcgcagggctttcacgctgatgggtgactggggcaggattttcccgtccggcaccagcagcttgttggtaatggaaaatgcaacggcatcccgagcccagggggagatctgactggcatccttgtacgaatccagaacacccgcatctgtcaccttggggcttccgaacagtcgatagatcatcaccatggcctgttctacgctcatcatatcctccggcccaaagaaaccattaccgtagccgcccagataaccgttttgctctgcccaggcaactgcctcagcgtaaggagcatcccaggccacatccgtaaaggtggggggttccacggcttcgtcccaccgatgggcatgatcgaacagcatcttgactgcgtcgccccgggtgatggagaccgtggctgtatcggcccaactgacggaaatatcatccagatagtaggaggtcatcccttcaaagccggagtcggtgagggtccgccgcaggctttgcataacccttaccttgatgctgcttgtcaatcagcaggcggtcaaaccaaagtcttgtataggcgggctcctgaatcattccgtacatggtaaaaccgatcagggtgtcgttgtcatagatgcacatgggatgccacgctgccagctgatccgcctctttcatacagtccgcaacactttcgataaaacctgtctggtgtggaaacaccttcaacttctcaatagccctgcgatttttgctggtaacaggtattagagacagattactcatgctcacctctatgttcctgtttttctgtgttctgcggctctgccaagcaaaccaacgcagttaccacttgatgatttcggatctcggtgacccggatcaccagaccgaaagtctccacctcaatggtggatccatcctccggaatggtggccatggccccaaagatcagtccgttaaaggtatcgaagtcgtcacagggcagcgtgacaccaagtgtttgggcaacctcctccagaggcgcttctccacggatcttccaggtgccagagtccacagcctcgatcaggggaagggcgttttggcatacatcctcctcgcctagatctcccaccagctgctccacaagatcgttgatggtaacaatgcccgtcatgccgccgtattcgtccagcaccaccgccaaaggatggcagccgcccttcatgttacggaacagcacatccgccttgacgctgtccggtaccaaatagggagtctccaccgcctgttccagtacggtctcacggctccggtccgtcaggcggaagtaatcttttgcattgaggatacccaccacatcgtccgcggattctccgcacacaggataccgggtgtggcggctgttgtggatggtggcggcccactcctccatgctctcctccagccacagaatggtcaggtcggttcggtgggtggcaatctccccggcggtcaagtcgtcaaactcaaagacgttttggatgaattgcttttcttcgtggtcaatggtacctttctggttgcccacgtctaccatcatgcggatctcctcctcactgacggtctcctcctcggcgttggggtcaataccaagcagacgaaggacagcattggtggaagcggtcaggaaccacacaataggtgcaaacagcttggcgatggcggagatcaggccggagatacccagagccagggactctgccttacgcatggccacccgcttgggaaccaactcaccaaagatcagggtaaagtaggacaaaaccagcgtgatgatgaccacggcgatggcgtccagggtagcaacgggtacgcccacacccaggcttaccagccaatagaccaggccgtctgaaaagttctccgccgcaaaggcactgcccagaaagccggacagggtgatggccacctggattgtggcgagaaagcgggccggttggctggtcagacgagccagtcgtacggctcgtttatctccctccgccgccatttgggccagcttggcatcgttgatagaaattaccgcaatctccgcactggcaaagactgcgttgagcaggatcagaaatacctgcagcaaaatcatgaataaaatagaattttccaatgtaaatacctccacagattaaaacaattataggcaaaaggacgcaaaaagacatagcccgtcgtactattctcgcaagtacaggccatgtctcatccgattctgttcataattgtacgagggaggcttggtggaagcgttactgtcaccgtcatccataagttgcagaccttctcctttcattgtaatgttccatattttatcagacaatctcccgttcgtcaacttgtgaagtgactattatacatacagattctgttcagatcatgtccctgtcccaagtcatgtggtagtaaatatttcttttttgacccgtcatgcataaccggacgaaaggacgaagatagctggaattatggcttcaggttatggctttacttagtaaacagtacaaatacaacccgtatcccggtgactgcccactttctcctaatatccatctcttccagtttgttcatgagaagagtgtaaaaaatacaaagaagagaacagccggaaatcctcagggatttccggcttagttcatgtattccttttaaacctcacatccgtcttgtatttggaaagagccagcagttctgcacccggacccatgccaagccccaaaatggtttcagcgcctcttattcatccagctgtgcacaggcaatttcatactcctgctggcagggaagcaccttcttttccttttccgggaatgaagcatcgaaggcgaggatatccgcttcctccgccgccagcgcctcggaaaattcagcgtaaccatggattccctccagagcggttttccgaaggggcagcaccagaagaccggtatagaactttccgtccggcatggagatgccgtattttttcccgcctcggaatccataggg

SEQ ID NO: 1982 - DNA, 1582 bp, Unknown
  16S sequences of unknown bacteria
atgacgagtacggaaataccccgggccagcgcgtagccgacggtctggcccgtcagcagccagacgaccgtcgtcaccgctgcgatggcgatgaccaccgggacgaacacaccggagaccttgtctgcgaccttcgcgatcggcgccttcgttgccgccgcatcactgaccatctgaacgatctgcgccagcgtcgtgtcctcgccgacgcggctggcgcggcagcgcaggaagccggagcgattggccgttgcggcgctgaccagatcgccggggcccttgtccaccgggatgctctcgccagtgagagccgactcgtccacggcgctgccgccctccaggacgacgccgtccaccgggatgtgctcgccggggcggacgacaaattcatcgcccagccggacctgggcgatggggacctcctgttctgctccgctccgcacgactgtcgccgtctttggcgccagctgcatcaggctctgcagtgcgtccgtcgtcttgcccttggagcgggcctccagcattttccccacggtgataagggtcaggatcatggcggcggattcaaaatagagctcgtgcattccgtgcatgacggcgtccgcatcgccccggagctgcgcgtcggtcatggcgaagagcaccgccgtgctgtagccaaaggccgccgttgcgcccagggctaccagcgtgtccatattcggtgagccccggaagagactctggaagccgcttacgaaaaagcgctggttgatgaccatcaccgctgccgtcagcagcagctcgatcagccccatggcgatatgattttccgccaaaaagctgggcagcggccagccccacatggtgtggcccatggagaggtacattaaaagactcagaaaaatcaacgatgccagcagccgccgcttcaaagcgggcgtctgccgatccgccagtgcgtcaggcgccggggccgccgattgggcgcccgcgcccttttgcaccgcgccatagcccgccgcctggacagcggcgaggatggccgcactgtctgccgtcccctcgacgcccatggagtttgtcagcaggctgacgctgcactctgtgacacctgggaccttccgcacagctttttccacccgggcgctgcaggcggcgcagctcatcccggtcacttcatattgttgcatcttctaggtttgcccccctttgcgcaatccgccgcggcggattatttcattagcttctgcagtgtcgccaccagctcgtcgatgaccttgtcatctcccacgcggatatcatgggcgacgcaggtacggatatggttggccagaagatcccggttaaaggcgttgatggcggcattgaccgcggcggactgcaccagaatatccgtgcagtaggcgtccttttccaccatgccgcggatgccgcgaatctggccctcaatgcggctgagccggttgcacaggcgcttccgctctgcttcggcccgctcctttgtcttatggcagcagctgccgggcgtgggcccgatttccggtctgtccatacgatcacctccggtcaagatacccccaggggggtattttgagtatat

SEQ ID NO: 1983 - DNA, 32759 bp, Unknown
  16S sequences of unknown bacteria
atggtaatccttataaataaaaatgtcaacataattttttaaaatatatggtagtaacacagaaacggggtaggagccaaccgagattcggaaattttcttgtgaaactcttgacaaaaggagaaaaagatgtattattgtattaagcgcttaatacaatagagagggggcggctgtttgcaagagacggtttacgacacaaacgtgccgatttatctccagctcattgaaaaaatccagcggatgatcgtcacgggagaatggcgggcgggagaacggatcccggccgtgcgggagatggcgctggcattcggggtaaacccgaacacgatgcagcgggcactcgctgagctggagcgggacggcctgctctacagcgaacggacgtccggccggttcgtcaccgaggaccaggcccatatcctgcggctgcgcgacagcctggcgggggccgtcctgcgggagtttttgtcccgtatggaaggcctgggctgcaaccgggaagagatcctgcccctgttgcggcgggaactggaaggaaccggcggccacagcggaaccaacgagagaaaagagggagaatcatgagcaagcttgtagaattgcggggggtcggcaaacgctatgacgcccggccggttttgcaggattttcatttgacggttgacagtgggaggatcgtcggtgtcgtggggccgaacggctgcgggaaaaccacgctgttcaaaatcctcaccggactgatcaccgattacgcgggcgaggtccgcatcgatgggcaggccccgggggtgtacacgaaatcgatcgtatcctatctgccggagaaaacctatcttagcgactggatgagggcccgggatgccctcgccatgttcgcggatttctatcgggactttgaccggaagaaagcggaagagctgctgcggcagttccgtctcgaacccgccatgcgtctgaaaaccatgtccaaagggatgcaggaaaagctgcagctgatcctggtgatgtcccgggccgcgaagctgtacatcctggacgaaccgctcagcggaatcgatccggccgcccgggattcgattctggatatcatcctcaaaaactatacggaggattcgaccgtgctgctgtccacccatctgatctacgacgtcgagcggatattcgatgacgtggtcatgatggattacggccgtctgatcgcggcggacagtgccgacgccctgcgggaaaaggcggggaaatcgctcgacgcgtatttccgggaggtgttcaaatgttagggaaactgctcaaatatgaagtcaaagcggcagggaaagtgatgcccgcgctgtatctcggcattggcttgtcctatcttctcggcaaactgacggaggcgctccatatccatcagatgaaaattggactggccatcgcctgcatcggcatcggcatcgcatcgatggtgctggcgctgatcctgaccgtcatgcggtatgcgaaggggcttttcggggccgaagggtatctgacgcagactctgcccgttggaaaaggaacgctgctcgcgtccaaggtgatcaccggctatctgctgatcctgctcggcgtggtcggattcctgttagggctgtttggtatgttcgacctgctgcaaatcgaggggatcctggaaatactgaaggccgggttggggaacgcggccttgtctttgctcctccttttcctggtgtttgcctctgtccagctgttttcttccctttcggcggtgtatttttccatcacgctgtccaatacccgtccgtttttgagcaacaatttcctgttcgccgtcgttttttacctggcgggcagcacggtgatcggcctgctcgaaatcgtgtttatgttgctgctgcccattggcgttcgtgtgggggaaagcggaggactgcatttggtcttcgatagcatgctgctggatctgctgaaacatccggagctgatcgggtcgaatcaggatcccgcggttttaacccagatgagcctgggggtagggtcggtcattgtcgacctggcggccggaatggtgctgctgttcgtcacgcgctggctcctgacccggaaaatctcggtcaagtagtcgataatcaacagaccggcccaagccatcggctttgaagtggtatagtgatataaagataggagacacggtttttcgtgtctcctatctttatatatttccatatggctatcccattcctacggtttttataagatattatcgaagctggggagttcgagctctccgagcttatcgagctggttgcggcagcgagcgagttcggctggaaaatgctcgtggtctccggcttccaagaggatagggagggtgatgacgttttcctcgattttggagacgtcggaatgccgcatgaaaaaagtgaaatgtttggtgcgtttggtaaattcctcggtgaactcttcggtaagcgttaacgcccggtcgaattcttccgcatcgaaagcctcctcgatgcggtcggtcatatcgatgagaaggtcggtcgtacgcttttcggtcatgattgagagaacacagcccgccgccacggcggccagcaatgcaaaagccaataacacgcgtttcatgaggccgctccttttttctccttgagctgctggttccggagtacgaaatattgccggcttttatccgccgtcatcaagaaaacgtcatccaggggacaatcgtcctttttcagggtggaacgcacccagtcttcatccaggccgctcattttcaggccccagtccaccagtttgccatcgctgacgaccacgatggggacgccggtgtccttggaagcggccttgacgtctcccgcggtgacgggacgggaggccggcttcatgaacaggctgatttttccattggtttcggcgatcgcgtattcgatctcccggatatcgaaggcgttttgctgccgcagggtctccatcagatcctccacggtcagccgcaggcgtttgagggctttttgatccagtttgccgtcccggatgatgacgatggggttgccactgatcagcttggagaatccggaggacttgagcatcagtcccgagagcagcagctccagcgcgacgagcaccacaatggggatcaggccgttgagcagcggcatgccgctttcctgcatggggaccgccgccagatcggaaatgagcagcgtcaccaccagctcgaccggctgcagctccccgagctgccgtttgcccatgatccgcatggccgcgataatgaatatgtagattatcacggtgcggatagccgagatcgccatgatatgacccttcctttcacttgacgctggaagccgcgcgcctgagcgcggctccttcgtctgtgttttgcccgcttctaaataagcgctgaatacatcacgcctgacggctcagtggcggcttggtaggagaaatttcccacatctgcgtcaaaaatcctcggaatacggcacgcttttcaaagatttttaacgcagacggagataaatgttgccgaaaagatgccgtgaccgattcggtcattgcttacctagtatggacggagaagcgccggttatgcacgcggaaaaacggatattccgcgtccggcgggataaactggaaagagtgttctctgtatcccttttagagagaaaggcaaggtcaaaaacatgaaaaataaggaagaaaaaccggaaatgccgcccgtttccctgacggataacctgctggataatctggtggagctgcgtgctctctttgggggaagcgcggatctgaccatccggaggatgaccgtctgctcacgggagatcgccctggtcacggtcgaggggatggtggaccgccatttgatggcggatgccgtcatcctgcccatggcccggatgacgggggagagtgcgtcggctgagacgctgatttcccggatccgggacgaggtgctcggctttgtggatatgcagcaggtgaccaccttcggagagctggccaatctgattacctccggcttcgccgccgtattggtggagggggtgccctacgctgttttgggcgggctgcaggggtttatgatccgcggtatcagcgaaccctctaccgaagtgacggtccggggctcccgcgaggggttcaccgaggcgatccgggtgaatatttcgatggtgcgccgccggctcaagtccccggcgcttgcctttgagatgcttaccgccggcaaaaccacccagacggccgtctgcctgtgctatatgcaggaccgggtatcccggcgcctgctcgacgatatccgcgcgcgcatccaagactgtccgctcgaggctgttctcgaatcgggatatatccagcctttcctggaaaacaagcggcgctcccttttcaccagcgttgaggcgaccgaacggcccgataccctgtgcggcaaggtgattgagggccggatcggcgtgctggtggacggcaccccctttgtcctggtggttcccaccctgtttgtggaacattttcagtcgatggacgattacacccagcatccggtatatgcgagcttcatccgcatcatcaaatacgtctcctttttcatcagcctgttcctgcccgggctgtatgtggcgatcggcacccatcatcccgagatgttcccgccggtgctgctgatgaccttcctcaactcggagcacgccaccccgttccccctgaccgtggaggcgcttctcatccatttcctgtttgaaatcatgcgggaggcggggctgcgctttcccaaggcggtggggcacgcggtcagcatcgtgggggcactcgtcatcggcgaaagcgcggtgcgggccggtatcattggcgcgccgatggtcatcatcgtggccttgacggccatgagctcctttgtcctgccctccctgtacggcgccatcgcgatcctgcgctttgtctttatcgtgctgggcggggccctcggcctgtatggggtgatgctcggcgcggtgctgcttttgtgcagcatctgcgcgctgaacgtgcagagcatcccgttcatggcgccgatttcccccttcagctttggggcgatgcgggacgtgttcatccgcgccgattggcggaagctctcgaaaaagcgctttctgatccaaaatgtccggggatccaaaatcaaagatggagacgaggaggaagagacgtgaccaaggtttcacagatcagcccgggacagctgaccgccctgctgctgacgggacggatcgcgatctccatgtcctttgctcccacgatgcatcaagtgtccaacgggacggacttctttctgtcggctctgctgcatggaggatttattctgctctgtatcctgccggtgctgtggttcgggagacggtcgggcggggccggcaccctcgactatgcctatgtcctgtggggaaaaggcgggggaaccgccgtagcctcgggctacgccctgctctgtctgctcattcaaacaatggatctgctccgcttcaatcagttcgtgtccacgacgctgacgccgggactctcccgcgtcgtgctctgcgcggcgctcgtcgcggtggcgttcggggcggctttctatgggatccaggcggtcggccgcgcggcctcgatcgtctttttcgccgtggtcgtcgccgttgtcggcatcgccctggcactgctccccgaaatggaatggatccattttcccccgtttttgtatgacgggatgagtccggttctttcaggagcgctcgaggaattgccccgtacgctcgaaatcgcgcttttggggctggcgctcccttatgtggccggcaaaaacgggacggccaaggccggtgcgctgtttgcggcgggggtggtgatcctctcctccctgatccaggcgacctcggtgggggtgctgggcgatttcagcggaatggtcctgttcccgtattacaccgccgtcacggcggcgcaggtgagcatcctccagcgtctggatatcgtcgccgcggcggtctggctggcggcgctgctgataaagaccgcattcatcggcgtcctatacctccactgcgttggcaggatgctgggggataaggctcgtctgcccgcggcggtggccggcggcgcggcggttacagtggccggcttgtttctgggcgggtttatcctgcagcaggaacgctggttcatctggatcgtgtcggctgtgttgctggggattttcgccgtgctgctgccgctcatcctgaccgcggcgggccggcggcggcgtatccgtatcgagcgggcgcggacagaggaggcgtcggtatgagaaaagggagccgggtcggatccatcggcctgctgttcgtcctcatcatcgccgtggcgctgctgccgagctgccgggaaaagacccagatcaacaaccgggtggtggtcacggccatcgggatcgacgataaggaaggggaatgcggcgtttccattcaggcgatcgaggtgctgaaaacctccggcagcctgaccgaacaggaaaaaaacgccacgtccgtgtatacggttgagggacagtcggtagccggggctctgaaggcctttgtggcggattcggggcggagcacctacatcctgcacaacaaagtgatcgcgctcggcctgacgcagatcgagaaggccccgcttgagacccttttggattactttatccgcaaccacgaggggcgtccgctcgtggatatggtggtctgccgcggagaggcggccaagctgctggaggttccgtcggagagcgccgccatcccggccgaacacatcgcacgccttctggaggaaggatacgagtggggctacgcggtgaggacgcggctgctggatgtggaacgggccctcagcggtatgtacgatgccgcgatgccgatcgtccgggtggaaggggaggaagaggagatgagcgtccatctcgacggcacggcgctgttccgttccggcgctttcgcgggggaactcgacgaaagcgaaacccgcggactgctctatgcccgcggggatttcaggcagggggtgtatgtgctgcccgccgccggacggccggaaggggagaagatcaccttgtccgtccggaacgcctccaccaaggtggagatacagccgcagggggatgccgcgggataccgttttcggatttcctgcgaggccgagattctggaggaatttttaccgggcaacctgtcggcagaggagatccgcgaggccgaaaggcaactggccgatgtgatccgcggagaaacggaaagggcgatcgccgtttcgaccggctacggctgtgatgcggctgggctggggcggctgacgcagaagcgctgtccggagctcatccggggacgggaagaggattgggccgaacagctgaaggattgcgaattcgaggtggaggcggaggtgcggatcaccaaaatcggagcggaatcgggggaggcgccccggccggtcgtgtaaagaaagatcctgccccgtgtatgtcggcgtggagacgggaagggtccgcgcgcttggcggccggatcgggttaatggcgcattgtatgcgcggacacgccgcaacgggagtctgggctgcccccctctcttgccggcaagaaaggagggcgatgagtcggggggccggaactcccgggggatcctgtcgattttctctcaataaaaatcggctcgaacgacagtgtccccatccccataatgaagggatgcggccatgaggctttgagggcctgtaatttcataaattgggatttacgttaatttcatggtcttcggagtcggaaaaaggcgccgaagcggcgctttgctgaaagcccttgacaaatccgtttgtccgtcctatactttatttacattgtgatattgccaaggacactgacgggaaaaacctgccaaaaccggcgttttcagagaggacggctacgcggcaactgccgtgggctggaaggccgtccatccgtgcggtgcagggggccgtccccgagtcacgccgtgaggagcggcgcgtcccccgcgttaaggggttcaagcggcatcgcgtcggcgatgcaagttgggtggtaccacggaagcctccgtcccatatcaggacgggggatttttttatggaaaggacgacaggaaaatgaaatggaccggactcaacgacctgcgggagacgtttctcgcattttatgagagcaaggggcatctgcgcctgcccagcttttcgctggtgccgcagaacgacaaatccctgctgctgatcaattccggtatggcgccgatgaaaaagtttttcaccggcgaggtcacgcctccccgcaagcgggtgaccacctgccagaagtgcatccgcacccccgacatcgaacgggtgggaaaaaccgcccgccacggcacctacttcgagatgctgggcaatttcagcttcggcgattatttcaagcacgaggcgacggcctgggcatgggaattctgcacgcaggtgctggaactgccggtggaccgcctctgggtctcgatttatgaggacgacgatcaggcgttcgacatctggacgaaggaggtgggcgtggatcccgcccggatcgtccgcctgggcaaggaggacaatttctgggagcacgggtccggcccctgcggcccctgctcggaaatctattttgaccggggcgaggcctacggctgcgggtccccgacctgcggcgtaggctgcgactgcgaccgctatgtcgagttctggaatctggtgttcacccagttcgacaacgacggcaaagggaattacacccccctggagcatcccaacatcgacaccggcatgggtctggaacgcctggcctgcatcatgcagggggtgaacaacctctttgaggtggatacggtccagaacatcatgaagcacgtcagccggatcaccggcgtggcgtatggcgaatccgaacgcagcgatgtatccctgcgggtcattaccgaccatatccgctcgaccactttcatgatcggggacggggtgatgccctccaacgagggacggggctatgtgctccgccgcctgctccgccgcgccgcccggcatgggcgtctgctcggggtccacgggcctttcctctatcaggtgtgcgagacagttgtcgcggagaaccagggcgcctatccagagctcggggagaagcaggatttcatcgtcaaggtgatccgcaacgaggaggaggccttcgaaaaaaccatcgacagcggcctcagcttgctcgaggacatgctggcggggatgccggacaagatcctgtccggcgccgacgcgttccggctgtacgatacctacggcttcccggtcgacctgacccgggatatcctggaggaaaagggcttacaggtggacgaagagcagttcaaccggctgatggccgagcagcgccagcgggccagggcggcgcggaaaaaggccggggaggatgcctggaaggcgggcgtgggggtcctcgaacagctcatggccggtggcttcgtaggatatgacatgctctctaccaccgcccgcatcgccgccatcgtccgggacaatgagccggcagaaacggtgaacgaaggggatgaggccgtgctggtgctggacgtcacctcgttctatggggaaagcggcggccaggcgggagataccggcgtgattacggcaggcgacgccctcttccgggtcaaagacacgcaaaaatccgccggtggcgtgatcctgcatatcggcgttatggagaagggttccctcaacgcgggcaatccggtgaccgtgcaggtggatgaggccgcccgtctgtccaccatgcggaaccactccgccgctcatctgctgcaggcggcgctgcgtcaggtgctcggcacccacgtgcaacaggccgggcagctggtgaatccccagcggatgcggttcgatttcactcatttctcggcgttgacacaggaggagctcgcggcggtcgaggatcaggtcaacgcctggatcctggcggcgctgccggtcacggtccaggaaatgccgatcgaggaagcccggagccagggggcgatggccctgtttggggagaagtatggggatctggtccgggtggtccggatggggaccgtctccatggagctgtgcggcgggacccatgtggacaatacgggtaagctggggctgttccatattctcagcgaatcttccgttgcgtctgggatccgccggatcgaggcggtgacgggcacgggcgtattggaccggatccgggagacacaggagctcctcggacggacagccgcggcggtcaaggcgaacgggccggaggatctggaacggcgcgcggttcagctcatgggtgagatcaaggagctcagacgggaacgggattccctcaaatccaaaatggccggccagcagatcgaggggctgttcagcaaggcgcgtcaggtccggggcatcaaggtgatatccgccgcctttaccggcacgggggcggatgccgtccgctcgatgtgcgaccaatgccggagcatggtgcagggcggtgcggtgatcgtgctcgccggtatggatgaggacgcggggtccgtctccatcggctgcacctgcacccccgaggcggtggcgcagggggcacatgccggacagatcgtccgggatgtggcggcagtgtgcggcggccgcggaggcggccggccggatatggccatggccggggccaaggacctgtccagggtggacgacgcgatcaacagtgtggacgagattttggaaaaacagctgtcaaagtgaggaggggcctgtatggactgtattttctgcaaaattatagccggggaaatccccagccgaacggtatatgaggacgatcaggtgctggcgtttcacgatatcgagcccaaagcgccggtgcatgtcctggtgatcccgaagacccatatcccgggcgccggcgccgtaacacagcagaacagcggcctggtggcgcatgtttttgaagtgctgcctcaaattgcccgggaactgggcgtggaaagcttccgcgtcgtgaccaacaacggcgccgaagcggggcagacggtgccccatctgcatttccacctgctcggcggcggcaaattgggggatatggcctgacaaatgacggaaatcgtattggatttggaatggaacggctcctattccaaaaaagcacacggctatttcaatgaaatcatcgaaatcggcgcagtccgcgtggaagacggagcgcggatagcggatacctttcacgcggttatccgtccggtttacagcaaaaaactgacggaattcgtcaccaacctgaccagcatcaccgaaagcgacctggaggacgggaccaccttccccaaagcggtggaccgcctgtgccgctggattggggagggcgacgcggtgctgctgacctggagtaccaccgacctgctggtcctgattgaaaactgcgagcggtttttcggcaaccggaccattccctttatgtccgcctatgccgatctgcaggcctatgcccagaggcggatgggggacgatctgtcccgccagctcgctctcggcaaggcctgtgagaggctgtcgatcccggaagagggggctgacctgcatcgggccctcgacgacagtatcctgtctgcgcggattttcgtgaaattgtacgacgcttcattcgctggcgagatcctgcccgccgatgaagcgttctacgaccgtatcaccttcaaaaccttttacatcagcgatatcgacagtcccctgatcccccgcagcgaactccagttccgctgtgagcactgtgaccggaatctccggagagcgggggagtggaagttccgcaaccgcgcgttttacgccgatttccgctgcggggaatgcgaccgccggtatgtcggccggatccagtgcaaacggaaatacgagggggtcgtaatcaagaaaaaactggcagaaaaggtcaaagaagggaccgcggcgggtcaagctccggaggagggtcatgaaaagagccaggaatgaaacagtggaaaaggtgaaaaccgcatgcagctctgtttgcgcccgcctgtggaacacgcgcgcgggaaaccgtgttttggtaagcggtatggcggggctggcggccctgctggcattgctgcaccggatgggcgtccccctgacgggatggctgccgccctgccccttccatcggctgacgggcctcaactgtcccggctgcggaaccacccggatgctggaagcccttttatccggagacgtggccgaggcgttttccctgaatccctttttctttttgctcacggttttggccgtgggggggctgttgtggtttttcctccggacgtttttaaaaggatggcatcccgtccgcctccatggggaaacgccgttttgggtggctctcctgatcctgtttctgctgttcggcgtggtgcgcaacacgccgtggtatcacatgtatttttattgatgtaatgttgaaagactttacaaaaaggggatgacacgaccattgaccgagatggagatagcagagcgcctgcacgggatccgttgctttttgctggacatggatggtacgatttatcttggcgacaagttgtttacctttacgaaatcgtttctggacactgttcaaaagaccgggcgggcctatcggtttttcaccaacaattcctccaaaaaccgacaggcgtatctggaaaagctctcccgcatggggatcgtcattccgccggagtggatgtatatttccaatcaggtggcggtccgggtactgggagaacggtatccggggggccggatgatggtgctgggaaccgactgcctcatccaggattttaaagaggctggatttcaggtcaataccgggcggagccccgacgccgttgtgctgggattcgataccaccatcacctatgaggcgatttgggccgcatgcgacgctgtccgggccggcgccgcgttttacggtgtcaacccggattggaactgtcctgtggaaaacggcggctggatgccggactgcggttccctggccaaggtgatcgaggcgtccaccggggcggttccggaatttttcgggaagccggcccgccacacccttgatttcattctggagcagacgggtttccggccggaagagctggcggtgatcggtgaccgtctgtatacggatatcgcgctggcgcatgggacgccagtcacgtccatccttgtgttaacaggcgaggcgtcacggaaggacgcggaaactgccccgacccctccagatctgatcgtcgaatctctggcggaactgcgggacgcgcttctcctggaaagcagaaccggagggatggatatcgagagaaacggcccttctgtgtaagcaggaaggccgtttttgtttggtggaggttgacagttcggcgatgatccgatacaataaaaacagaaggattagggaggttgtgtgatgatttaacggatgtgacaagaatgaaatgaaaccttgagcggaccaaagcccaaggcttgttcagttttgtcataaccggaatcacacagccgccattacagcaaacctatttggaagaaattccaattgggttattgttgttaggaggtttttctgtttttccggctgtgactgctgtcacagccttttttgtgtttcgctgagaaaggggtggaagcattgctttacgtcttgcttacccttgcatattgcagatgaccaacaccatcgacacagggaggaactcctcatgtctgcaatatgcataaaagagatatattttatgtgcgaatacgcgttgccgctcaaccggcatagggacatccggattcctcccagaagaggaggaatccatggatggctccatggcttatgttacctttcttatgcggggcgacggatatttacccggcgccctcaccctggcttacgctttgcgctgccaggaaacaccgtatcccctggtctgcctggtgaccggagatgtttcacaggaggcccggcggctgttgagcgttttatatcaccatgttctggaaatcggtgaaatacgctgccgcagccatgtgactggcggacgtacggatcgggatagccttctgacccggtttcaagccttgcgtctaggtatggacggagatatgccgcttcattataaaaaaatccttctgttggacgcggatgtgctgcccattacccggtatgattccttatttgacctatgtaccccggccggaattctgctggaggataaaaggttcgccatggaatgggacggctcgggtgctttcaagcgggacagtgaaggggaggaaggatggtgctggcgccggcattaccgggatgtcccccacggcgccctgatccccaaagaaattaccgatcgtgtggccgaaaaccctcaaaatcagggcgttaacgcggcggtgtggtgcctgtctcccaatatgaaagagtaccttcgggtatggagcgctgtagaggagccggaaatcgcagacctggtattccgccgatttccctggcctgagatgcaattagctactctgatttggtccgggcggtggacaaatgtggacctgcgctacgcctctattggaggttatccatctccggataaggtttggggtatccactacgcgggactcaaaccctggaagctgcgcagccggtcgcttcttcattatgcgaaatatccggactttcaactatggtacggatattttctagccatggtttacgcatatccccaactcacccagagcgccatgctccgccgtttgcaggcgtttatcctggaaaatatctttctgtaaaagcaaacagcccttctgcgtaagcagaggggatgtttcttcatccgactccacggaatcgctttccggtgcttgtggtgttaaaaacgtctcataatttggtaaccggccaagtctctgaaattttgggccgtttttgtgctagatttcgattgaaaaagacatcccctgggatgaaacaacgccttgcctggccggcaaggcgttgtttcgtgctatatctgcttttttatccgttcaagggcccctttttccagccgggatacctgggcctgtgaaattccgatttcagctgatacttcgatctgggtcatccctttgaaaaaccgcaggttgaggatcttcttttcccggtcgttgaggccccggattgcttccttcagtgcgatctcgtccagccagttgttgtcgtcgttatgatcccccacctggtccatgacgtagatggtatccccgccgtccgaatagaccggctcatataatgaaaccggctccacgatggattcgagtgccatgacgatgtcttcccgggggagatcgagctccttggcgatttcctcgactgtcggctcccgcagattttgcgtggtcagccgttccttgacctgcatggccttgtaggcggtatcccgcatggagcggctgatccggatggaattgttgtcccgcaggtagcggcgtatctcgccgataatcatggggacagcgtaggtggagaaccggacgttttgggacatgtcgaaattgtcaatggatttgatcaggccgatgcagcccacctgaaacagatcgtccagattttccccccgttgggtaaagcgctggatgacgctgagcacaagccgcagattgccgtttaccagctcctcccgcgcttttttgtcgccctcccggctcagcttcagcaaccgcatcttctcactctcgctgagaaccttcaaatttgccgtgttgacaccgcaaatttccaccttgttgtacatacggtcacgtcctctccggaaaatggcattgcatttccattattgccatatccagggagaaacatgcagtaaaaagctggaagcccctctcaaatccgttggttctatcctggcggatcggggcatagatttgatagaaaagagcgtataaaggaggcatgcagatgttttgcagaatcacggacatgcatgataaagaggtcatcaacgtctgcgacgggacccgcatcggctgcgtggacgacgtggaggtagacacctgcacggctcagctcgtctccatcgtcgtgcatggacgacccaaatgcatggggttgctggggcatgacgaggatatcgtgatttcctggaaggaaatcgaggtgattggagaggagaccatcctggtcaaccatcccttacctccctgctgccccggtcctagacccaggaaaaatgggattctgggcggcatattcggcggaaaataacagaccctcgtagaatctgcccaagaatcggagcctttccggttccgatggagtgaaagtgccaaaattcgtgcgcaggcttgccattttgcagtatccgtggtatactattgcggcaaaacacatgcgggagcgttgctccgccgggtgccgcagactgcggttggcggagatgccgtcaaaaatcacatttggcgtgcagctcctgcagagggtaaaaccaaaggaggattttgcattatggcagtcgtatccatgaaacagttgctcgaggcgggcgtccatttcggacatcagacccggcgctggaaccccaagatggccccctacatttttaccgagcgcaacggcatctatatcatcgacctgcagaagaccgtccgcaagctggaggaggcgtacatgtttgtgcgcgatctgtcagccaagggggaatcggttctgttcgtcggcaccaaaaagcaggcgcaggattccatccgtgaggaagcggaacgttccggtgctttttatgtcaatgcgcgctggctgggcggcatgctcaccaacttccggaccatccgcggccggatcacccgcttgagccagctcaaggccatggcggaggacggtaccttcgatctgctgccgaagaaggaagtcatcaagctcaaccacgagatcgaaaaactggaaaaattcctcggcggtatcaagggcatgaataagattcccggcgccctgttcatcgtcgatccccgcaaagagaagatcgctgtcgccgaagcgaagaagctcggcatcccgatcgtggccatcgtggataccaactgcgatccggacgacgtcgactatatcatccccggcaatgacgacgcgatccgcgccgtcaagctgattgccggtaccatggccaacgccattcttgagggccgccagggcgaggacaacgcggcggaagatgaggccgcggcggaaaaggctgctgaagaaccggctgccgaagcgaaataatccttccctgcgacattcagaatatgcgaaaggactggtcatataatggcatttacagcaaaagatgtgcagacgctgcgtgagagaaccggtgtcggtatgatggattgtaaaaaagcgctgaccgagacggacggcgatatggagaaagctatcgatatcctgcgtgaaaaagggctcgccgccgcggcgaaaaaggcctcccgcatcgcggccgaggggttggtttatgcggctgtggacgacgccaaaaaggtcggtgttgtggtcgaggtcaattccgagaccgatttcgtggccaaaaatgccgatttccaggcgtttgtcaaggcggtcgccgatgtgattgccgacaagaacccggccgatgtcgccgcgctgctggcgcttccctttgaaggaggcctgacggtggccgacgccctgcgggataagattctcgtcatcggcgagaatctgagcatccgccggtttgtccggtatgagggcgactgtgtggcctatgtccacggcggcggtcggatcggtgtgctggtccggttcgaggctgacgcggctgcaagcggatccgatgcactcaaagaatgcggcaaggatgtggcgatgcagattgccgcgctcaacgccacttacctgaacaaggaatctgtgccggctgcggatatcgaaaaagaaaaagaaatcctggtcgcgcagatcaaaaacgatcccaaaaacgcgaacaagccggacgcgatcgtgcagaaaatggtggatggccggatcggcaaattctatgagaacaactgcctgatgcagcaggcgttcgtcaaaaacggcgaccttacggttgagcagtatgtggccgagtgtgccaaggcggccggcggggctatgaaggttgtggacttcgtccgctttgagaagggcgagggcctccagaagcgcgaggacgattttgccgccgaagtggccggcatggtcaaataagaatcccatataacgaacaggcctgctccagcaagccaatttcatatggatgtttaaggcgtcatcgtttcatgaaacgatgacgccttactttgttaaaatactcgattaagatgctttcacgaggcactgctatttgtaaatctgtcttttatctgttcaccccacaagataatctaacgaaacatgaaagacatctgtgatatttggcggaattctcaatttatgataaaaatataccaacgattgttggataaattgactatattccaaaccgtgcttccgcggtttgccgtgtagctttcttgtctcaccttacgtatgctggcgattgaggaaaaaagacagacagacggaaatctccgcctgtctgtcaccttatgcccggtttccctcttgctcttaaacatccttgtaaagcaggagagaaacaaagggcctgttcgttatgtgggccggggttctcgtatatggtttcctgttcaatccggccgggactcttcggacgcggccgggatgtgcaggttgtcggttatgtccccgatgatgtaccggggacggcctttgacctcatcgtaaattttggagatgtaatagccgatgataccgaggctcatcatcagcaccccgccgatgatgagtaaaaggaggatcaccgtcgtaaacccctccaccgcctgatgggtgaagtatttcacgagtgtctggacgcccaacaccacggacaggatgagcagcaggatcccaagccccgtcaccagctgcatgggcgcggaggaaaacgaggtgatgttggaaacggcgtatttccacagccccttgagcgaccatttcgactggccgtacttccgctcggccacctcatattcgacacgtgtggagcgaaatcccgcccagaaggaaagcgcgcggaagaaggtgttgcgctcgggtaggctgttgaggacatcgaccaccttccggtcgagcagcttgaaatccgatgagtcggacatatcgactcctgtcagcttgccgagcagcttgtaaaacacaccggaggagagcttgtaggacagtttctccctgccgcggctgctcttaattccctcgaccacctcgtacccttgttcccataaccgatacatccgcggtatcgtctcaggcgggtgctgcaggtcgcagtcgatcaccacacagcaatcaccctcggccagccgcaggccggcgaaaatcgcggcttcctttccaaaattccggctgaactggaccccacgcacccggttgtcctgcaaagaagcgctgcggatgaggggaaacgtctgatctttggagccgtcgctgacaaagagcagctcataggcgatatgctcccgctgcagcacggcggacagcgtgtcgactgtgttgcggatattggattcctcgttgaacgaggggatgatgacgctcagcagagccatagggattctcctcctgccccatacaccgttctcctgcatatggtaccatgtccggtccaccctgtcaattgtccggccgggcaggggagggcgcatatggagaaagcgaaggagattccggattttatgtgggtttattcttgtgtatgaaatacaggcagacgccgcacacgattacgctgaccggggcgacaatcagcagaggaataggggtgccgcgttccatacatatgccggatagaatggcgatcaagatgccttccacgccgatgcaggtacccagccgccgggtgtataggctttcctccaccagcccctcccgtttggagccgttcagaaactcccatgttcgcgatgaggacaacaacgacccagccagcgtgaggacggcgcctattacaatccctatgatgtaaccgatgatgaacacccctttcaccgtgacgatgggaaaaaccggattgcatatcgtaaaatacgcaatccggttctgattggaggattatccgagtagggaggccgcgggggcgtccagcatgaccgtgacgtccgggtgcaattgcaggatggacgccgggcactgcggatccaccggcccttggatcatatctttgaccgcctgggctttatccgccccggtggcaataatcaggatggcccgggccttcatgatcgacccgattcccatggtcagcgcctgacggggaacgtcccttacatcggcgaagaaccgtttgttggcgtcgattgtgctttcggtcaaatccacgatatgggtcttcggggggaaaaccgtagtgggctcattaaaagcgatgtggccgttccggccgatgccgaggatctgcagatcgatcccgcccgcgcggtcgatcatagcatcatagtcggcgcattccttttccagatcgtccgcggtaccggagaggacatggatgctctcttcggggatattgatatgctggaacaggttgtcgtgcatgaaatagtaatagctctgatcgtgctcgtgcccgagtcccacatattcgtccaggttgaaggtggtcacacgggagtaatccaccgcgcccgcccggtataactccgccattttccgataggtgggaaccggcgtggagccggtggccagtccaaaaacacaatccggcttggcgatcacggtggcggcgaacagggtggcgccggcggtgccgatggcttccgtgtccgcatagactctgacattcattttcgatcatcccttcatgtaaaatctactttgaccagtatacaccttttttttctaaaacgccagccattccggactttttctttatgtaatcggccgggatcggcgttccttcggtctcccggccgggaaaccggatggcaccaatccgggacacgctcataaactgatagaggatcgccccctacaatcgaatgaaaaggagagtatgtgctttggaaaacaagcaatgcggcatgaaccactattacatgccccgcatgatgaaccgttccggacactgccccggaaacggtcaggcatcctgcagagcggcagcggtaccggcaccggcgccggtggaatacaccccggacggccagccgatggtgctggccatggcgtatgtaccgatgcaggtgctgaacaccctgtatgatccggaagagggcttctgccagggaaccatcttccccgaactgaacaaaccttggctggtaggaggggttaactgtggatgagaaaacgatgcgctgccgtattcacgcctacgatttctcgattctggagcttgggctgtttttagacacccactgtgaggatgcgcaggccctggaaaagcgccaggaactgcaagatcagcgggcagccctggtcgcggaatacgagcgccagttcggcccttatatcgtcaccagcaatcaggtaaacggcgaccggtgggcatgggtatgcaatccgtggccctgggattactgcaaggagggttgacccatgtgggaatatgagaaaaaactgcaatacccggtcaaaatcgcccgtcccaatccgaaatacgccaaaatcatcatcagtcagtacggcggcccggatggagagatgagcgcgtcgctgcgctacctgagccagcgctattccatgccgtatgcggagctcaaaggactgctcaccgacatcggcaccgaagaattggcacattttgaaatgatcgccgccatggtgcatcagctcacccgaaacctcacccccgaggaaatcgtgaagtcgggttttgatacctatttcgtcgaccataccgccggcatctggccgcaggccgcgtccggcgcgccttggacctcggcctatatccagagcaagggcgatgtcatcagcgacatgcacgaggatatggcagccgagcagaaggcccgtacaacgtacgacaacctgctccgcctcatcgacgacccggatgtccgcgatccgctgaaattcctgcgggaacgggagatcgtccactaccagcgtttcggcgaaggcctccggatcgcgaccgaccatctcaacagcaagaatttctacgcctgcaacccgagttttgataaaaattgcggaaaaaagacctgctaaagctttgggaacggtacacaacggcatccctccgcttccttttttggaggcggacggatgccgttttttcatgatgagtggggaagggagagagctccattgccctattgaaccgcggcgtggcatttttccagattaggaaagcgggtaaaaatgagatggtgtaatccatcgttttcctcttgacagtccagctaatatgttatactatataccagtatcaagtactgaggtatactgtgttacaatatacggaagagggggatttcttggaaaacctgaccgaaatgctcaaaggggtattggaaggctgtgttctggaaattataagccgtaaagagacctacgggtatgaaatcacgcgacagttaaatgaaatgggatttacggaggtggtggaagggacggtctacaccattttgctccgcctcgaacggaaccggcttgtggaaatcgagaaaaagccctccgcgatggggccgccgcggaaattctacgcgctcaatgacgcgggccgcgaggaactgcgcctgttttgggagaaatgggagtttctggcctctaccatccatcgactgaaagggagatgaacatatgtctatatccacgtttttcgacgagtatctcaatatcaaaaaaatggtgcaaagtaagcgggagtacagggaacagatggcgagggtggaggcgctgccccatgagtaccggtacgtattcaagaaaatacaggaacgcatgtggatgttcgcggcaggggccggttacgatatgatgaaaattcatgccgatttgttggagctgtttgaatcgggcgcggcggacggaaagcgggtgctcgagataaccggcgaggacgtggctgcgttctgtgatgagctcctgcggggggccaggacctacaccgaggaccaacgcgaggcgttcaaccgcgatattcgacaaaaggtcggcaagatcaatctgccgcggtgaacggcccctccggttgcccataatgtagaagaggcggggtgccagatggtaaacccgcctctttgatagacttccgcaaaggcgagagtagccccccctataatgccaaagcgggtcgtggttctctgcctcctttgatacaggactgtgtatcagaggtccgagattcggaaaacgggattcgtttttcccgctgagcctatccttcctgccgaactgttttcgtatgcgggtaccttgccctttttgtcctcatatgctatgctaatcaaaatggggtattttgggctcccggcatggcggcaatatggggcacaaaaccgcattcctagccgagcatatcctcgaccacgtatggcagatggaggggatccagcgagagggcgttgcatagggtggccaatgcctccaccggaccggcatcggccgaaatgtcgggaatatgcgcgattttgaccttggaatggctagtctttcggtatgccgcgatgccgaaagcggcatatgacccaatatccggatgatggaacgactcctgcacgacttcatatgtacacatagtcaaacacacaccttttcctcatcttcaacagacattataatgaaaagcaggaaaaagtggcacaaatttagaaaaattcacgttaagtattgaatttgacgacaatatcccgttgattactgatatcaaatgcatgggaagggttcaacgatgcggattggcatatgcgacgacagccagctggacagagagatgatccgggatctgctggacctgtattttgcggacaaatcgatcgcctatcaggtggatttgtatagcagcggcgtggatgtcatccatgagtttcaagaagggactgcctacgatatcgtttttctggatatctacatggaaaagatgttggggatcgacgtcgccagggaattaagacggttgcactatgccggggaaattgtctttctgacggccacatcggatttcgcggtggacagctatgaggttcaggcaggagggtatctgctcaagccgcacagctatgagaagctttgtatggtgatggaccgggtgctgtcggcttgcgatatcaacacctatcaaatccagcgccgcggtgtcgtgacacggatcccgtatcatgagatcctgtatgtggaaagccggaatacccggtgcctcctccatagaaaagggggcgggacctatacgatgtataaaaagctcggggagatcgaagaggaactgtacgatccccgttttctccgatgccatcagagttatctggtcaatatggcctacgttcaaaatgccgatcaccagttcaccttattcacaggagatatcgtcttgatccggcaaagaaacctgaaagagattcggaaccggtatctggattacctgaaacagaagacatcctgacgccccgcccttaacaagagcggcggatcaaccgattgccgtgggacaatcggtttttttggggtttttgaggtcttttaaggccgtgtatcatagcgaatggaacgggcgtgtaccttcgcatgggcgatacacggacgctgaactttgcaagtggaatcaagattgacggatggttttttgatattctatatccgaaggaggtgagagggcttgtatgaatggaacgaggcggcgcagcagatgattgattggctggaagagcatttgacgggggatggatccctgcttctcgacatgtcgaagcatatcgggtattcgccctactactgctcgagtaagtttcatgagattgtcgggatgactttgcggcattatgtcgcgggcagacggctggcaaaagcgacattggagatccgcgacacccgcgcacggattctcgacatagcgctcaaatacggctattcttcccaggaggctctgacgagagcctttgtgaaggcttatggatgtacaccgtcggcgtatcggaggaagccgcggccggtggccctgtccagcgtacaggccgttttgtttccggaacattggaaagacagaggagagatggatatgagcgctaccatattgacacagccccacatccgtatggagtatatcccggcgcaccgatacgtcggcatatgggacaaagaggtacaggactatatgagtttctggggacggcatgactgcgacaaggtctgtgggttcatcgacagcatgagccatgtttcccatccggttgtgacctgccacacggccggatggttctatgaaaacgggcggcgcggatatttttacgggttgggtgtcccgctggatttcgacggcgggatcccggagggatttgagatccggacggttccagaaagctattatctcgtgttcggccatcccccgttcgattttctcaaggattgcgcggaggtgatgaaacgggtggaaagcctggcgtggcattttgatccgtcctccaagggctacgcctggaacgaagagcggtgtccggactatcagcgccattatccggaagggatcggatatgaggtgcttcggcctgtccgaaaagtgtgagggcctgacgcacaacacatgaatatacgcagagacatggaaaaagcgcggtttcgcgtattatagacgcaaaatgcgggccacagttcgtggcccgcaagcggttttttcaggggatgctgcaaaattttacattttgcagcatcctctttacacccgtgtgtggttttcatagtaccaagccaggcagaggttgtaaaagtcggcgagcatcaggtattcctcccgataggcggcggggatttcctcggcaatgcaggcgtagaggctcgtgtctcctgtaagttccgccttcaaggccatactcatccaattttccgcccgttcacagcaggatgcgtaggactggacatgccagtcgatttcatcgttttggatgttccagcggtccatgacataccgcatggtatgcagcagattctgccggtgttccagcatctttttgaggttgcgggcaaaaccgagaaatgtgggaggcatcggctctccgttcagtgtacgccgcagagcctcccggaggccgtagagacatccgagccctttgtatacggttttttccccgtatagccgcatatcggcatccagctctgtcaccgccaccgatttcccccaaacctccggcacgattttcttcagagcttcgtatacctggttcgggacgtaatcttcccggatctgaatgattgagagcggatactgatactctctcgaccagaaaaaacggtcgtcggggacccggagcatatgggctttgagccggacgagggaggcgtgcaccgcatcgaacgggagctcccgttccaccagcctggtcatgcgcagggcgggagtgaaaaaaatctccttttcgtcgtcatagccgtacaggagcgcctcgtgatagtcgttgcgtccatcccgttcctctattccctgatgcagcatgaccatgacataacgcccttcacgcaagttctgccggatgagcgacagggtttcctcttcggaaagcgggaagagagggagctcctcgatgcggaggatatccctgtaataggcgggatcgtaataggattcaccgtccccgaaataacaggaaaattcagcatccatgtacaaagacagatggctggccagccagtcatcggcaagaggggaggattggattacggcgagcttttcaaaggtccagcattccgtaatcaccgcggttttcagttctatgggcagtcgtatctccatattcatagccccttttacaatacttatttgtacaattagtataatacgattttccttcttggaaaaggtcacgatttgcggtggcgttggtcaagaacggctctcttggcagaagagaagcgccccggcaaaacggtataccgttttggcggggcgcgggtagggtgttattggattccgtcgattttgggcagggtgtcgaaaccggcctgcaaatcctcgtcggtggggatgtaatcggtcatggtcccctccaggtaggaggtataggcgttcatgtcgaaatagccggtgccggtcagaccaaaaaggatggttttttcctcaccggtttctttgcatttgagcgcttcgtcgatggcggcgcggatggcgtgggaggactcgggggccggcaggatggtttcctctttggcaaattggatggcggcctcgaacaccttggtctgctccacggcgacggccttcatgtacccatcgtggtacagcttggacaggatggggctcatgccgtgataacgcagtccgcccgcgtggttggcggaggggatgaattcgctgccgagcgtgtacatccgggcgaggggagtgacatggccggtgtcacagaaatcataggcataccggcccctcgtcagggaggggcaggaggcgggttcgacagcgatgaattccgtgccggtgcggacgccggtgagggtgtcctgcatgaaggccgccatcaggccgcccaggttggagccgccgccggcacagccgatgacgatgtcgggatattcgccgatcttttccatcgccgctttggattccaagccgatgatggactggtggagcagcacctggttgagcaccgaaccgagtacatagcggcagccgggggtgtgcagggccttttcgatcgcctccgaaatcgcgcagcccagcgagccgccggtgcccggatgggctttcagaatggcgcgcccgatttcggtggtgtcggaggggctggggacgatatcggcgccgaaagtctggatgacagccttgcggaacggcttctgctcgtagctgaccttgaccatgtagacggtcagatccaggccgtaatgggcgcaggccatcgaaagcgcggtaccccactgaccggcgcccgtttcggtggtcaggcaggtcaggccttgttttttggcgtaatacacctgggcggcggcggaattgagcttgtgggatccggacgtgttgtttccttcgaatttgtaatagattttcgcgggagtatccagcgcccgttcaagattatatgcccggatcaggggagagggtcgaaaaatgcggtagaaattcaggatttcttccgggatgtcgatataccggtcggtggtgttcatctcctgggcacagagatcctcgcagaagatgggcagcatatccgccggccccaccggctgatgggtggcgggatggaggtagggatcgggctgttctttcatatcggcccggatgttgtaccattgccgcggcatttcctcttcactcagatatatacggtaagggtcggtttttttgctgctcatggatatcatcctttcttgtatttactgattcgaggccaattgtgcctccacctcgtccctggtggggagggcgcatatggcgcccttgcgggtggtggtcaaagccccgaccgtgttcgcaaaatccaatatacgggtgagcgtctctctggagagggaggcgatatccgtcccttcctccagcaggcgggtaatgaatcccccggtaaaggaatcccctgccgccgtcgtgtcgacggttttgacgggcagcccgtcccgggcaatgatctcgtccccggccagggccaggacgcctttggctccgagggtgcagagcagggccttcatcggaaaacgcgcgtacagaacggcggcaccgcgacggagctcggtttcgccggtcaggaaaacgagctcttcctccgacaccttcacgatatccgcgaaaggcatggcgcgcaggatacaatccctcgcctcggcctcgcccgcccacagattcagccgcagattgggatcgaataccgtcacgacgccccgttcctttgcgtgggcggcaagggcgaagctggtctcacgggcagggctttccgtcatcatgaccgagctgaaaaagaagacgcgggattgctcgacggccttaaaatcggcgggctccgtccggagcatggtgtccgcgccctggcggcggtaaaagctaaaggagcggtcgccggattcgtccagatggacgaacgccagggtggtctgatacatatccgacagacgcaggcggctgacatccaccttttcctgtctgagggtatccattagggcacggccgaaggggtcgtccccgacctgaccgatgaaggcggccttcgcgcccaggcgggcggccgcacaggcgacgttggccgggccaccgccgggattgcgttcaaaaacaggattgccgttttccgaaaccccggccggggtgaaatcgatcagcagttcgccgagagaaagcaggtcggtcatacgcataccccttttcacatcttcagttgccgcattcgatgctgatttcattgaacttctgcagcaggacatcgaccgaggcggcgcgtttctcttcctctttgaggtccaggacggcctgccccgcgtgcatcatgaccagccgggtaccgtactgtacggcaaagcgcaggttgtgcgtcaccatcagggtggtcaccttccgctcctccaccagcttccgggtaatctccatgactcgttcagaagacttgggatcaagggcggcggtgtgctcgtcaagcaccagaatatcgatgtcggtcatacctgcgatcaccagggccagggcctgccgctgtccgcccgacagggagccgaccggctggcctagacggttttccagtcccatgttgcagatttcaagcatggagcgataggcgtcgatgcgttttttgccgatggcgggggccagggaataccggccctttttgttgtccgccagggccatgttttccaaaatcgtcaggtcgggacaggagccctttgccggatcctggaacacccgcccgataaaggccgcccgcttgtgttcgggcaggcgggtgatgtcccggttccggtaatagagccggccggcatccagcggcagggagccgcacagcaagttgagcagggtggtcttgcctgacccgttggatccgacgatggagatgaattccccctcgtccacgccgaagtcgaagccgtcgaacaaggtggtttcgtccggcgtccccacatggaagcgcttgacgatgtgatcaaagcggatgagctggtcagccacgaatacgccctccttttttatccagcatattgctgagtaccagcgccgccacgaacaaggccgacataatcagtttgagctgatcgctccattgcaggagagtggcgatcgtcgagaacgtcatgtagatgatggagccgagcaataccttggtggtgttccgcgggaaccggagtctgcgcagcaggctgacgccgataataaccgaggcgaggccggtgacgacggaaccgatcccgatctggagctcggcgttccccttgtcctgtgtgatgagggccccggcgagggcggcaaagccgttgccgagcgccaatcccagaattttggacatgccgggattgcgggcgagctggacgacatattgggcgttgcttccagcagcacgcaggagcatgccggatttggtccgcagataccagtcgagcaggattttgcagataagggccaccgccaccgccacagcgagaggacggagttcaaatccgccgacgtattcggggatcagggagatggggaatacctccgcgacggtgagatgcgtctgggaaaaatagacgatgttcatgttgttcgtgccggccttgatgatcatcaggttgactgaaagcagagccgtcattacgagaataccgcacaaaaggggctggatatgcagtttgacgtggagcagcccggtcacgcacccggccgcgacacctgcggaaaaggctgccaagagggccagccagggactgacaccgtggaaaatcaggatgccggagatcacgccgccgagagttagggtgccatccaccgacaaatccggaaaatccaggatgctataggtgatgtagacgccgagcgccagtactccatacaagcacccttgtttgatcgtcatgatcagcagttgtagaaatatctgcatgtctcaagcggacccctttcgaatgagtacggctgctgccgcccgggtcaggccgtggtggtgactttctgcgcttccgcgtaggcgtcggggatggacaggccgaggctctccgcaacgtcggcgttatagacaggaaagctgtccttgaccaggaccaccgcggtgtcggcggcgttttcaccggcgagcacccgggcggccaacaagccggtctctttgccgagcgccacataatccaggctttcggaggcgaggcagcctttgttgacctgctcgatttctgagccgtagaccgggattttgttggatttagcggttgcaagcacgataggaaggttatccaccaccagattgtcagtgaaattgttgatgcagtccacctgggaggccaggacagtcgcggcggcggggatatcggccgcgttctgaacgcctttttccacgatttcaaagccgtaggaaggggctattttcttaatttccgccaggttggaggcggaattggcttccgcgatattgtagaggatcccgattttcttggcatcgggctgaaaggcgcggatcattttgagctggccttccaggttcaggcggtcggagctgccggtgcagttcacgccggttttctccagggattggacgagcttggcgttttcggccatgggatcggacaccgcgcagaagatcaccggtatttttccctttgaggcgccgctggcagccatggcggccggggtggcgatcccaacgatcagttcgtagtttttggcggccatggttcccgcgatctggtcagccgtggtgacattgccctgggcgtttttgaagtcgattttgcaggtttctccgtctttataccccgcctcttccaatccttggatcaaaccggtgtagcagttgtcgagggaggagtgaatagcgtactgaatgatcccgatggtgggaagcttggcatccccggatccgctgccgccttcgttggtgccgcaggcagtcagggacaggacgagcagggcggtgccgagaccggcggcgagcagacgtttcatcgtcgtgtttttcatggaaatctctcctttatcatcgtgtgtgtgagtttttgccgggcgacagaaacatcgccccggctcctgctgttccggcggcgctctttctgccgcccgccgtttcgactgtcagccgccatcgccatcgtctgtccatgccgttcacccctttccgttttaagacaacaaaaaagccctcgtcccctctgataagggacaagagctgactcctgcggtaccacccacattcacccgccctacaggcggatgcactttttccgcacacccatgatgtgcgcttccatgataacgggtgaagatcccgtcgcacctaatgccggtccggcttcggattgccctcgtaagtccattcgacaccgccgccgccgctgcgatcccaccatccgcagctctctttgcgcgcctgaaacgatacctactact

SEQ ID NO: 1984 - DNA, 3863 bp, Unknown
  16S sequences of unknown bacteria
ggtgccgtcttcgtcccaactctcatccatcgcccgaatgtcaaagccaaagctgtgccttccgacgatgtgccatatggactgagttaccgctttgtcaccttcgacacgatagagataaccgcatataacggttacgaatcggtactgaccgtgccgtcctacatcgacggctttaaggttgtgggaataaaggatttccacacggtatatcaatacagcgaccacagtaccggccttaaaaaggtcatcctgcccgagacggtcacatacatcgccgacgaggcctttgaggacggctattacaccaaagttcattcggcgcttgaggagatcgtgcttcccgaaagcttaaagacaataggcgagtatgctttttcggggtgcggtgcactaaaaagcattcactttccggcaggactcgagcaaatagccaaaggcgcctttgaaagctgtaattcgcttgaaaatgtaaccttcggcggagacggcacatacattcatcctaacgccttcggtgccgtaaacagttcactcagcgagggctttgcgaaattcctttatgacgaatattacgattggctttgggacgacagcacatccgatttctttatatggaaaaatattttgctggcatataagggtgaaagcaaaacccctgtcattccgagcggcgtaacggcaatcggcaaaaatgtttttacgcgctacgacattaccggcgtgaccattcccgaaggggttaaatacatcgggcaatacgctttttgggagtgcaaagagcttaaaagcgtttctttccccaaaacccttgaacagatcgacggcaccgccttttccgactgtgaaaagcttgaatcggtcaactttaacgaggggcttaagattatcggagacaacgcttttgccgactgtacggcacttacctcggcacttcttcccgagggtttagaagagctgggcgaatgtgcatttgaatattgcgaaaacatttctcaggtcaacattccctcctctattgtaaaagccgataatgttttttatgactcaaaatggtataatgcccttcccgaagactatgagctttactacggaagtgtttttctcggcataatcgacaacgattacagcgactatcccgaggagctgaccatccgccccggcaccaaaacggtatatttagaatacgactgcgacggtcttaaaaagctcaatcttcccaacgggctcgagacgctcataataaacggcggcgacgacctgaccgagcttaatgttcctgaaagtgttaattacattgaggtgaaaaaactttataatctcgtttcggcaaagctgccgcagacctgtaccgttgccgacgcctcttttgcctatctcccaaaactcaaaaccgtcaatatccctaagggcaatccatatctcaatgcatttgcaggctgcgacgctctcgaaaacattacaattcccgacgatgtgcttgagcttggcgcgataggcgggcagaatcttcacaccataaatctcggtaacatccgcgtgctgggcgaaggcgctctttcctcctcgaatcttatgaccgaggtcaccctgcccgacagccttgtggccattgagggcggtgcattttcgggatgtacggctcttaaaaccgtaaagggcggtaaaaatgtcaaaaccctcggaagcggtgcattttccggctgcggctcgcttaacgaccttggcgagcttgggcagtcggtcacctggaccgagcacgattctttagccgccacaggctggtattacaatcagcccgacggcccggtatatttcggcaaggtggcctattgctataaaggcaaggtgcccgaaaacaccaccctcgttataaaggaaggcaccgtggcggtggcgggagcatacattaccgaccagatggaaatgactccccacaacatggccaattttgaaacccccgatcttgtgggactggttcttcccgaaagctgcaagctcgttgattattacgccttttgggcctgcgaaaagctggcctccatagagtttggcggagcggtaatcatagacaatatggcctttaacaaccacggctgcaagacaataaatctgcccgacagcgtgcgctatatcggagacaacgccttttcaagcggagatcttgaagccgttcatttaaacgacggccttcgctatctcgaaaacggcgcgtttttcacctacggcaagggcaagggtatgacggttccagaaagcgttacattcatcggaagtcaggcaatcggctattatccccccgaccccgacaaccccttcggcggcgttgaaaccatcgacggatttgtcataacaggcgcaaagggcagcgaggccgaaagctatgctaccgccaacggattcaccttccgcgagggcgatgactccgcctgcacaaaccattcctttgtatcggacaccctctcccccacctgcgtttccgaaggatatacagttaaaacctgctcaatctgcgggcacaccgaaatcagcgacaggaagggcgcaacgggacagcacaaagaggtttccgacgcatctctcgaagcctcctgctgctcaaacgggcacagcggcggaagccactgcgcctcctgcggcaaggttttatcttcggcaagctttacccccgctttgggccacaactgggtcatttcaaggcttgacgacccatcatatgtgggctatggaattttcgacagcgtttactattgccgccgctgcgagctgagggtgtatgtaaacggcgattacctccccgccctcggcgatgtggatttaaacggcagcgtgaccgtcaccgacgcgctgcttgctctccaggcatcggtcggcaagcttgagctttcatccgacagctttgttcaggccgacgtcaaccgcgacaacgccctcaccgttaccgacgccctgcttattcttcagtattcggttaaaaagataacggcctttccgtgattaaaagcttaaccatgcaaataaaaaaagagacaagaacttgcttcttgtctctttttgttgtaaagttaattactttgccacgacggtgtagtaagtatcgttgccttttacttccgaagtaacggtatatccgtcggccacaaagttggtacccgcaccctcggcagagttattagacggatcaaagttcacaaaggtaccgcccttgacgatgatctttgcagttccgtctttatacgccgagtcaacgcagttgagaaggaagttatagtaatagggagcgccgtagggctcgcaggcaaaggttcctccggtgatggtgagggttcccttctgaacctgaaccgcagtaccgccgccgtagtaataaccgccgttaatggtgagattggaaccatttctgacgttaatgccgtaaccgccgtttacgccggtgtcaattccgccgtttgcagttgcgtttatagtggtgtcggcatcgacaatcaaagcgcagaaattggtgttgttgtttcccatgttgtcgggagaaacgatttttgcgtcgagattaagggtggtgggctggctgataataactctcgaatcggcattatctgcaatattgtcggtcttaatgtccttattaacggcaacggttccgccgtttacaaggctttccttaagctcggcggcatttacaacgggatatgttgcatttgcgtcatagttattattatagctatcgttttcaacagtatcctgagttgcgacgacggtgattgtgataccggtgacctctttacccatgtaatcgttgccggcagtctcctgcatttttcccgacatggtgatgagcttggtggaggctcccgcaccgagat

SEQ ID NO: 1985 - DNA, 3142 bp, Unknown
  16S sequences of unknown bacteria
acggaaaaaatgagatcaccttccagaagggccagaatacctctgttgccaagaagcaggttgtaggtgtaatcctttccggcggacaggcaccgggcggacacaatgttgtatgcggactgtatgacgcattaaaggctaccaactctgagaacgtcctttacggattcaagggcggcccgagcggactgatcgaggacaaatacctgatcttcgacgacgaatacatcaatgagttccgcaacaccggcggcttcgacatcatcggttccggcagaacaaagctcgagaccgaggagcagttcgaggtagcagctgaagtttgcaagaagcacggcatcactgcaattgttatcattggtggtgacgattccaatacgaatgctgcagttcttgctgagtacttcgcagcacacaacaccggcgtacaggttatcggatgcccgaagaccatcgacggcgacctgaagaacgacgatattgagtgctccttcggtttcgataccgctaccaagacctacagtgagctgatcggaaacatcgagagagactgcaattccgcaaagaaatactggcacttcattaaggtaatgggacgttccgcttcccacgttgctctggaatgtgcactgaagactcagccgaacatctgcctcatctctgaggaggttgccgagaagaagatgtccctttcccagatcgctgactatatcgctgattccgtagcgaccagagcagcaaacggcatgaacttcggtgttgctatcatcccggagggtgtcgtagagttcgttccggagttctccgtactgatccaggagatcaacgagcttctcgcaggcagcaaggcagatgagttcaatgctcttccgacctgggctgacaagtatgcattcatcgaaaaaggcctgaccaaggagtccatggctgtattcgcaatccttccgcaggctatccagcagcagctcttcctcgagagagacccgcacggcaacgtacaggtatccctgatcgagtctgaaaagctgttctccgcacttgtaaaggacaagctggaggcaagaagagcagctggtacatacaacggcaaattcaatgcgcttcatcatttccttggatacgagggaagatgcgcattcccgtcaaacttcgacgctgactactgctattccttaggctacaatgcattcatgctgatccagtatggctacaccggatatctttccaaggtttccaacctctctgctccggcaaatgagtgggtagccggcggtatgccgatcacaaagatgatgaacatggagagacgtcacggtgaggacaagccggttatcaagaaggcacttgttgaactggatggcgctccgttcaaatttttcgagtctcatcgtgaagagtgggcaaaggatacctgcttcgtatatcctggtgctattcagtactacggaccgaccgaggtttgcgatatcaccacgatcactcttgctcttgagcagcagaaataattgtaaagtgacgaatgcttaatccgcgttcaaaaaaaggctccgggatatctcccggggccttttaatacttcattcattcgcttctttcctgtacaccatgcatactccggatataaaatgccatctgatagggcagtctctcctccggcgttttcaattcattccccagcaccttgcgtatattgccaagccggtataacacggtattgcggtgtgtgtacagctcctccgccactgcctggatgctcccgttatgcttcagataagactgaagtgtttccacataaccggcattgtacttgcgatcgtattcttccagcgcggccaggcattccgtttcgatctcctgcagtacaccggtatcttctaccatatacagcagccggtacaatccaccgtcatcaaattttaccacctgccttttctgcgccatcgccatctgcaccgctgccttcgcccgccgatagctgactgaaagccgtgaaatatccatgcatttacttccgatccccacacgcagcttccgctccggcatacgcttttcccctctctttatcgccccttcaatcagctgatacagagcctcttccggaaccgcattggcgacaagcacaaaatcagaattgtaataaaagaagctggcattgtgcgtaatatcctccagatacacctgaatgcggtaagacagtttcctccgctccaccatatccatagcatccagtccctcacaggtcagcagcagcacctgaaagcttccgtccacatcaaaatattgccataattcccttctgtacgctgtctgattgtccggtgtttctatcgccgcaatcaacgctgtcgcgatctgctcatccgtattgtcctgcacaaagacacggatactgaaatcctttatcatgtcggacagacgcacctcccacggcacggtcagcagcggaaggtcattctcatcacagtatgccatcagctcttccggaatctcccggatgtactgccccacattgataatcagcccggaggcatgatatcggttcagtttccgcgccagacgcatccagtcctccttttccgggaacccaagccccgtagtcaccgcaacctccttcccccaaaagttctgtatgatcgtcgtatcctccagaagatgtacccagctgatggaattggcccagccgtttttccccgccagaaacttcatctcatatcgtttttctgatgtcagcatcatatcttcgatggtaaaactcatatatcttcccttcctgattctccgcacatgtaccttcactatttttcactctattataacatatctttgtgctcatagcacatattttacccgcaagttttaggtctaccccatatagattttctaaaattttgtgctaaagtataagtagattaagaaatatttaaaggaggcgtgattatgagattcgcactttatacaaatcccctggatacagttccggcaccggaatggatcaaaacggagcggtatatgtattgtgacaattttatatacgactatatgaaatcgaagcgcctggatcttctttcatatatcagacgtctgcttcgcaaatgatatacgttcccctttcgccaaaaaggacatcctctgccggatgtcc

SEQ ID NO: 1986 - DNA, 32759 bp, Unknown
  16S sequences of unknown bacteria
acaacgttttatattataaacgataaatgaaaaaaatgcaatacctttttttattttctttcatcaaaatacaaatctattttgattattttatatttaaaggaactacaggtataaatcttgacaactgtaatatactgttatatactgtttatcaaaaggaggctaaaaaatgaatatcatcattaatcattcattcatggtccctatttatgaacagattgtcgaccaaattaaaactctcatccgaaaaggtgaactgaaagaaaatgattctttgccttctgtgcgcacattatccaaaacattaaaaatcagtgctttaactgtaaaaaaggcgtacgatgctttagaagcagaaggatttgcagtaaccattcatggtaagggaacttatattgcatctgcaaatgcggaacttttacttgaagagcaaaaaaaggaaattgaacacgatttagagatagccattcaaaaaggcagaagatgcggcatcagtgatgaagatatgaaacacttatttgaactacttttggagggttaatatatgttaaagatggaacatgtaagaaaaaactatgagtctttttcattaaattgttcattagaagtgaaatccggttacgtaacaggtttaattggaaaaaatggtgcaggaaaaagtacagtctttaaaatgatattaggactcattgcaaaagatagtggaacaatccgactatttgataaagagatacaaactttgaatgacaaagaaaaacagcaattaggtgtagttttgtccgattccggtttcagcggttacttaaccattcatgatatcattcctattttagaccacctctacgagcattttgataaatccttctttgtaaaacaaatacagagatttagattaccacagaatcaaaaaatcaaagaattttcaacaggtatgaaagcaaagctaaaaattttaactgccatttctcatcatgctaaatttttattgttggatgaacctactgcaggtctggatgtaactgccagggacgaattattggatatgctgagagaattcatggaacaggatgaatcacgttccattttaatcagctctcatatttcaacagacttagaacccctgtgtgacgacttttatatgattgatgagggaaagattatctttcatgaagatacagatatattgttaagcgattatgccttgcttaaagtaactccgcagcaatacacaaatatggataaacgatatattttgaaatataaaaaagaaatctacggatacaattgcctgaccaatcaaaaacaatactatctggaaaatgaaccaaacattgctgttgaaaatgggaccatcgatgatgtcatcacaatgatgagtggaggtgcagaaatatgaaaggattattgataaaagatttcaaattactgaaagtacaaaaaaattcctttttgctcattttatgcattgcaatcggtatggagatttttaccaatagtacatcatcttctttcatcatcggctatttatcattcgtcgccacattgtttacgctcagctcgattagctacgatgaatttgataacggcaatgcctttctcttctccttacctatcacacggaaaagttatgtaattgaaaaatatggatttggcatgataatgggaagcagcttttgggcatttggaacattaattgtgattctcaaagaaataattgcaatgaaatatgtatccatagacacaataatggcagcttttatcattttacctattgtgttttcagttttagcgattatgctgccgttccaattaaagtttggcggagaaaaaggacgaattgcaatcatttgtactttggtcatcgtatttctgatgggtattgtcataacaaaagtttcaaatgcattccatatcaatttgagcttcctcttccatcaaatagccacgctcaatcgagcagttctcattcttgctattattggttttacaattctcatgctctctatctcttaccgtattagcttatccattatgaagaaaaaagaattctaagaacgacacatcttttattaccttaatgtcattaaaaaaatgataatgaaacaacaaaaatatcaggaaaaccagttgaaacatataaaaggcaattcccataaaataaaaagcaagctgcaaatttacagcttgctttttattttatggaatataacaacctggcaataacagtacaaatatggaaagaactcctttccatattcaaaattttggatgttaagagaacacttacacgttctgtctatgaaaaattgcatagcaattttttatatcataaggttacctgataacaccaagaatcatattatttagataatctgatatagtggttcgcttctcttagcatatggtcggcaaacaacggaagaatgacggaaggaatgtaaaattcagttgcggttcccgcaatgtccggctcaatttcaatatttttcatagtacaagcagctttttgatccaattcatccagcattttttgataagatgctgcaaatgtactgcaagattgaatcaattcgttatttgctgaatttaaaattgctttcacatattgtgtatgttccaatacggaatgatcccagaacaaatctacttgtgtcatatcgtcacaagagaattcttcttcattgtcaaagttaataatgtagcttctgtagctttgtgcttcatgtacaagatgctttacaaaattaggatagctggtagaaaaaatactgcttgccattagttcttttaaaatattttcttcaaaatcaatgataccgtcaagaatgcgaattgcagaacgattcagcaacaatacttgatttgccaatttagggcttatgtatgcatcgtcttctccttgcatatcctcctccatcgctgtaatagcacggtcaatcgaaatacctgtaaaacgctgtacctctctttctgcagtttgggtgtactccgttaccaattcagcagattgaatgatatcttttgacaatacgccatgacttagtttcactgcctgatttaagattttttcaaactgtactttataacggtctgcttcttttgcaatatgttgattcatacctgcaaaactaacttccagaaaaatagcatgctctttcatcattctggcaaagaataagtggtgctccaaagataatactacactgttgcggtttgtaaccataaacatcatcctccaaaagttcatttgtctaagtatacgaaccgtacaaaattttatgcattctactggtaatggtgcataaatacatgtaagaaaatacgacacaacctatctattatctatcttttttatatacactgttttaaaatttatcatacttttccgtttgtattgaacaaagaagcgttctgtgtacatgaaaaacctgtcattattataaaatttcacgatatctgatttatacaaattctgctgtgaattttcatctattccatacaaatttggttgcgcatttgacaaaaaatataaaatacttgcaaaacaaacaaaagcatatacaactatcgtttcggataattgtatatgctttcttatcatgagataggaacaaagtctccacgctctgccgctaaatgatacccgatagagttcattctgccctgcaaacagttcctgcactcagcagcttcgtctcctgtacaaattttattgtcatacagcatatattttgctctcacatccaacggtgaaagatttggcataaccacgtttgctcctgccaaaattcccaactcacgccctttgggatgaatggttcccaaagcagtggttgaaggcaaaagtacatttggaatcagcaaacgcaaaataccaatcaaaaacagtgtcatttccaacgtacctgctgcttcattcgcaaacggcgtgtcatggtgaggaataaacggaccgattcccaccatctgtggagagaattcttttataaacaataaatccctgaccaaatcttctttggtctgattgggagagcccaccataaatccggtacctacctgatagcctatttccttcagattgtttagacaattgatacggtgttccaaggacaaattctttggatgcaatgtacggtaatgttctgcgtttgctgtttcatggcgcagcaaataacggtcggctcccgcttgatacagacgggtataagactcataactgcgttctcccaaagacagtgtaatggcacaatcgggatactgctgtttgatactttggattaaatcaaccaaaaacgcatctgtaaattgtccgtcttctcctccttgcagtacaaacgtgcgaaatcccaacggatagcctactttgcagcaagacaatacctgctcttttgtcaggcggtaacggtctatattccggttgctcctgcggatgccacaataatagcaatcatttttgcagtagtttgtcagttcaattaatcctctggtatacactttgtggtcaaaatgttccttttgacgtatacgggctttttcaaacaaataactgctgttttcttcatctacgtgttccaataattgaagcagctgctcaccgcttaagattcctgtttcaaataattggtcaatccattgtttcatggcttctacaccactttctttgcaccatttgcaaattattttaatacaccatacgcttcaataaactgctgcattgttttaccttcctgctctctgtttaaaatacgacgggcaggactcatcattgtttgtgctcgttcaaacaacggttccaaataacactcttcattcaaattacgctgaattaatccttgttttgccagttccaaaacttttaaagtaagcgcttgcaccgcttgttgattcaactcttttggaaattccaactcaatcaacatttttcttaattcggaaggagagtatccttgtttatagacacttctgtcttgatacagcaatgtttccaattcatccaatttttcttgcaaacctacatggaatgccgctacacacatacattcgctgacaggctgacaacatgcactgcgatactctatggttcctctaaaggttaagtcctcaaatttatagcttcttaaatactccaagtcagaaggttccggatgaaagacgtacggtacaaaatggtcaccgttgaaaaccataccttcaacagactccatttggaaaaactgttctgcaggaattggagtaaaataaatatattttccgtctcttgccacattgaacaacgaggtgcgcttaatatattccaccaattcttcaatatctgtcaattcaatttcgaacataccaacattatgaggattataaccatacatactggaatcccagaagcggtcacgcgcactgaccaaattaaactccgggtctaacagcaaagaattggaaaacaaaacagctttaatcggctccaaacgattcaatgtattgatggtacgaatcaaattttcttccgacacatccaactgaacttgagaagcgcaggaataagaaccaaagttgggtctggagtgaaatgccttaaatcgtggatgctccacataagactctaaatgatgctgaatcatacggtatctttgcccaggcaaggcattgttatcattataaatgccataagggcttactcccatacctgtcatgcgataatgatatttatcaagctctctttccaggaactgataatatgttttgaaacgttcatatgccacatgcaaattagatacggtacccatagaaaattctacattgcaataagaatagtcaaatgaaatggtatcccctgtttcttcattggacaaacaataaatatcgccgttatcatcacgtttttctatgtttaaatcaaatgcttctctcaaagccaatactactttttgaatgacgctgaaatcaattttctcttgactcatattcaaaattggaatttcaaattcaatgccaatcatatagcctgttttatgcttggtcggtacaatatatttttcgtaaattgctttgtcgatatcaaattgcttcatcatacatcacctttctgcatatatgcagtattcatacgtattatgatagtaccataaaattctatgtttgcatattaccattatcatatgtgcaaaaactattttaaaccaaatattttatcatttttcattcaaattgaacttttataaatacctactaaataagtactgtttaaattttatctgcaaccattctgtttgtcaagtaatgaaaatttttcttgcaaaaactttcattgattcactggtaacaaccgcctatttgcacaatatacacttataaattcagataagttgcctaatacaagctgtgaaaacaacataattataatagattttgtgtatacattgtatagcaccgagtaaatacaattcggaaacaaaacaacgaaaaaagaatctcgggtacactcgggattctttctttttcaaagcatgtaatatcaaaacatctataaatacgcttaagtaatataggagggacggtatggcatccatttctataacagaaacagtactgagagacggcaaccagtctttcatggcaacccgaatgcctctgaaatcatttgagtctatattaagtaccatggacaaagccggatatggctctgtagaatgctggggcggcgctacatttgattcctgtttgcgttacttaaatgaagacccgtgggaacgactcaaaatcatacgcaatcgcatgcccaattctaaattgcaaatgctgctgcgaggcagaaatctacttggatatcaaccatattccgatgaaatcattcgtaactttattcgctgctgtgtcaaaaatggaattgacatcatacgtatctttgacgctctcaatgatattgaaaatatcaaagtggcagtagacgaaaccatacgccaaggcgtacacgcatctggggcaatttgttacactataagccctgttcatacacttgacagctatgtcacacttgcaaaacaaatggaagcattgggtgtacattccatttgcattaaggatatggcaggaattttaagtccacaacaagcatttaacctggttactgctctgaagaaagctgtaaaccttcctattgttttacatacacactgcacaacagggcttgcttttatgacgtgcatcaaagctgttgaagcaggcgtcgatgtgattgacactgccatatccagcttttccggaggaagttcgcagcctgctacagaaacgcttgtatacgccttagaagaattgggaattcatacgggaattgaccaatcagtattaaaaaaaatcaatgaacattttacttccgttcgtcaggaagctcttacggacgggacattgaatcccattgtactgacaacagataccaacgcattgctttatcaaattcccggaggcatgctctctaatttgatttcccaattaaagacacagcatgcagaacatcgtttctatgaagtgcttcaggaagttccaaaagtgcgaaaagagttaggttatcctcctttggtaacacccatgagtcaaatggttggagcacaggcagtcactaatattttaacaggaagccgttatcacattatcggaaaagaaatttgtgcatacgtaaacggagcatacggaacagcgcccggaaacatagacgaaacattaaaaaatttagtgcaagaaaagcaacaagcatcgaataccatatcggaactgccgaaaagcatgtccgctgcagcaaaggagctgggagagttggcagaaaaagaagaagatattttatcttatcttgcgtttccgcagacagctatttcttttttcaaaaatcgaaaaaaggaaaaagaacattgctgcccttatatgattacacaactgtctgaataaggaggtcactctatgaatgtaatagattgtattattcttgcaggaattggcattttaaccgtatttgccgtattgtttgcactgagcatattgattcgattgattagctttaccgtacatctgcaaacgccctggaaaagacacgccaaagtttctctgtcaggtcacggaagcataccgcttctctctgtttccaatatttcacgtgggctttgcaagcaatatcaggtagatgaccgtaccgccgcaatggttatggcaattgttgcggacgaaatgaaactgcctttaaatgaaattacctttatttccataagggaagtacggtcacgggaggagaatgaaatatgaaatatttagtttctctcaacggaaaacaatatgaagtaattgtggaacatcacactgcaaatgttacaaatgtgactccctttgtatccgaacgttctccaaaggaatcgtccatagagcaaaagcaagccgaacatcttggttcattaggaaatcctcctgcaaacagcactgctgtaaaggcgcctttgccgggaactattacaaaattgaatgtgaaaaatggtcaaaatataaaacgcggagagatattatgtattttggaagccatgaaaatggagaatgaaattatcgctcccgccgacggcacaatcataaaaacagaagtgcagcaaggttcagccgtgcaaacggatgatatccttgttgtaatcggttaagggagggtttgcatgtcttttaccaacacaatggtaaacttatggaacaacatgggatttagcacatttacgtggcagcaaggcgttatgattggcatttctctcattttgttgtttctggcaattgggaaaaaatttgaaccgtttttattgctccccattgcatttggcatgttattggtaaatttaccactgacaggactgacacaagaaggcggtttgttttattatctctcttttggcgtcaataccagcatttatccctgtttaatttttcttggaattggcgctatgaccgattttggacctctgcttgccaatccttcctgcttgttattaggcgctgcttctcagttaggcgtttatgttacatttattgttgcttgttttgccggatttacgccgcaagaagctgccgctatcggtatcattggaggagccgatggccctgtaaccatttatttaactgctacactggccaatcacttattgcccatgatagctgtagctgcatattcctatatggctttggtgccattgatacagcctcctttgattcatctgctcaccacgaaaaaggaacgttccatcgagatgcatcaattgcgtgttgtaacaagaaaagagaaaatcatattcccaattgttgtgattctgtttacctgtctgctttttccttccattgcaccactgcttggcatgtttatgttaggaaatttgcttcgggaaagcggtgtcaccaatcgtttgtctgacacagcacaaaattccatgatgaatatgttcacattattgttagggatttctatcggttccagaactgccggaaatgaatttttgcagattgacacgctgattatcttaggattgggattactggcgttttgcatcagcaccataggaggattactgtttggcaaactgatgtgtgtgattaccaaaggaaaaatcaatccgttaatcggttccgcaggtgttgcagctgttcctatggcggctcgcatttctcaagtagagggccgtaaggtaaatccatctaattttttgttaatgcatgctatgggaccaaacgttgcgggagtcattggctcttctgttgcggcaggatttttgctttcaatctttggcgttttttagaaaagaaatcatcgcccgacctagcaaccggaacaaattccattcagatgttatcatccatgtttcttttatggtgcaccgcattctatctccattttgggtatggatagctggagcaaaaagtaaatccttaactttctataagatgattttccgtcttcaggtcaccgtgcctctactcccatttattcacctagttattaaaataacggtttgagttcttttatagacacagcagataccctataccacaaaagcaaaagcagacacgctaatatcacgtgtctgctttttattttttacctattttcttcagcagcgcttcgatataaggcgctcccatttcttcaaagaattctttttggtggtctgttccttcatagacacgaataccgtctctatataccagtaacctgtttaacggcagttgctgccacggctgtctgtcatttacgggaactgtcataaagctgcaagtattcccttcttgcgcataaaacaaagttcctttcatattggtatgcacatacatctgttccgtatcataaaaaatcagattcatcttattgccttgcaccaaatgcgtaattctttcttcaataatcggaatacgctcttcttttgtcaacgaacgtccttttgcttttatcgctcgattaattgcgtcaagaataaaataaaaaacggcttcgctgtctgtatctcctctacacaagtgcttataaggttccaacatgctgtcttgaaaagctgtgccattatgcataaatgtccatatacgaccactgtaatctgcgtgacgaaacggatgacagttgatagaactcataacacctaccgtggcaaggcgaatatgcaccatggcactggtacaccataaatctttttgtaaataagcacagtacttggtatcatccaatgctctgagagggcttcgataaacaatcgcggcatttctctgccaaaaggacaatccccaaccatccggatggtcaatgctgtgttgataaaataaatcacaatttggtttaatattaacggtatctctgctgtttacagcatacaattcacacataacagcacctcctttctattgaatcataatagcttgtctctgtttcagactatgcatttttcatcataaatgccactaaaaagccggaatggtaacaaacagaggaaaaacataaaatccaatgattcctaaaacaacactgatacccgctccaatcaacacatcacgaataaaatgcaagccacaaagcactctggtagcaccaacaatgcatgccatacacaatgttaaaacaccaaacggtatattcacgtataaacatgccataccaatgataaacgcacttgctgtatgtctgcttggacaagaattgccttttgagtgtttggtcaaaggttcaatttggtacacttcaaaggggcgcggtttatccagaagaaaacgcaaaatcgttacaaatatcaagtcaataacaggtactgcaataaaaaatacaattttagtatctctcgtaaacgctaaaaaggcaataaaacatacgtaaattcccatcaataaccacggggttcttttacaaaaacgcaataatgtttcttttctaaatttcgttttacagcaaaatttcaacatcgcagcgtattgtttttcactcatggatacacctctgcttgaaatgttttcatcatatcatattcttctctgttggaaaacaaaaaagaaagggaaacatgtaataaaaaagcagcataccggtgccggcataccgcttaacttatcttgcgcgcctttgtgtatgaaaataataggaattgtgttctcgccatatagtttaatcaaacttcatcaatttatgagcaaaaatcttaatctgctgcgtcttatcatgattgtgataccaaccggatttcttgttacatgatatatcaaacataaagtcgttagatttatgttttggaaatccgtgtttcataaaatatatcgcgttatatattctgtcattacttatcctattattaaaaatggataaaacattttaataagccgttaaccttaaatatcaatatgatgtaacagattcaatataattataaattattatacatttttgtgtttttattgtcaacataacacgtcagaactctgtctgcgtgactgctacgcagcaaaaaacgctgttctgaacatcagaacagcgtttttattagcttaataaatctctacgactaatataggaagtgtgaagcaaatgatgtgctttttcactcaaaggttcacctaagaattctgcataaatctccttgattgcaggattttcatgagactttctgattggaagctgtttatccagctcataagctgcgtccagtctggcctttactttcttccaacttctgaccggagtaccgccgccgcctacgcaaccgccgggacaagccattacttcaatgaaatgataatcggctttgcctgctcttaccttacgaagcatttcgcgtgcattgctcaagctgtgaacaaccgctacttttacttccagtccatcaatatcaatgacagcctctttcaagccttctacgccacgtacctctgtaaagtccagtcttggaagttctttgcctgtaatgacctcatatacagtacgcaacgcagcttccataacaccgcctgtagcgccaaaaatttcaccggcaccgcttcccagaccaaatggtgtatcaaacggagtttcttccaactctttaaaattaatacctgctgctttaatcatatttgcaagttctacaacagttaaggatatatcaacatcttgatagccactgtcatggaactcaggtcttaagcactcaaatttcttggctgtacatggcataatagaaatgctgcaaatatcttttggatcaacaccggctttttcagcataatacgttttgatgactgcaccaaacatttgctgcggagattttgcggaagacaagtgatctaattcttttggagagaatgtctcacagaactttacccatcccggacagcaagatgtaatcattggtaatgtgccgccgtttttaatgcggtctaacaattcgtaaccttcttccataatggtaaggtcagcagagaagtcagagtcaaatacctgatggaatccaagctttttcatcgctgttacaagtcttccggggctgatagtacccgggtcttctcccaatgcttcggcaatggtaacacgaacagacggtgcaacttgtgcaactaaaattttaccgttgatgagttctttataaattctgtctgtatcatcatgaattgttaaagcaccaacaggacatacctgaacacattgaccgcagcctacacaaggtgtatctactgtcttcttgtcatatggggtaaccacaaccgtttcatatccacgattctgttttgaaaatgtaccaactgtttgtacttcgttacatgcctctacacaacgcgtacataagatacatttatttgggtcacgggtgatacatggagaagaattatcaattggaaaaccgcgtgtttccacttcgtaacgaagcggtttgttcatatttaaatcttgtgttaatttttgcagctcacatctgccgtttttaccacagaccaagcagtcttgcgggtgatgcgcaagtaaaagttccaagttatttttacgtgcatttaaaacggtaggtgtagaggtacgaattaccataccttccgctacaggatagctgcatgccgcctgaagcaaacgttgaccttctacctcaaccgcacaaatacggcaaacagatttgattttctggtcctcatgatagcacaaagtaggaatattgatatttgctgtacgggctgcctctaaaatggttacaccttccggcacttgcagcttttgaccgtcaattgtaatattaaccatgattaataccccctgtcgtgtccgcaaatggagcagtcattgccgtccaagtggcggttatatacttcttcaaaattctgcaagctggaaagaaccggaaccgcagtggaatgacccaagccgcacaatgcagaaacacgcatggtattggctaagtctttaatggtttcaatatcttttaacgtgccttttccgctggaaatatgacaaatcaattcatacaatcttgttccgccttcacgacaagtagtacattgaccacaagattcggaacggaagaaatccagattattctttacaatatcaacgacacaatttttatcattaatgaccaaaatggtaccgcagcccaatctaccgccggatgctgaaacatggtcaatatcaagcggtaaatcaatttgatccggattgataatcgcaccggagctgccgcctgtttgtacagccagcaattctccgtctgcgacaccgccgcaaacgtcatataaaatatcttttaaatttacacccattggaaactcaaatacgcctcttttattgacatttccgcaaacagtaaacaatttggttccggggctgtttggagagccaatactgcggtaccactctgcaccatttaacaaaatcggaggaatatttgccaatgtttctacgttatttaatgcagtaggtttgccgaacaagccttttgtacccggatacggaggacggaatcttggttcgccacgattaccttcaatagattcaaacaacgcagtttcctcgccgcaaacataagcgcctgcgccggaatgcagttcaatatcaaagtcatagccgctgcccaaaatatttttccccaggcatcctgcttgacgtgcactttccaatgcttcaatcaaaattggacgtatgtatggatattcagagcgcaagtaaataaagcctttatgtgcgcctattgcttttgcagcaattgccattccttcaaaaatactgtttggatcttcacttaacaaaacacggtctttgttggtacccggttcgccttcatcggcgttgcatacaatatacttttcatcgctttgtgtattataagcaaattgcagttttagatatgttggaaagcctgcaccgcctctgccgcgcaaaccggcatctttcaatacctgaataatttcggctccttccatggaaagcgcttttttcaatgccacataaccgccaacactcatgtagcttttggcatctgtaggaataattttacctctgtttctaagtaaaacgtgcatttcttccatgtctacacatcctctctgatataacgtttgatgatttcgcgcacactgtcgggagtgaggtcaccataagttttatcattaatcataattgccggtgaaacatcacagatacctaagcaaggacaatattccaaagtaaaacgtccatcttcggtggtctctcccattttaatgttcagctggtcttccaaagccaaaacaatttcttgtgcgccgcgtacatgacatggagcgcttttgcacattcttacaatatatttgccatgcggttttacggacagcatagcataaaatgtaataaaaccgtatacatgagtttgagcaatacccatttcacgtgcaattaccgcagcaactgcctcagaaagtgcaggaactactttttgcacttcgattacgacattcattaacatttcaggcctgtttttgtaaggtgcagcgattcttgcaacttctactaactgagcagcaggcgtagttaattcgtagcgattttctaccataattcattcctccttaaaagcgtttcattccggataaaagcatgtaaaatttgttttatcaatcgacaaatcactttgacacatttttaacagaattaactaagtaccatatacttttttgtacaataattatattatattctttagtaggaataagtcaacaagtccacatatttttctacttatatcctaattcatagtatgaatttatgacgttctttacaaaaaatcactatatttttgttatttttttaacaatttgaattgattataagcaaaatatacgtaaaaataaaaaagaacaccaatatttggatataccaaatgttggtgttcttacaagataatcaataaaaatggaattagtgattaccgcagccacaaccagaaccggattcctcttctttatgagagccgccgcagcaatcatcatgacaaccgcagtcatcgccacagccgtagtcgtccaatacatcattgatatcaaactccaggcattcaccacagtttgggcaatcaatttgaccttcttcgataatatcttcagagaggcaaattgtttcttgacagtttggacaagttacctcgtaataaaactcatcatcgtcatcttcgcagtcttcacagcatttatcttcttcgtaaaagtcatcttccaaagtgcataaatcttcatctacagcatccaattggtcagccatatcttcgtatgcctcttccaaatcagaaatggacagtgccatatcctccaataaggtcaacatagcatctaacacttttacttcttttttatctgtgtccagttctaaaccttctgctaaaccacgaatatatgcaactctttctaaatttgtcataataaacaccctccttttacttggtgaaagctttcattttgttagcaaataaaaacgatatcttatgaattaagcacgttccatatattcgcctgttcttgtatcaatacggattgcttcgccttcattgatgaaaattggaacttttacttcagcacctgtttccaatttagccggttttgtaacgtttgtagcggtatcgccttttacacccggttctgtttcagtaactgtaagtaccacaaagtttggtggctcaacaccaaatacattacctttataagacagaactttacattccatattctctgttacaaacttgaagttgtcaccaagaatatttgcattaatcggaatttgttcataagtttcgttatccatgaagtaatataaatcgccatcgttgtataggtactgcatgtccttacgctcaataaaagcagttggatatttatcatttgggttaaatgttttttctgtcacagcacctgaaatgacatttctgattttggtgcgcacaaacgcagcacctttacccggttttacatgttggaactcaataattgcatatacgttaccctccatctcaaaagtaacgccgtttctaaaatcacctgcagatatcatactatatcctccaattatatttctaccataacagtttatattattttgcaaaatatttcaagatatatccgtgaataaatcaaagtatcagcagttcttttgaagaacctgtcaaattttcacatccgttttcttgaatcaagaccatatcctctattctaacgccgaatttgccttccaaataaattcccggctctaccgtaatgaccattcccggctttgtaattacttgacatgccggagcgaaataaggccattcgtgaatttccaacccaaccgcatgtcctgttgtatgtccaaatgttcctgcatagtttacatcaataatatcccttgcagctttatctaccagattacaaggaatgccggatgtagcagtttgaattgctgcaagctgtgcctgcaaaacggtttggtagacttgtttttgtgcttcacttacggtgccatatgctacggttcttgtcatatcggaatgatatccattgaccacggcaccaaaatccatagtgataaaatcacctttttgaattttcttatcagaaggaacaccatggcacatagaaccatttgtccccgaaaccacaatggtatcaaatgcaattttttctgcaccttgttttctcataaagaactccagttccaatgcaatttctcgctctgatttattggaatcaatataatccaaaatatgggtaaatgctgcatctgtaatagattgagccgctttgatattctcaatctctttttctgtttttacagcacgcatttcttttaacaaagtatctaaagtggtatctttgacaggtactgcattccattgtttacagacagtttcgtaaatgtctgcttgtgccaatgtcaaatgttcatgctccagcagtacaccgcgtatatcgtgacggcgaagaatttcttcaatgcttttggctaatttttgatataccacaactttacagtctttgacctgcatgcgtgcagcttccccataacggaaatctgtaagcaaataagcaatttctcttgtcacaaccactacacgggcagatgcatgaaacccactaatataacggcagttttcttctgaagtaataattgcggcatcaatgggtacaccatttatttcctcgggcatagtttgcgctaatatttcccaattcatcataataacctccctgtgagattttatttcattcttgccagagcttccaatgccaacaaatagctttctgctcccagaccaccgatttgtcccgcacatacaggggcaataacagatttgttacggaaatcttccaaagcaaatagattttccatatgcgcttcaataaaaggaatacgcacacattgaatggcgtcccgaatggcataactgtagtgggtaaatgctccaatatcaatgacaactccgtcgtacagctcggcggaacgatggatattatcaatcaattcgccttcccaatttgattgcacaatatcacaacatatgtttagttcacttgcatgcgccttcatatgcaaaaccagtgaatcatatgtttctgcgccaaccgtgtctttttctacttctcttaaaatgttaggaccaaacaaaactaaaactctctttttggccatatgtttcacttcctatcatctctgtgatgctgatgcattttatggtctgactttgtatattggtaaatgccttttcgatgaatgcgtctgcgtatgggagattctattttacggcgtactcggaatgtaaaagaatgttccatatcttttggcgttaataaaatagatttcatacctgccgcatttgcgcccaatacatcggtaaaaatttggtcacctactaccacaatttcctttggcggtaaatgcaaatagtgcattgcttgtttatagcctttgggaagcggtttaaatgcacgatataaataaggtaaatcatatttggctgcaaattcggatacacgttttttaaaattgttggaaacaataattactttaataccggccgcacgcatttcatgagtccattcgatactaccttcaaacggaattgggcatccatgtctggataacgtattgtcaacatctaaaatcatgccttttactttcataacatgaagcatttccggtgtaatatccgtaacatgcttcactgccagtgtagggagtaatactgccattgtcgaacctccgtttaaaatgctgtaaatagtcaaaaaagcgggcatagttgcccgcttttccattttcattcatttgtttacttaaatttacgtttgcgagcagcctcggatttctttttacgctttacagaaggcttttcataagcttctcttttgcgaacctcagcaataacgccagctcttgcacattgctttttaaatcttctaagagcactgtccaaagactcgttatctttgattctgatttcagccatttatcgtttccctcccatccgccaccaggcaggggtaattagtattcaataacacaaaaatattatacagagaaccgtaacatatgtcaagcattaactgataaatcttttctaaaagacgacatattttacataaaatttatttcaaaaaggcattgacttcaaataaaaaaaatggtaacataatacacgcgtcatataatctttgacaattgaatcatataggggtatagctcagttggtagagcagtggtctccaaaaccacgtgccgagggttcaagtccttctgcccctgccaaaaaaattcagacctgtatttcatatacaggtctgttttgttattctataataccaaaattgaattcgaatgaaaatttcaaaagctagtaacctttactattgaatttctcatcctatttatatgttaaacaaaatacaatgcttatatacgattgaaaattctttatgaatttataactcctgcaatgctcttgatataaggttagttcttatttccttttagaaattcaattgcataattgcaacatttctcccagtcttttttggataaacgcttaaaaattgactgtagatcaaaagcatatatacctacataataatcaaaataaatttttataaattgaaagccttcatcaaaaccaatcaaatttctttccccaaatgtctttttaaaacatttctcaaattcaatgctcatcgcaggatcggcagatctagaatctacgaaaacaaaaggatccattgcgctcaaaaatacttcgaatagtccacctttaaactcttcttcatattgatcataaaatctatctaatagaaaaaatactgcataatataactgttcttcatttaacttattcattcttcatacccccatgttaaataagatttttttggattatttttcaaacctgtagtttcattaacatcttttggcttgtcatttacaccaccatttattatggtgtggtcacgaacttctgcccatacttgtgtgccatctgaacgggtctgcgcataccaagcatgtcctctgctatcagttcctacataattttgcgggtcatttgctacgctttctatcaactcccgatttgcaggagtatccggaagatgtcctttatcattcctaagtatatgcattaattgagacctattggaatgtagcttgtttgttctttcacctccggctcttcccatacctttttcagccagcacataaccatatcgtttaatcactatactatgattctgcggtaaagcttcttcaccacaaatgcatgccgcccacttggataaatgattggtttcttcatagtctactgtaacaatatttccttccatctcttgaaacggttcaccataacaaatgatacgctcaggttggagacgttttaacatttcttcataaccttgcatgaataacgttttttctttacgtactcctactgttgagactgctacaaaagaaccagcttctacaccatcaaagcaaaaccaaaagctttgcggttctccccaacacattgtgggaattacagtaattccgtttgattgcaaataagctcccacccatcgattacgaaaggtattatatatttgcaatgtaattggcatttccgtatataaactatattgaggtgtcaatactgctttatactgctttaacttttccaatcttggttcaggatgattccataaaacctcaaatttataatcatctaaaaagaaatggacaacagaatctttattctcacgctcatctgatttaatatgatcatatccaatgaatcttaattgttcaaggcttatatgttgttttttcacaataggaatttgaaatgttccttctccctcaaattggttcctcaaaaagaggggattatttctaaatgcttcactggtcaaaaaatcactccttatattgacttgagagaacaatctctctactataccgtaaaaaaaacagtgatttttcgcctgcaaagggaaactttataaaatattgttatataaaattaaatatatctgtttttatatcgtaaaaatccgactgtcaaaacagtcggattccttatttttattccaaagaaacagattgattacactgtaccgtgatagccgtatttctccatcgaaaacatttatagtaaataaataaactaaaggcggtagcagcccatgtaattggataaacaatggcaattgcctgaacactgttccataacggtacaataattgccaataaaataatacgcaatatacataaatgactgattgatattaccataggaataaaagaggcgcctgcccctcgaacagtacctgacagcacttctattgcaacatagataaagtaaacgggagctgtaatcataagaatttgtataccgcattgtatcacttcaagttctgaattaaacattctaaataaataataacggctcaacaatacaattgtgcttactgcgattgtacagcttacacctaacaaaaggcctatttttaccccctttttgacacgctttaattgtcctgctccgatattttgaccaacaaacgaagtcattgcctgaccaaatgccaaaataggcaaatacataaagttttctactttaaaataagcagtaaatgcagccattgcgtcttgtccaaaaccattgatataaaattggaccaccatattggatatggttaaaagtgaagattgtatacctgcaggaactcccaatttcacaatacgcatcatttgttttttatgtatacgaagtcttttcaaatgaatacgatattctctttttgtactgaataaatgaacgacgataagaactgcggataatgtctgagaaattgttgttgcccatgaagcacctgccactccccatgaaaaaacagcaacaaacagccagtcaagaaacacatttaatattgcaccggacgctaaatagattaggggtctttttgcatcaccatatgctcttaaaatcgcacttcccatgttgtaaagaaccattggcagtatactgataaagtaaatacgaatatagctgacggagagctcaaaaatttcctgcggaactcttaaccactgtaggatgaacggtgataacagtagtcctgcaatggtaagaacgatgccccctatgccggccaaagacattgccgtgtgaacagaatcctgtaaatttttataatcttttgctccataatattgagcaaccacgacacctgcacctactgaaatgcctgtaataaagcctaccagacaggtgagcaacaagctgcctgagcccactgccgcagaagcactcttgccaacgtaattacctataaaaattaagtccacagcattgtataacagttggataaaactgcttcccaataatggaagggcaaaccaaataagcgctttgctgatgctgccatttatgagcaaatcttgtttactgcatttttgcttcattggtgatactccttcctgttttcatgaacaaaaataattatctttattatatcgtaatgatggtaatctttgatagacaaagttatgaccaatgtccagtatatttgattaatttttctcaatgaggaatccccctgtatggctataaccaaaatacagggggactttctgattgattttataggataaacgacaccggaaaatgattcaatacatcaaaaatgacagagtttgatttttcgcatgaaattttatctctgcttactatttgaaatcatgaattttttctatataatatagaaaaaagctatgagaggttctttatgaccatacaacaactaaaatatgtaataaaaactgtagagtgtggttctattacagaagccgccagacaattatttatttctcaacccagtttatcggcagctttaaaagacattgaaactgagtttgggattgaaattttctaccgtacttccaaaggaatatctttgtcccctgatggcattgaatttctgtcttatgcgcgtcaaattgtagaacaagcggaactgctggagcaaagatataacaataaaaagccttctaaacagctttgctctgtttctacccagcattatgcatttgccgtcaacgcttttgtcaatttgatttcttccctttctgcggaagaatatgaatttacattacgtgaaaccagaacatatgaaattattgatgatgttgcaaattttcgcagtgaagtagggattttgtatttcagtcattttaatgaaaagatattaaaaaaaatgctgatagaaaaacatctgtcctttattcccttatttgaagctgaaccgcatgtctttatcagttctgctcatcctttatcccactgttcggaagtttcactggaagacttatcagaatatcctttcttggcgtttgagcagggaacttacaattctttttacttttcagaagaaattttaagcacagagccccacaaaaagacgattcatgtcagcgacagagccactctgttcaatcttctgattggtttaaacgggtataccatttgttcaggtgtgctgaacagcaatttaaacggcgataatattatttcagttaaattaaaaaccaacgaaaccatgaaagttggaattttaattcacaaaaaggctcccctgagttctatggccagcgattatatcaaagaactaaaaacattgattgcagcggacggttatactatactgagctaattagaattgatactcttttcttagctgtttggcagcttgtaccatatgctccagactcggttttgtttctgccgtacctctggttttcaaaccacagtcaggattgacccagagcttttcttttggaagcttttccagcatcaaatccaaaacttgttttatttcttctacagatggaatgcgttcagaatgaatgtcatatacaccgggacctacctgagtttgaaaatgattttcttgtaaagcgtcaagaatagcaagattagaacgtgacgcttcaaatgttattacatcagcatccatatcatcaattgcagagataatatccgtaaattcgctgtaacacatatgtgtatgtatttgtgtttcagctttgactctgctgtgaaccaaacggaaagccggaatggcccagctaagatacgcttcctcccactcggattttctcagcggaagtttctctcttaatgcagcttcatctacttgaatgactcggataccatttgcttctaagtccaatacttcatcacggattgcgaaagcgatttgataagcacattcttttaaagaaatatcctctcttggaaaagaccaattcaaaatggtcaccggacctgtcaacatacctttcatcggtctatctgttaagctttgtgcatatacagaccattctaccgtcatagacgtttccctggaaatatctccccagataataggcggcttcacacaacgtgtaccataagactgtacccatgctttttctgtaaacaaaaatccattcagacattctccaaaatactctaccatatcgttgcgttcatattctccatgtaccaatacgtccaatccaatatcttcttgcagctttatacattctgcaattttattgcggttaaactgtacatattgttcttttgaaatttctcccgctttgaatgcctttcggtttaactttacatcggatgtttgcggaaaagaacctatcgtagtcgttggaaacaacggcagattcagaacctctttttgtatttgttctcgtgctgtaaactcaggcagtctgacaaaatcgttgtcttgaatagccgcgacacgttcttgtactgcatgattgattccgcttctttcttggccgaacagttggcaattttgcagaaattgctctgtttgataagtattctcttctaaaatttcttttaattcttgtaattctcttaatttttcttcggcaaacgcaaaatactttttataatcttgggaaagcttattttcatgttccaatgtatatggtacatgctgcagcgaacaagatgtacttaatacaatctcattgcaataagtctgcaaggtttctatcaagctgcaagttttcgcatacgcattgcgccaaatattttttccgtttatcacgcctgcaaacaaaattttatcggccgggaacccataagtttggattaactccagtgactttactccctcaactaaatccaggcccacaccatcaaaaggaagcgaacagacctcttgatagcagtcgcgtatatctccaaaatatgtttggagcaacacatgaacagaatgtttgactgacaaaattttgctgtaaagctgatgaaacagcgctatatcttcttttgacaaatctcgcaccaggtacggttcatcaaattgaatccactgagctccaatcgaatgaaattttgttacaatatccatatatgcaacgacaaaatcatcaatcacatcttcttgtgtcttgcttcctgagaacttcaataatttcagcaaggtgaaggcacctaagatgacaggctttgtttctattcccagctcttttgcctccaaatattcatcaaacgcttttgtgccgcacagacatatttccgtatcatcttccaattcaggtacaatgtaatgatagttggtgtgaaaccatttcttcatcgccaatgcttttacatctccatgttctccctgatatcccctcgccattgcaaaataagtatccaacggagataagcccaacttccggtaacgggacggtatgatattcagaagtactgcggtatccaacgttgtatcataaaaagaaaaatcgttggagggaataaattcaatgccatgttccagctgcgttttccagtgcttcttgcgtaatctatttgctgtttgttttaattctgtttgctctatggtatgtttaaaataagcttcacttgcaaattttaattctcttaaggtacctattctagggtatcctactactgataacttcatatttttatgtcctttctgttatttttttcattataacacgcagactttatgataaagtaatactgatatttgatagataaccatagtataaaactatggttattattttttgattattcaatgttaatataaataacaatataatcggcatttgtattgttaaatatgtaaatatcaagcacaaaaggaacaaaattacagtcatttgtattaaaataaaaacggcgtccaaagacgccgttttcttctgtctgattcacttttgactgatctgactgattgcatgtaagcaagattcacaaatacaaacacttttatgatgaatgatcatatggtttaactgttcaacttgtgaacaaaatacacattttttatcaagcggatgcagtatcatacgagtaccttctaattccagagaaaattcatcaggattacctaatttttgtctgatagtagaaggaagcatcaccctgccaagattgtccagtttttccgtatacaataagctgtccagctcaaaaaaggaaatggatttatgatgccccacagcataatcaatcacttcttttacaatatcgggctggccatcccataatgcaatgatatggtcgcattgctcgcagaattgttctattgcttgccatttattttcacattcagccaaattttttgtaacaaagcgaattcgatttacatctgcatattgaacaatactttgatttaaatgctccggcactgaagatattacttttgtagtattttgaggtattaattttgcaaaatttattttttgaaagcttgcggaagatataattgccaccttcattgaaatctatcctttcaatacgtgaatgtacagtaattataatctattatcactggattttcaatcatatttattgtaaaaaatatactattactgtaataactgtaagtaatattttgaacctgttatgattaacctaacaatgataggcggtgaatcaatatggaattacatgaaattttgtcaacactgagagaagaaaaagacatgaaacagcatgaagttgcagaaaaagttcacgttacaaaatcagctatttccagttatggaacaggttccagccagccttcatattctgttcttgttgctcttgccgacttatatgacgttagtatagattttctattgggaaggacacaaatgagattgccttttcactactttgaacaaggatttaaaacagaaaccggtgtatttccattaaattcattgtataatctatcctgtacaaataaagatttaattgcaaaacttgtaattatgttatatgaaaatgaacagtatcgaaaaaaacgaaagaataataaaaacaattagttcaaaatcaaaatagaaaaaccgccctatccatttaagggcggttttctttatgtttgtctaatccatataactctgtgcagaacgatctaccaaatccgctctgtgctcaaaaaaacgattcagtaaatagaacgccataacgcataataaaatacaaatcccgggaggcaaataccaattaaatattcccctggaaaaccctcctcgcttaaaagcaaaattaatcatgcctccccacgtgacatgagtggtatctcccagtcccataaaacttactgaagcttctgtaagcatacattgtcccacagataaaatatattttgcccatatgacatctgatacattgggcaaaatatgtttcagcataatacgccatttgggtacacccaatgtttgcaatgattcaataaaaggagcgcattttacttgtttggttttggctctgaccgcccttgcggttgaacaccatcccaacaaagagatggatagaatcacattttgaactcctgcccccaggtatgcagccaagataatcgtcatgggaagcatgggaattaacaaaaatatatgaatcaatccatttatcacttctcctaaccatccttgaaaataacctgcggcaattcctaccagtactcctacagccagtgaaatgaacgaagcggtaattcctacaagcatagtggtagatgccgcataaatcaattctgataaaatatcatatcccatatcattggttcccaaccaatgggaagcactcataggtgcccaaggttcaaacatgtctttcggagaatatggagcaatccactgtggaaaaaaggaaaacaatgcaaatataagcataataaccgctcctatgataacggaaggagtcatccataccaaatattttttatgtttcattgtttacaccaaacctttgcctaggatcaactaaaatacaaatcacgtctgttaatatgtttcccaatattactaaaagagcaatgaaaaagaaacagccttgtagggtaggataatcgcgaaagacagctgcatcataaattaagcttcccatgccatgaatggaaaaaataacttctgtaatcatggagcccgaaattaaaaaaccaagatttaatcctaccatagcaatgaatgattggcatacatttttaaaaatatgaataaaacaaatacgattggtggataatcctcttgcctttgcatatatcacatatttctcttctttcgctgcagcaacagaattgcgtaccagcaaatatttattaggagtggagaccagcgttacggttaaaacaggcaaaattaaatgccaaacgcggtcccaaaaggagaaaaagccgttggatgaagcattggtagaggttaatcctcccaaaggaaaaatatccagttgaaaactaaacactgtaaccaacatcatggctaataaaaaagtaggaaccgcatccagaacgataaaaccggttgtaattccactatctaattttgtatttttacggtaacccataatggtacctagtaccaaagccaaaagagacgataatattaatgcaggaattgcaatcattaacgtagaagatatcctctttttcaataaattactgacactgtcattattatgataggaaaaccccaaatcaccttgaatcaaatgaaggagataatcgccaaattgttgccctaacggtttatctaaccccagttttgtttcatactccttcattttctcttcactcatagaagactcatcctgacctgtcagcatcaatacaggattgcccggcataattctgggaaggaaaaaattaattaaaattacaacaaataaacaaatcaaactgctgataatacgacgtatgatttgttttctggaacgtatcaataaaacttcccctccttagttttccgaggttgttctgttttccaattcattaccgccgtatgataggtaatatcatccgtgcacattccatttttggaattctttgataagtacgtataaatgatatcgcgatgtttgggttggttgtatccaaaaatatcaaaataaatccgatatcgttccatagcttcttccagtggtatcacagaatgggacacagagtgaaaaaattgtatattggggtatctgcccaatgcataaagcaaatgaaattgatatatgacatccggtgataatcccttcagcggttggtcggtaagctgcattctcaattgtcttctcaggcttgaagatgaatttttggcaaccgaaaccaaacaacaatgatttttagacaaacgttcaaatttcatcagactttcataatcacaaatagcaggacacattgccgcaaagacaaaatcatattgtttattttcaggtaaattttcaaataaagactgacgatacgtaatattagttattttatcttcctctgcgcgctgtttcagcacacatagcatttgttctgacatatccacagcggtaacatgtttataattcgcagcaaaatttaatgtgtatgctcctgttccgcatcctatttccaaaacttcacactcttttgactgttcttcttgtgcatttaacacagaaatgatattttgtgtcataccattactctcatttgcgttttggtgtttggcgatatgattccagtaaatattccatttagaatactgctccattctctctttttgggtacaaccaatttgctctgaaagcaaatcagagattacttctatattagatttcatacctatattctcccaataaataaagggatgtgaacagtaattgcgctgtatcacatcccaaacattctattctgttacttcttttgtgatggaataccatgtatccatatttaacaatccaaaggtaccgtcaacggtaaaatcatgaaagtcgctgttgtatgcttgtataaattggtcccaatacattggaattgcaggtacattttctgcataataacgctgtacatccgctactaaatcagcgtattcgtcactgttagacgttcccattttatcagccaactcctgaaaagcagaatcattcacatttgccatacctgttttggaacggctatccatataaggaacacctgcaccttgtttcataaccattccccaaggtgtagcacgtgtcagcatggctacatgaccgcgttcttgttccgaaatggttctgaactgtgctgtatctactgatttttgaactacttgaatcccaacttctttcagattagccgtaatcaattctgccattctggcataggtgggtttatcggttctgactaaaatttctaattccaaatctttaccgttgtattccaaaattccgtcttggttggaatctttggcccctgcctgttctaaatactgttttgatttttctatgtctcttgttagcttctctgtatcaatatacccaaaagagccttttggaatgataccaaaattacctgtggttgcatattccgtaccaaacaatttagccatttgttcgtaatcaatggcatatgcaattccttttctgatatctgcattgttaacgggctcagcctgagtattaaaatacattaaagtaatgccggtgtccggaacaacttgcagtgtaatgtctttattactttccaatttttttgcttcgtttgcgtcaattccgttggcatagaaataaaccatgtcaatttcgcctttttccaaagccatatataatgtatctgtatttgcatataatttcacgataattttatctacatttggctttccgtcaatgtagttttcataagctttaaattctaaagttccggcactttcatcaaatttgacaaactcataaggaccattaccaatagctgatttctcatctgtaaatgtttccaaatctgttacatctttaaaaatatgttccggaagaatacggaatgtaaccaaatcaatcggtaatcttgcattttctgtttctgatacaaactctaccgtttggtcatctacaacacgaattgtataattcggaaacgtattctgcaattctgctgtaaacttcacatcttgtgctgtaacgggttctccgtcatgccaagtcactcctttacgcaactgaaatgtccacgttttattatcctttgtttcaaagctttcagccatgaacggctttaaatctccattttcatcttgttttacaagcgccatatgtgtcaatgtacccgacaatacatcaaaatcatatgtctctcgactaatggaggtaatcttcattgtagtaccaatcaccatcgtatcaatttgttttgttgtgtcggctgctccacttacagccggttcattcgatgcacttgaagtattctcttgtgttccgcaccctgcaaatatggcaacacataaaatggttgccataatgaatgagagtattttccattttcctttcatctttactcctccaaactaaaattttatgtaaatcacgtaaagtgtttacgtacctttcattaaactgagcatgccattttgcaaaccataaactttactgcaaaatgcttttaccaaaggaagattatgcgatataaaaataaagctaacattttgttcttttatcaatcttttataaatttgtatcacttgtgcctgtgcggaaacatctagcatagatgtggattcatctgcaataatcagctcgggtgatactgccaatgctcttgcaattacaacacgttgcgcttgtccccctgatatttgaccgggataacgcgtaaagatatcacgctctaatctgacagaatgcaataattgataagcgcatgtttgagcctgttttttctgtttaaccaatttatgtacaaataaaggttccataatgctgcttccaaccttttgtttgggatcaagcgacagatatggctgctggggaatcagctgaatttgcgtacgaaattctttttgaaatgtt

SEQ ID NO: 1987 - DNA, 10888 bp, Unknown
  16S sequences of unknown bacteria
ccgcccccgccgtacacgccgccggggacgattgaagtgcgaaagggctttgcccttctttgctttttcgacagtctggggcgttgacagagtcaacgcccggcacgcgagtgggcggttattccgcctgaatcaggtagtacatgctgggcatggttttgcccagggagattttgaagcagccgtcttcatagcgggcgggaactttgcctgtgaaatacccttccgcgttcacggcccagcaaatcagatctttgcgctgggtgcggatggagatctccgtttcgatcacttccacggtgatgggcggcttgccgtaatcgtacatttgctcgccttcaaagcgcgcgtcggtgttgcgcgcgcgccccacggtggtcaggagcatgttgtccgacgattcgatgggagcgtcggtgagggaggagagcgccaccacggcaaaatcggtttcggaagcgactcccatgccgtttaggcggatttcaccgtttttgcctaggaatccataagcgactttggtccgttccgtgtcgatggtgccgtaattctttttccaactgcggtacatttcaccggtgatggaagtgatttcgcccttttccagatccaccagcttttcatcctgcgcaaacaccttgtcggcctggccgctctccacgccatcgaagcacacgccggttttggtgtattcggcggcgccagccatgccgctgagctgatagttcttgccggccagctccgtgacgcgcacggcgtagctggtgggcgcttctttcacgtcgccgcggcgggcgatcagcgctgcatggtagaagaggccgaacttggcggggtcgttccaggtggagaagatgccctcgcgatagggcgtgttgccaatggagctagaagaaacttccttgcccaggatgttcatgtacatcaggcgggtgccgtacgcgtaggtatggatggcccagccgtcccagccctgcagcgcgcctaccgcggcatagagaatgctgctctccgcgcggaactcattgggccaaggcatatcccattcggaaacaaacagcggccggttgagcgcgcgcacgcaaatgccggcgctttccatgccaaaggtgggggaatgggtgatggctttgttcatgcaggacttgacgcgctcgccccatttccaatcgtaataataggtgtgcgaatccatgtagtcgtttaccatctggttggatttggttacggcgccgttgatgcaccagttggtgccgcaaatggggattttcacgcccacttcgcgcatgtaggcgtacatttcccgatagaaattggcctgcacctcgattttgtattccaccagttcggggatattgtcgtcgttgaggtcttcgatggcgtccacatcgatggttttgtggttcttggcgcaccaggcgcggaagagctcgcggaattcgcttacgtagggttccaccttcaggcgctcgcgggcgaagaaatcccgttcgttgatgatttcgctgagcacaaacacgggatcgtctttataagcgaggcctgtgtaggggttctggtggttccagatatcgtggatgaatttcttttgcaactcaatcaggcgggcgttgtaatagcaataggggtcggcggcgtccttaagttcgtaggggttttccacaccgtcgccggatttgaaattccggtaggtgttcatatcgagatacacgtaaatgccctcgtccttcaggcacttcaccaggtaatccaggcgcttcatgctctcaggatgcagctccagcgtggaaccgatgcgctcgcccttggagaaggagaagatgttgggcgtgttccattcagcatccaattgatggaagcgcacgatgttcacgccggccttggccaggcggcgggcgactttttccgaatagtcaaattccgggaaacaggcgccgccattgaagttcacgccccaaaagcgggcgggcgtaccgtcttcaaaggcgaagtggctgccgcttgctttcatgaagccatgcttgccagcgggcttttcctggcggaatacgaaggaaatgtccacgggcatgtcgtcgtaatacgcggggaacgggatgtagcgtgacatagtatgcgcctccattttttcggtatcgtgcattcgctgggaatgcgggttcgcgcgcggctttgcgcgggaacatcgggcaacattcttccacgcagaattgcatttccatatatagagtaagcgatgaaatgcggcggaaaatggctcaaaaaatttcgaaacgaaaatggaagagccaaaccggtaatctgcaggaatgcgtaaggattcatcgaaacctcgcctagattataccgagtacctagaggaaagtcaagcaaatcagataatatttcatcgagaaattatttataaagagtattgacattctccggagttgtgtatataatttattaaagtgagaatgtacacagagttttgtcagaaaaatttcgaaaataaatttgcgggtttgttgcgagaatagagggaatgcgaaactttttcccatgggatttttgctcaggaggaagcgagaagaacctgagccaaaaatagatgattgaaggaggttcccaatctatgaagaaactcacggccctagttctggcgctgtcgatgctgctgggcgcatctgcccttgcggaagaagcgctggaaatgagcgacgtcccgggcatgaccgcccctggcgtgctccccattgtgacagaacccgtgaccttgaccatcggcatccccacgcatacgctggttaccgactatgaagacaactttatgaccaagatgatcgaagaggaaaccggcatcgacctagagtttgtgttttatccttcggcggaaaccgccacagtgattgacctggcgctggccagcggtgatgaactgccagacatcattgtgtatgctttcggcaacaacacggccagctatggcgcgcagggctatttccagccgctgaacgagtattttgagaaatattcgtatttcttctgggaagcgcctggcatggaagaatctgactatgacgcatatatgctccgtacggcggaagcggacggcacgatctacggctattcgtattataccaaggccacgggcgatcaggtgcgcatcaatccatatatcaatcggtattggctagaagcgctggatctagaaatgcctaccaatccggatgaactgtatgaagtgctcaaggccttcaaagagcaggatcccaatggcaacggcgaggccgatgagattcctatgattggttcccacaacgcatggaacggttattttgatgaaatgatcatcaactactttacgtattacaacaccgactatatgctgggcgtggaagacgatgtagtatacgcgccgtttgtcacagaggaatggcaggaagccatgatttacatgaacaagctggtgagcgagggcctgctttccgatctaagcttcaccatgacgctggatgaaatggtttccatgattcagagctatccgccggaagagcagattttgggtttcatcgtaggaattccggtgcacacgttcccggatcccagcaccacttccattttggcctacgacgcagttccgccctttgaggacgcttatacgccggaacgcacggcaaatgtcaccaaatacgcattcatcactgccgattgcgagcatccggaggttgcgttccgtctgttcgattattttgcacaggagcgcgtgtcgctgatcacgcgctatggcgagccgggcgtgcacttcatgtaccgcgcggacgatcccgaagccttcgacgctatgttccccaacgcaacccaagccgcaatgagccttgggtgggaaccgatttatgcggaaatgccgggcgttgtaaatccgtgggtggaggagagcaacgccatttgggcggtgcatatgtgctgcatgttgcccgcgataacttatggttcgcaaggcactaccacgccggcggacgagtttgttactagctggcaggagggcgtggagcgcggcgacgttcaggcgcacagggactacttaaatgcaaattcgttaaaatggctgggtcagttgccagagcaactgttcgttgaccccatctacacactggaagagatggacatgtacaacaccaccatcactaccgtcaagagctatgtgcgcgagtgcatcgcggccttcgccacgggcgcaatggatccggtgaacgactgggatgcctatctcgccagtcttgacgccgccggtttgcaggattggctggatgtcgcccaggcgtactgggatcgcagccacgccgcgtaagccgtaaggaatttgatatgccgcgcccggcgcgttccgggcgcagcaatataaaagtaaggaggttcccgatctatgaagaaactcacagccctggttctggcgttatcgatgctgctaggcgtatctgcctttgcggaagaagcgctggagatgagcgacgtcccgggcatgaccgcccctggcgtgcttcccatcgtgacagaacccgtgaccttgaccattggcattcctacgaatacatttgttaccgattatgaagacaactttatgaccaagatgatcgaagaagaaaccggcatcgacctggagtttgtgttctatccctcgacggagaccgccacggtgatcgatctggcgctggccagcggcgatgaactgccggacgtcattgtgtatggctttggcgataatacggctagctatggcgcgcagggctatttccagccgctgaacgagtattttgagaagtattcgtatttcttctgggaagcgcccggcatggaagaatccgattacgacgcttacatgacccgcacggcggaagcggacggcacgatctatggctattccttctataccaaggcttccggcgaccaggtgcgcctcaacccttggatcaatatgtactggttggaagcgctggatctggaaatgcccaccaacgcggacgaactgtatgaagtgcttaaggctttcaaggaacaggatcccaacggcaacggcgaggccgacgaaatccccatgatcggcacgcatggcacctggaatggctatttcgatgaaatgatcatcaatttcttcacctattacaacacggattacatgctcgccgtggaagacgacgtggtgtacgcgccgttcgttacggaggaatggcaggaagccatgatctacatgaacaagctggtgagcgagggcctgctttccgacctgagcttcacggccacggtagacgagctggtttccatgatccagagctacccgcaagatgaacagattttgggcgtcgtcataggcaacaccgcgacgactttccctgataccacgaatcctgccattttggcgtatgatatgctgccgccctttgaggatgcctatacgccggagcgcacggccaacatcacgaaactgtgttatatcaccgccgactgcgagcatccggagattgcgttccgcctgttcgactattttgcgcaggagcgcgtgtcgctgatcacccgttacggcgagccgggcgtgcactttatgtaccgcgcggatgatcccgaagcgtttgacgcgatgttccccaatgcttcccagaacgccatgaaccgtggctgggaagcggtgcatgcgcagatcccgggcgtgaccagtccgtgggtgacggagaacaacgccatgtggaacatccatatgtgctgcctgctgcccgcggaaacctatggttccagcggcagcacgacgccggcttctgaatttgtcactagctggcaggaaggtgtggagcgcggcgatatccaggcgtatcgcacctacttgggttccctcactggcgcgtggactggccagttgccggagcaactgtttgtcgatcccatctatacgctggaagagatggacatgtacaacaccaccatcaacaccgtcagggaatatgtgcgcgagtgtatcgcggctttcgccacgggcgcgatggatccggtgaacgactgggatgcctatctcgccagccttgacgccgctggtttgcaggattggctgaacgttgcccaggcgtactgggatcgcagccatgccgcgtaattggcgcaactggatggattaacgcgtcgcgatgcccctggaaggtgccacgctgtgcggcgatggaatttggcggtggctggcagcttctgggggccgccttttaacggataacccagcgcattggtttcaaaattcggtttggttgaatggcggccccattcctctttggttttctggccctgttccagaaaaagttgacgagtgaggagagaagattcatggtaaaaggcgttcgttctggccggcccagcgctttgcaaaggtcactgcacatcttccgcagaaggtggcaattgcatgcgtttatgctgattcccctgatttatatcatcatattcgcgtatgtgcccatgtttggcttgcaaattgcgttcaaaaattatacgattcgcgcgggcgtgttcggcagcccgtgggcgggattccgccactttgagacttttttcaattcgttccatttttggcgttccctgcgcaacaccattgtgatttcgctgtattccctgtgcgtgggcttcccgatccccatcatctttgccctgctgatgaatttggtgcgaaatttgcgcttccgcaaggtcgtgcagacggttacgtatctgccccacttcatttccacggtggtgctcgtgggtatgattgtgcaaatgctgaacccggttacgggcctgtatggcgtgctctataaaatgctgggcgggcaaggctatccaaccgcgcccacttccattcccagagcgttttatcacttgtatgtatggagcggcgtgtggcagggatttggctggagctccatcatttatatggcggcgctggcgggcgtgcccatggaactgcacgaggccgccatggtggacggcgcttcgcgcctgcggcgcgtggtggtgatcgacctgcccacaattatgcccaccattttgatcctgttcattatgaacgtcggctctttgctgggcattggctttgagaaggcatacctcatgcagaacagcctgaacctggaatattccgagattatcgccacgcacgtgtataagatgacgttccaaagcaccagcagcaccaagtattcgtattccaccgcggtgggtctgttcaattccgtggtgaactgcacgctgcttttgattgtaaactttatcaccaagcgcctgagcgccgataacaccagcttgttctgatggaattgccgaggaaaggaacggtgcaaaatgatgcaaaccgcaaaaattcgcgcgcggaagcggcgcaggaatgaaaacgtgatatgggattccaggagcgacaggattctctatgccgtggcgtatttgctgatggcactttcgctgctggtggtgggctatccgctgctttatgtgctgtccgcctctttttccaacggcaatgccatccaaacgggtaaagttttcctctggcccgtggatgttaccttggcgggctatgaggctgtgtttaagcaccaactcatcgtgagcggctatatcaataccattttgtataccggcgtgggcacgtttttgaatgtgtgcgcaacgatgatctgcgcctatcccctctcccggcgcgatatgcaatggaaagggttttatatgttcatattcgtgttcacgatgtatttcggcggcggcctgatccccacctatctaacaatcaacaatttggatttgatcaatactttctgggtgatggtgctgccgggattgatctccgtgtacaatatgatcattacgcgcacatttattcagaacaacattccgcaagaaatgttggaagcttcgcagattgacggatgctcggatttccagtatttttattatatggtgctgccgctttccaaggcggttatcgcggtaatcacgctgtattacgcggtggggcattggaacagctatttcaacgcgctgatctatctcacggatcgcgaccgctatccgttgcaaatcatcctgcgggaaattctggtcgccaatcaggtgaatttttccgaggtgcagggcatcgatccggagcagatcgccgcgcagaattctttggcaaaccagctaaaatacgccttgattatcgttagctgcgggccgattttgctggcctatccgtttgtgcaaaagtattttgtgaagggcgttatgatcggctcggtgaagggctaatcgctagtggactgccgcgcaacgtaaggagggttctttatggaacaggtaaaaattggatgggcgtcgcgagatatatcgaccacaaagccggtcaacattcccggccagttccacatgcgcatcagcaaaggcgtgatggatcccgtcacggtgaacgcgctggtgctggatagcggcgaggatcaggccattttcctctcctgcgacatcgtcgtgctgcgcaatggtttgcaggatttggtgcgcgaaaagctggcccagtgcgcgccggagatccccgccatgaaaattttgatgaacgccacgcacacgcacaatggccccagcctggaacggggaaagcgccccttcgactacggcatggaagtggcttcttcggatgaaaaccgcgaattcgtggcggaaatgtgcgtgcaggccgtgcgcgaggcgtgggaaaagcgcgcgcccggttcctatgcgtatggctatggctacgcggtggtcgcgcacagccgccgggtgtgctatttcgacgacgtttccaagcggcctggcgcggtggtgaattccacgcatggcgtgaacggccatgcggtgatgtatggcgatacgaacgacgagaatttctcgcactatgaggcgggcgcggatcattttgtcaacctgctgttcacgtttgacgaaaaagaggaattgaccggcgccatcatcaatgtgccctgcccgtcgcagaacacggagaatgaatactatctttccgcggattattggaacgacgtgcgcatagccatccgcaagaaatatggcgatatttatctgctgccgcagtgcgcggcggcaggcgatttggcgccgcgcattttgcattataagcaggcgcaggatcgccggttccgcttgaaatatggcgaaagctttgccgaaaaggggctggaacgcaccgcgcgacaggacatcgccgagcggattgcggccgcctttgatgaggtatacgattgggccagcaaggagaaaaagcgggaagcgcgcatcacccacgtggtggagacggtgcagctttccaaacggctgatttcggacgaagaatatgcctatgccaagcagggatacgcgcaggaaatggccaaagaataccgcacggatggcgacccacaggagcgcttgttccaaaattccgtgttatatagcctgcgcaaccgctataagggcattatcgaccgttatgaggcgcaaaaggaacagcccaagtttcccatggaactgcatgtgatcggcctagacgacgtcgccttcgccagcaaccaatttgaactctacatggattatcagcaccgcatccaggcccgcagcccgtttgtgcagacctttgtcgtgcagcttgccgggcagagcggcgaaggcggcggcagctacctgtgcacccaacgcggctttgaggggcgtggctacagcgcgagcatgtattgtaacctggtttcgcctgcgggcgggcaggaattggtggaggaaaccgtgcgtttgctcaaggaaatccgcgcctcccaggaagaatagtatcctaaaaattgctttgcagagcgtacacaggcgcacgcacgggaaataaaggtcgattgggtttgaatcccccggcatgtgaatatattgaaacgaagcagtgatggctgggaggaacgcctgtgaaccaagaacccgtgtcgcgccctgtgcgccctgttttccgtatcgctctattgagcatccggcccaatccgcgccaaccgcgccgcgcgttttccgacgatgggattgcggaactggcgcagtccatccagcaatatggcctgctctcgccgctggtggtgcggcgcacggctccgggcgaatacgaattgatcgcgggcgaacgacggttgcgcgcgctacaacttttgcgcgcggaatttgccgacgcggtgattttgaacgcgcccaacgcggaggcggcgctcatcgcgctgatcgaaaatttgcagcgcgaacaactcaacgcgtttgaggaggcggaagcctaccagcgcatcttgggcgagttcgcgatgacgcaggaagccctcgccgggcggctgggcaagagccccagcgccgtggccaaccggctgcggctgttgcggctttcgccggagcagcgcgaacgcatcctcgccaacggcttgagcgagcggcacgcgcgcgccctgctggcgctggatggcgaggcggaaagggatcgcgcgctggatgtggcgatcgcccgcaaaatgacggtgcgcgattttgaagcctacatcgcccagcagaaaaagccgcgcggccaggcgaggcgcaaaatggtgattcgggatcatcgcctgttcgtgaacgcggtgctcaacacggtgaaggacttaaaaagcgccggcgtggcggccagcgcgaaagtggtggaaaaggaagacacggtggacgtggtcgttacgctgccgcgcatttgggtgcggtagcggcaaatgaaaatggcaaaccgctgattggcggtttgccatttcagagtattgacaaagtcttggaagaacgaggctctcatcagaaatgacggcgtgtacgtcatttctggcattttttgcagagcaaacgcttgcgtttgcgg

SEQ ID NO: 1988 - DNA, 11012 bp, Unknown
  16S sequences of unknown bacteria
cttttcagctgacggccgttttgccacgacatgaccatgccgtcacggtagcttaagggatttcctatcttgtcgtaggtgaagttaaaccccttgccgttgattcttgccgaggaaagctgatccgaccattcggtgttcgaatagccgaagctgtcggaacggttggcttttgcgtcgacataagtcttgccctgaagggcctgaaccttatagaaattccgctgataaatattgccgtcttttgagtagagatattcgattttttcgccgacgaccgccttgctgctttggctgcccttcgggatgtttatttccgaggtgagtctgccgagctcgtcataggtgtattcgttgcggagattgcccgagtcgtcggagattcgggttatgtttccgttttggtcgtattcataattaaactcatatgacccgccgaaggaatgagacatgaccttgccgtcggttcggttgccgacgcggttatagtccatggtttcgaaaaccgatttattgctgccgaaggtatatttccttgcctccgttcggttcagctcatcgaaggtgttttggacggaatatccgtcaaaattcaccttggaaacaagtccggttccgtttacataagtgtaccacgaacccctgctgccgtcaacggttttataccttgaaccggatatgcggttgaactcgtcatagccgacgtttgcgccgaatccgtcgccgcggagaaagctgcttattctgccgatcgaatcgtagataaagcttgtctccacattgctcccggtggtgctgtcgcaaaggtagcttaaatttccgaagccgtcgtatttccagttggccgcgacgaaggaaaaattcgaggcggttatcttggtgacctgggtgttgcggagatatttgtcataagaatagagaatactgtcgccgtttccgtagacgctcttttcaagggtgttgttgtcctcgttatagacgtttttcatgagggccgtgccgccgagctttgtggcggtgcggttgccgaatccgtcatactcaaaggaatagtcggcgccctcggcggaaatgccggtcaaaaactgtttggtatatgtataatccgcccgagcgcttgtgccgtcggttttgcccttttcgacgaccgtcgaatcgagtttgctttttccgccgtaggtgtattcggtggaggagctcagcccgtccgcctttttgaccctgtcgtcggcggtgtattcatagtttaccgtaccgtccatggtggtgaccgacgttgtgtgaacgcccttttggtcataagttgcttcattctcgctgtaaagaccctttccgtcgtctttggcaagcagagtgaatttctgctgcttctttgtgtgggcggtgtagacatacatgctcgggtagggatttgaggaggtggggtctggagcgtcgagatgaagattttgcgcgctctttggcgtgaaggtgtatgttccgtcggaattttcctcaaccttccacagctgatccgagccgccggtatagggttccgaggtcacctccgagcccgacgacgtgccgataacgcttaaagcctttttcgggtagcttgaggggtgtatggaataccaatcggcgccgtttaaagaatgctttataaattcgaaggtctgattgtccgaaaggtgaggggtgtagtaggttaccgcagcccctgccgaaccgtcgttgtttgaaaggtcgacagccatgttcttttggcaggttattatgtggtaataacgccccgatgaaagcttggaggaaatgctctttgccgaggtcacattgccgtttgaatcgtatttataggcatattctattccgtcggcataggtggcgtttattcggtttttatcggttttgtcatagatatttacatacctgctgccggtggggtttaaggccgacactaccttgttgtctttaaagtcatattcggctctttgctcggcaaggtccttgaccgaaataaggttgccgccgtcgtcataggtgtaggacggggtcgcgtcctttatgagctgaatgtcgtcgaaatatgcttcgctgctgtttttgccgtagcggcaggttatctttatcttgtcgggggagagtgtgccgtcgtcggggtggcggacggtgaaggccttggtcataaactgccaatcccgattgtatctgtcgaatttaagaccgtcaattgtccttgacgttccgtttgaataggttattgttatgtctacgtcaaacttcgagccgtttgacacccgattaccgtttttgtcggtggttttttcgggaagtccgaggcttttgccgtatccgcttaaaatatatgtgtcgtttgcgctgcctttgacggtcacctcttggtaaatgcttttgtcggatttaaggtctcccgaaaggcgataggaggtgccgaaaaggctgtcgctttcgtttttgacatatccgtctcccgatgacgccgaaacggcggtccagccgctgctttgctccatgtcggaattttcaagaagattgagcgaaacggggctatcggttttggtgaacatggcgccgtcgacataaaccgtgccgatcgccgcgccctcaagcacaaatcccgccctgaccgtcttgctttcgccgagagtcacggtggtgaaaagccgctgccagtcggaggagggggtgtctatggcgcaaaagctgttccccgaaagggccgagaccccgtcggttatgctcagcccgaattttccgtccgaaaggctttcggcctttacatatgccgagaaggtgtatttgcccgccggcagggtcagtatctgataaagggtttgatccgagccttttgatgtgcggctcattttcatggaacggtttcccgcaaaggcctttgaagaatcggcggcataggacgcgcccgaaagatatttccaggaagaatttgcttcaaagctgccgttttttatgaggtttgccgccttgttcgcggcataggaggtcagcagcttgttgttctttgcaaatttcttctcggtcacaacgggggaatattcgttgcattccacgccgtagaactcgggggtcatgctgctgtcggtgagatatgcgttggttatatagtcgcttatcttttgcccgtagctgttgaaaagacaatgttcgtaaaatctgtcggaggcgcttgaagaaacgctgcccgaagggccggggtgggtgaaaagggttttgtcggggagatattcggcccacatgacggtttttgtcgagccgtcggcgctttcgtaaagagactgcagctttccgttggcatatgttatgccgagcaccgagctttggttgtttatttcgcttaaaagccagtcggaggtgtaggaaaaggtagttacaagaccgttgtggtggtttattttaatgagcttttcgtcggaatattcaaagctcaccgttctgccgtcggaagcggatattttggtcagcagatttcccgaatagacaagggaggccttacgccccgaataatctgtgaccgaaacgggacggtggtttgacagcgacaccgtcgttttcttgccgtcggtatactgtatttcgcaaagacttccccaagagtcgaaaacctttttggttccgtcttttagggtgattatatattgattaggcgagccggagggcagctttaaggtcatgccgcgtcccgcctcgtcgcaaagctcggctccggccgtttcttcgacaaaatatatttcggttccgtcctcgtcacggtatcttactttatacttttccgcaagaccgttgcccgaaacgagagataccgtttcgcaaatgttgagcgaccagccctttccgaaaccgttttggactcccttaaaggaggtgtcgttgacgtgcttaatgtcgacgccggggaaattgccgccgaaagcgatgtcgtcggtgatgtgggtgaccttgccggtgtattcgttgaaatagcttgtccccgagtggcccgagtcatagcttttgtacgaattgaagtcgttgagcccgtttgtgtttaggtaaacaatcataagctgcggacggtaattcttatatgccgagcctgcgtccttggagatgtatcttctggcgttgccgttgttctcgtatttgtcggcgacaaacataatgccgttgttgctttcgccttcataccatgctttgacggcgcgggtgatgtcgaaggtgtcccaccccgccgtgagacattcgacttcctttgtgtccatatatgccgcgtcgtatgccgtgttgaaatttatcgagccgttggtccagctgccggtgattcggtgtgcgtttatgcggtatttggtgccctttatgcccacaaggctgttgccgctgctgtcgcagtttccgtactgacaaagccccatgtatgcttcgcagaccttatccccctcgcgaagggcggggagactgtattttatataggttttcgccttggctcttttgtctccgccctcggttatttctcccacatacatgtgctcggtggtggtgtttttgccgagggtgccgtcggtctttttgtatacatatccgctggaaaagccctcctgataggttacttcggtttgaacaaccgggtcgataacgatcggaaaggctcttttgccgtcgcttatccactctttgcttggaacaagcgtcaggatatattcgtttttgttttttccatgagaaaggccgagggatacgttttccgaatgtgcgcccgccgcgtcatacataaatggggagggtatgacaaaaacggtttcgccgtcggcgtttttaaattccacggcgttgtctttaagctcgggagtcaggtctttcggataaagggaaaattcaaaggaagaaggggaggcggctttctttaaaattatgttttccttaataaaatccgaaataaccgagtattcgaaatccaccccgtcaaaaacatcggaatatgtaaccgacgaggaaatgttacgcagcaccgaggggtcgccgctttcatcggcgctttgggcagagccgtcggttttgaccgactttctttgagcgccctttatgccgaaggagagtttgtattcgtctttttttatgttaacaagtttttttgaactcgacttttttgcaaatttaattttgaaattattctgcgaattggaatagccttggttgctttccgaagcgctttggtctgatggttcgccgttctcggccgactcatcggtttcgttttcaaaggtgctttgcaccgaaatttccgtatcttcaaaagaggtttgttcgtcgttttcgttttcggtttcgtcatcaaaaagggaggtgttatcttctttaaggcggttgtctatctccacccattctccgtcctgctcaaaatggacgggattttcatactcggcggccatcattctgccgtcggacagctcaaaatgcttgacatacctgtcccgcagctcggttatttctctcacaatgcccggcggtgaagaaccgctgcctatttcgctttcgtcgtcaggaacaccgtatgaaaaaaatgcgccgtcgcttgctgcatataccggcgcataaaacatctgtaagcataccaaaaccgacatcaacattgctatacgctttctcatactctttttcatattattttccctttcgtaataaataaagttttcggtcggtcaaatattcagttgtcggaaaaagttcttatcttcaaaattatctacttttaatctctctaatgtgattgtatataaaaataataaaattgtcaatataaatttagataaattacaaaattgtaattgtgtattatgaagatttggtattctgcattgctttgcgaaaataaaatttttcaaaatttacggttaaagcggagtgttttataaaaaaagcaccgagccgagcggcttggtgtgttcgggtctgtgacagaaaaagcagcaccttatttttggtgagtggcgagtgaaagaaaaaatataaataaaaggagaaaagcggagagaacaaaaaaagacgattttcaaaagaaaatcgtctttttttgtggtgggccatcagggactcgaaccccggaccgaccggttatgagccggttgctctaaccaactgagctaatggcccgtatctaacggaccattgaattataccaaacggacatatgtttgtcaaggggtttgacggcaatttttcaaaaagtcggcctgagacgagtcagctttcggtagtattttttacaccgaacacaaaatatattatgtgggcgacccatacggcggcgagtatggcgcagggtatgtagagagcctttctaagcattattacaaagccgaaaatcatgagggccgacacggtagtcagtattttgattttggtcttttttgtcatgccctcgccctttacataggactcaaggttgtttttataaagctttgtgccgagaaaccagttatgcagcctttccgacgactgggaaaagcagaacaccgtaacgagaaaaaacggaacggtgggcagaatggggagcactattccgatgcagccaagcgccaggcaaaggcagccgacgattaaaaaaacaagtcttttgagtttcatttttctttccttttcagctcattcttccgtgctccaccgaataaatcctatctgcaattcgcatggtggatttgcggtgggagacgagaagaacggttttatcgttcttttcggtgtcgagagatttaagtatgattgcttcattcaggctgtcaagattgcttgtgggttcgtcaagcagcataaacggagcatcgtgcaaaaaggcgcgggcaatgcctattctttggcgctctccgcccgaaagggtgtcgcccagctcgccaacgggtgtgtcatagccgtcctttagggtcatgataaaatcgtgaaccgaggcttttttgcaggcctcctcgatttccttgtcggtggcgtttgtttttgcaatgcgaatgttgttttttatgctgtcgtgaaacaggtgggtctcctgagtcacaaagctttcggcgtttctcagactttcggtgttgattttcgaaatgtcggtatcggaaatgcggatttgcccctcttttgtgtcccaaaaccgcataaacaacttgagaagtgtggattttccgcttccggacgcgcccgttatgccgatgaccgaggctttgggaatgtccaccgacaaatcttttaaaataacgtctccgccgtaggaaaaggtgacattttgtgcgccggcgccggaaaattcaatgtcctgtccgtcgaatatttcctcgacggcgggactctcttccaaaatgtcgagaacgcggttgcctgcggcaaaggtgttttgaagtgtgctgccgaggtttgaaagggcgaccgttgggccgaaggagctcattaaagcgattgtgggaatgactgttcccgcaaaatcaatgctgccgtttttgtagagagcggccgacgcaagaagcattataagatcgaaaatcagaatgaccgttcccgtaacgccttggttttgtgacgcacggttcttcatgcgcttttgggcggccgacagcccgtcgattttcacgttcatttcctcaagccgtttttctccgcagtcatattgaagtatttcgggaagtccgcggagactgtcaagcacaaatcccgaaagctcgccggattctgtgcggaatcgaagcccgtcgccgccgcttatttttgaggtggcaacgggaattaccgctccgaccgttacatacgccgcaagggcgataagaccgagaagggggtgaaatctgccgataaaaagacagagaatgaccgaaaaaagaacggcaatcaaaacgggggagaccgtgtgggcgtaaaaaacctccaaaagctcgatgtcggaggtgataaccgaaataaggtcgcccttgtccttgccctcaagctttgcggggcaaagcctgcgcagcgcgataaagaccttttctcttataagcgccaaaagcttgaaggcgataaagtggttgcaggattgctcggcatagcgcaaaacccctctcaaaagggcgaacacgatgaccgaaacgattataaaggtcatggaaaagggagcctttatgcccgctgcgtcggttacggcatagccgccgaagattgttataaaggttgcggcaaggtggccagcaagccccatgaaaacggcaagggtcatatatcccgaaagcggctttacaaggcctataagccgtgccataactttaaatccgctgcgttttttcatgccgtctcctcctttttgaaattctcgagagcctgctgagcttcccaaagccttttgtaaactccgtcgtttttcagcagctcaccgtggcttcccgtttcggcaacggcacccttttccataacgtaaattctgtcggaatttacgacgtttgcaaggcggtgggaaatgagaatgacggtttttgtttttgcaaggctgtgtatttcacgcataatgtcgttttcgctttcggcgtctatgttggaggttgcctcgtcaaaaatataaaccgcgctgtcgtgtagaagggcgcgcgccagggcaagccgctgacattgaccgcccgaaaaattcgagcctttttccgaaagagcggtgtcaagcccgttttcgccctttaaaaaggctgcgaggttgaccctttcgagcacctgccaaaggacttcgtcgctgcaatcgggatttgccatgagaagattttcccgaacggttcccttgaacagatagcttttattgtttacataggtgaaatttttaagcagacttttttcgcaaatgtccgaaagctcacggccgcccaccgtcaccgagccggcatagcccttttttttgcccgtgagcacggccgaaatcgtggattttccgcagcccgattcgccgacaatcgaggtaaagcttcccatgggaaactccatgtttacccgatgaagaatttcgcggtccttttcataggaaaagcaaagatttctgcaaaccgtcgaacggtcgccgtcaatttgaccttcggcgttttcgggctcggtaaggtcgagcagacggaatattttgtcgcttgccgccatgccgttcatggcgatgtgaaaatatgaacccagcagccgcatgggaatgaaaaaatcggctgacagcaggattatcagcagacatcccgaaagggatacccttcccgccgcatatcttgtggaggccataatcactccgagagcggcgccgccgtaggcgataaggtccataatcgtaaccgaattaagctgcatggtcagcaccttcatggtgattttacggaacttttcggcctgttcgttcatttcccgctgcttgaattcatcggctcggtatatcttgagggtggtaagtccctgcaggttttcaaggaaggtgtcgccgagagcggtgtattgcccccaatatttcgacagcagcttttttgcccaccgctgaaccccggcgattgccgccggaatgaggggaacgcagacaagcagcacaacggcgctttcgatgttgacaaagctcagcacggcaaaaagagtgagcggagccagcatggcataaaaaaattgaggcagatatgcgccgaaatatgtttcaagctgatcaacgccctccaccgcaacctgtactatttccgaggtgccgaccttttcgttatagccggagccgagctttaaaagcttgcggtatatcatgccgcggatggtctttttgaccttcgacgacgaaagatagctcatttttcccgaaaggagagagcaaatatatttcacggcaatggcggcagccgccgtaaaaagaacggaagccgtgctttttgccgtagcggtgccctcgaacaaatcggccgagagccttgtaatgcgttccattattacgatgttggcaacaagggaaatccactgaaagagcacattccccgcaatgtattttttgctttggggaacggtatcaatcagccttttatttatcatcattgttttttctccgtttcaaatagcctttgcagatttttttaatgccgcccgtgaaaaacgcaaaaacagccgcgatgcaaagggaggctaatccgtatgtcagtttatccatgacccttaccgattggaggactcgatcatccgtttgagggccacaaagctttcagagcttacggcgtgctccatttcgcaggcatccttggcggcggtgtcgctgctgactccgaggcgcagaagaaagctttcgagagttttgttcttttcgtaaattcccttcgcgattttttcgccgtcgtcggtcagatgaaccgctttgtttttgtcgagataaaggaaaccctcacgttcaagagcctttaaggacaccgaaaccgtcggccttgtcaccccgaggcggtcggcaatatcggttccgtgaacctctcccgttttggaaagaagataaatgaccttaagatagttttcggtggttcgctgctgtttcatgtgatgctcctttcagaccggtattataaacggatcgccgtccacggacgtaaccttaaggtcgacgccgtagatgtcgtgtatgagctgctgcccgatgatttccttcgggttgccctgtgccgaaatttttccgtccttcatggcgattatttcgtcgctgtaatatagtgactgattgatgtcgtgaagaaccataatgacggttatgccgagatcccgattgagcctttttataagtctcagaatctgcagctgatagcgtatgtcgagataggtggtcggctcgtccaaaaacagtacgtcggtgtcctgagcgagggccatggctatccacacccgctgcttctgaccgcccgaaagctgtgaaaccggcttgtccctgtgtttcagcgtgccggtgatttccatagcgcgggtaattatttcccggtcctcctcggcgtttttggaaaggccgatgcaaacggcaaagaaccggagggatggtttgacagttgctttga

SEQ ID NO: 1989 - DNA, 31035 bp, Unknown
  16S sequences of unknown bacteria
tatcggagcgatgggagtcgatgaattcaaatacctgggtatagagtgttttcatagtacagcctccttgatcaaaaactatatggatcatgccatcaatcaccttgaatttagcaaattttcatagaaaagtatgttaactggttaatattttgagaaaatagaggaaaaaagaccgcattctgtaaatctctcaaaaaagcagaaatgacccttgacaaacagcgggaggtctggtattataataaagcactcgattcgtttatcacctgtgggggtgtagctcacttgggagagcgcttgaatggcattcaagaggtagtcggttcgatcccgatcatctccaccacaataatcctgttctgactttggttggagcaggattttttcattgtacagaaaaagaggactgtccccggatgagggagagtcctcttggtttttgccgggtcacagcggacggcggagccggagaatggtcatatccacttcggcatcccgggccacagcggagccggagtagttcagcgtaagaatggtggaagccggtgcgcggatgatgaaatgggacgatccgcaggcactggaaccatcggcgttggtcgcgaaatataccccggtttccaggtgtgccgttccgttatagctgggtgtgatctgcatataattcggcgtggagaacagcccggataccttgtaggagatcaggtagtagcctggctccagcccgatatgctccgggtcggacaaggtgatgttgccggtggtatccggaaccgactgcaccagcggaatcagcgaattctgctgcagggagtattcggcgttgtggaaggacgcaaatacattgtccgggacatccaccgagggcccggttggcccggtggggcccggagccccgggttctcctgaagatcctgccggaccggtcgggccagtggctcccggtgccccggcagggccggtgggtccggctgctccggttgcgcccgtgggaccagtggcccccgcagccccggtgggaccggtcggccctgccgcacccgcaggcccggcagctccagcaaggccagtcgctccggtcgggccggttgccccggtcggcccggggagccccagccgtccggcgggtcccggaggcccggtcacgccggtgggaccggttgggccagtggggcctgccatgcctgtgggcccaatagctccggtggggccggtcgctccgatagggccagccgggccggttacacctgttgctcctgtgggaccagtggcgccggtaagtccggcagctccagtcggcccggttgcgcctgtggggccagggaatccgagcctgcctgcaggtcccggtggaccagttgggccagtgggaccggtcgggccagtcgggccagtgggagcgttatatggcccggttgggtgcagaggggcacagtacggacagtcaggacagttcctgttgcaatagaacatgatggttcctcctttccaggcagtcacattccattctattccggatgggagaaaggcattcatgccgaaaagcagcttatcacccaaaataaaaaagcgccggtgcagataccgacgcttttttgagtaaggggaggatcaggagttggcagcctcgtccataacagcctgctttctgttttccagagcctgcaggtcgatggcaccggacttcagacggatcagagcgattacaacgcagacaacgcacatggcgacaaccagcagcataccggtcagatccatggtgacgaacaggttgtaggcaacgatcaggtcgcagataccagcgatgacgcagagcacattgaagatgggagtgggcatgtggatgacactttcattccactgcttggggaacttcttgacgatcttgatcagcgagatattctgtgcgaagcacatgaacatcgacgggatcatggtcagcgagacgatggaatccaggctgaatccgaagatgatcggcagaatggagaacagatagaaggtgagctgaatcacccagggatagccgctcttggtggtctttttgaagaagtcaggcagccagccgtcctgtgcaacccgcattgccgggtaacgcatcatggcgataccgctgatcagcgaggtggcgatggcaaataccgcgccgccgatgatgaagatcacatagagccagttggggaagatggtctgagcaaccagagccaggttcttgttggcgacctgttcgatgggaagaacgccggcagcaaccacagccatcaggccgtagatcagagccaggcagactgtgatgagcagtacgcccagtgggatagtgcgcttggagttcttggtgaccgacatcatggcgatgggggacatggtagtaccctggcaggcgaaggccatgatggacagggatacgatgaagccggaagcaccgccggcgaacatgccgtccagatcaaagaagccgggctgaaccttgggcaggcccatgataacgaacagggcgatggaggcgatcagaacgactgtcatcacattgttgatcttggaaacgaagctggagcccttgatggtggcggcaaagaacagggtgatgatgccgacgccgaccagcttggtgtattcgccgatgaccgggaataccatggaggcgtagtccgcgatggcgccgccgtacatggcgaagccgataccgcccatcatggtaaatacggcgcttacaccggtgagagtgggattgaagagcatagccttcatatcatagtcgccgccctcgaggacgaacatggagctcataaccacatggaagaaatacatcatgagcatgaacaaacatccaaaggcgacagagatgaagatggaacgactgatagcgacaataccggagcccatcatgacgaaggtaccagaatcgatggcatctccgaggcccagatggaagatgtcaaacaggctaaactgtttgcttttccataaatagagcatccttcagtatgaaacacagcccgaaagctgtatgaagcagcaaaatcacagattgtaagaacaatacaggaatagaaggatttagtatttctaactatctgacattatagaactatttatgaaaaatccaataaatattcgcgaattttggagatatatacgaaatgggaattgcaaattttgctataatactactttacattgcgggaattttgttttctgctcgaaaaaagatatggaagcgtataatacataaatcacccttttgctttgcaaaagaaaaagtcccgccgtggagcgggacttttgtttctggaatccgggtcagcggaatggggatcagcccttgtagactacgccgtccttcataacaaaggagcagtttgccatcaccttgatgtcgtccatgggagaggcatcaaaggctacaatatcagccagcttgccggcttcaatggtgccgatctgcttatccatcttcatcatttcagcgttgatgcgggtggcagcctggagaatgtattcggtggtgaagccggccttcttcatcagttcaaattcaaaggcctgttcgccgtgccggttgaaaggagtaccggtatcagtaccgaagccgatcttgacgccctttgccatgcacttcttcaggttctcatagtggttttccaggcagcgctctgccttctccacagcccaggcggggataccggaggcaacgccgttgactacgatgttgtgggcggcaatgatggtggggatcaggtaggtgccatgctctgccatcatatccatgcactcctcgtccatgagcatgccgtgctcgatggaggtgatgccggcccggacagcgatcttgatgccctcagcgccatgggcatgggcagaggtgatcttgcccttggaggcagccacatcgatgatagccttcatctcctcataggtcagctcgggagcgccgggctcatcgccgaaggacattacgccgccggttgccatgatcttgatctggtcagcgccatacttgaaagcggtacgggcagccttgcgtccggcatccggaccgtcgatgatctgaccgaaggcatgcttgccggttacgcagggcaggaagtgggagtcggcatgaccgccggtgcctccgatggcctcaccggagcaggagatgcgggggccgacgatcttgccggcattgatggcatcccggacagccacatcagaatagccctgggcgccttcatcacgcagggtggtgaagccagccatcaggtcacgctgggcatagatcatggagttgatggctgcagtagcgtcgctggtgacagcatactgcatggaagcctcgccgttcatgttgatgtgcacatgggcatcgatcaggccaggcattacaaacttgcccgagagatcgatcacttcagcgtccttgcagcatacatcggcagcaggagctacttctgtgatcttgtttccgtcaatgacaacggcaatgtccttgagaaccttaccggtattggaatcgaagaactgaccgcatttgattacttttttcatgatatggattctccttttcaaaacagggaaaccgcacagctgcagtttccctgaaatttgtggtattgaattttagaagataagcggggtaatgatgccggcgaatattaccgaagcaatggatactgttgtgaaaccgccaaccagcattctggggagcagtacattggaaacagcagccttttcctccgaagaggcgctcagggcattgactacatcatcggtaacgatctgagtaccggggtagcccatcagagcgcacataccgattgcgatcgacatgtaaaccgagtagcccaggaatttaccggcgatgatcgagaagatggcaataccgatggcaccgaataccagggtacctaccagcgggatcaccatgtccagcagggcttcgggagtaaccgaagtgaagctgttgggagtcagcgagtagaggcacagcatggtaaagccatacaggccggccttctggaggccgttcttaaccaggaagccaacttcaccaaagacgataccgaacagcaggtaagctacattggggttcaggtagtagttggtggggttggaaccggggataatggtcaggttggagatgaggtaagcaatgactgcaatgattgcaacacgcatggtgatgatagcagtagtctggtactgtaccggaccgtcgcccatcagatggatgctgaacttctttttcttttcagtgtctatcatcacatcggacggaccaatggcaagcaggtgcttgttgttgagcagatactcagattccttcttgagcatgaaggacgaaacaggcataccaatgaacatctggaaggatacaaccagcatggcgaaggcgccatattccggcttgccggctgcgacagccgcttcattggtgatgatcgccgcgatggtaccgccggcgatgggagaggaggcgctaagagcgtactctcttgtgaacagtatgctgctcactgtaaaggagatcagtgccagaccaacgagaccgattagagcgatggccactgtcttccattccgagagcaactgggaaatactgatcgatgtaccgagattgaccagcagcagcggaatcataaatgctgtcagcatggtcggcatcccggtggacgcgatcgagtctgtgggaatgatgccggtccaatatcctgcgatgtacacgatagccgcgataataattccagatatcagacctttggttttgtatgagactacgtctcccactgcgaatacaatcagaaacacagtcagggagaaaagtggtgtccacaagttttccatctcataacctccttcaaaaaagattttcttacactatatcactaaagcgtgggtttgtcactatcttttttcatactttggtaacattttgtacctacgcacgatttacatcgctaaagttaaaaatgcttgtgcaaaatgtagaaaatttgacagaacgagccaaatgttccaaaaacttttattcgcgaaaatcattaaaacttcaaataaacatctattgtatacgatctgataagatgtttaagatatgcggcccgacaatgggtatccataagttttatgaatggcagccattgccagaggcgcgttcccacatgggatacgggccggaaggtgctttttcagaaaaactcggcatatgttccggcaaactgaacaaatccgggacagtaaaaaaacagacccccaaacggaggtcagttgcagaaaggctattcagcggagtccggttctgtccggatttcacgcccgaagcggaactcgtaccacagcagcggcgtcaggaccagcccggcatagagggcaaaggccagccccgctgtgagcgggaaggagaaggcggtcagggcagtcatatcgctgtgataggcgccgacagtgatgctcagcaggactgcgctcaccatcagagtgttgaccatcagaccccggccccgttcctgctgggcggcccgcagagccatggcccagtcagcggcggaatcagcgggatgccgttccatggcggcaaagatggaggtaatgtcatagaccgcaaagaccaccagcgagagagctgccagaatggtgctgaagtcgaataccacacccaccagagcagagagcgcgcacattcccagcaggctgaacaggatgccgagcattccggcagcggcggcaggggagctctggagtcggcggcagcgcagcagcagatacagcgccgagatacccagcaggacgatcaggcagagcagatagtccactgtggagcgcacggcggtaccccggctctgggagatgccggcggtggtctggaaggtccagccggggaagctgttgatcagggcataggtcagagcctggaagtcatcatatgggatctcgtcggtggggtccagccgcagctggagcagccacaggttctcccgggccgaggacgggaccagggagccctccacagggaggcccagagtgtccgaagcggtctggatcagcgaggtctcggcgagctgttgttcctcctcgtcgttgaaaacggcatggatgcggtattccagccccacgccgcctcccagggccggggagatctccggcggcaggagcagcagcaccgcagccaggagcaggacgaacagtccggtgaacgcaaagattttccggcgattccgggtcagatcaatcatggcggacacctccatacagcaccgggtcacgcagggccggatatttggtcagggaccgcatcatggaatgggcgatccagttgcaggaaatatagtttgcggcgatgccagccagcacagcatataagaaggagtgcagcgactgggcagccacagtctgctgtccctggagcagaccagccagggtctgggcaggggtcagccaggtgagatcggtgacaaatccgctcaccgcagtcaggagcaggatcagcagaaagaccagggtggcatgtccatcgaacagggtggaataggtgcgcttgaatccgtgattgactgcgtaatccagattcctgccgcccaggagttccgccttgatgtgttcggcggtgttgacgctggtattgacgccgaagcccatggtgagcaggatgccgagcagtcccgacacggtgagctgaaccggctgcaccagcggtacaagaccggtgaaggcagccagggtgagttccagctgaataaccagagctgccaggcccacagcgccgggcagacggtagagggcgagcatgagcacagccagcaggatcagccccagaccggcagaccggcagagggtggtgagcatctggctgccctggaccggggagatgaccgagaagtcctcagcggtgagggacaggggcagggaacgggcattgatttccgcagccagacggatggcggaatcagcggtgaattccccggtgatgaccggctccaccggttcattgcgggtgtagatcaccgagatgagctggttgtccatccagacggagatattgcgtccggcctcagccagacgggcagcggcggcatcaaatttgctctgaccgtcctcggtcagggagagccgcacggaaatggtgttggtatcccggtcgccggaggcctgggcggagacaatatccttctcctccagcaggatttcgccggtgggacggccctgttcatccgaggcgatgccgtcccggacagtcagggcattgcgggaggtgagaactgaaacgatctcagggtagtcggactgggaaacgccgggctgattggggaagcgcaccagcagacggctctcctcagagtccactgtgacttccgcattctggatgccgaggtagtccagccgtttcatcaggacttcccgggcattgtccaggagctgctgttccgcaggcagaccggattcgggctgcagggccagttccagaccgccggtgagatcactgcccagattgaggtcatccacgccgcgaacaatggtccggactgtatcgccgtactggaaacgcagcccgttcacagtcagaagcccgaacaggagcattgctccggcccagatgaagatccatgctttttccagctttttcatgcctgcctcccaactgccgcaaaaccggatctgccggtataaaaacaggcaggacccggtgcggtgattctgtgaacattatattgtaaccataccaaaaagtcaatcgaacaggcggctgtcgtctgggcagaaaaaagcgtctgccataccggcagacgcaggaatttccccataaaaggatcagccatgcagaccatcggactgcagctgcatattttccagaacgatgtcatggatctcacccagggaagcacagtattccagtaccagccagggctcattggtatgatagtggatcttgatgagatcctcatcgcctaccaccagcaggcagtcgcccttgaaatgctccacaaaataatcgtaaatggcatcttcatccaggccggtgccctcaatgagcagctgggtatcaaatttgtattcgatcatggcaatacctccttattatagaatgtacagtgccttcagtatagcataaccggacatgaaaatccattcccccggcataaaaaacagacggcccccggaaaccgggaaccgtctggctatggggaacttacagaatgatgttggtctggtgaccgtccatccactgggcaatgttgtcaaagacaatcttgcagcgggcttccatcgactcagccgaggcaaaggccacatggggagttacgatggtgttcttgctgtgcagcagcgggtgagcggggtccagcggaggctcggtctcaaagacgtcaatgcccgcgccgccgagatagccgctgttgagggcatctgccagggcctgggaatccaccacagggccacgggctgcgttgataagcagagcgccggtcttcatcttggcgatggtatccttgttgatcatgccgcgggagtcctcattgagggggcagtgcagcgatacgatgtccgaacgggagagcagttcttccagggagacgaactcgatgtaatcgggctcattgccgcggacatggcgcttgttgccgaggatcttgcagccgaaggcatggcagagctcagcggtacgggtaccgatggcgccgacaccgacaatgccgacggtcttgcccatgagctccacacctaccagaccgtccttggtctgaccggcacggcagcgggcttccacctgaggcacattgcgcagcagagccagcatcatgcagaggacgagttccgacacagcctcattggaatagccggcggcattggaaaccttgacgcccttggccttggcagcttccaggtccacatgatccacaccggtgaaggccacatcaatatacttaaggttggggcaggcggagatcacttccccggacaggggcatattggcgatcataatgacatcggcgtccttggcacgctcgatctgtaccttgggattggtgtccttgggataggccttgaaggtgtgaccagcatcgatcagcggcttggcacaggcgttcaggacttcatccggcacgcccagcgattcgagaagtacaatattcatggcggtttgacatcctccttggaaaaattttgaggttctgagctaattataacacagccacccccgccgtcaagggtgcagcagccggatctgtaccgtatccggacggttttttgtattgcggaatcagggcagcagctcgatgcggctggtggcgatccgttcctggaatgcccggtcgtgttcaatcaggatcatggtggggcagcactccagaatcagattttcgatctgcatacgggaatagaggtcgatatagttgagcggctcgtcccagagatagagatgggcttgctcgcagaggcttctggcgagaagcaccttcttcttctgaccggcagagagggactccaacggcttatcaaactggacccgttcaaagtccagtttgcgcagcagggtgaggaaccgggtcagatccagctggtgctgtcgggcaaagtccgaaagactgccggagagatgtccggtatcctggggcaggcaggagaggatcaggccggagcgcagggtgacagtgccggtgtgggccaggggttcacccgcaagcagccggagcaggctgctctttccgctgccgttgggaccggtgagcagcagacggtcgccctgttggatctcaaagcgcaccggttcacacactggtctgccatcgtagcagactgcggcgtcctggacggtgagcaatgtgcggctgtggtaggtcaggggctgaatcagcagtttttcggcggtctcccggtcccggagcagggcagacttttcctcaatggcatcctgacgccgggcttcaatggctttggagcgcttcatcatcttggcagctttatgcccgataaatccacggtccaccggcccgctgccgaacttggcggattccgcccggtccgaccagtccgaggctctgcgtgcagagtcccggagccgccggatctccttctgaagccgctgggactgttcctcttcggactgctggcggcgctggaagttttccagccagtcggaaaaacgaccggcctgtacctccacgccggaacggttcagggagagaatatggtcggtgcagctgtccagaaatgcacggtcgtgtgagatgagaatatagcctttctggcgctgcagccagcggctgagaatttcccgtccatgggtatccagatgattggtgggctcatcgatcagcgggaagcagccctcccggaggaagagcgctgccagcaggatcttggtctgttcgccgcccgagagagtgcggaagggctgccagagcaggtcaggggagagctccagctgcgcaaattcccgcagaaactgccactgggctgcctctggagcaatctcctccaggacatcagcggtgagctgttccgggtctggaaccggacaggggaagtatccgaagggtaccgaggaccggattgatccggtatattcgtattctccctgcagcagacggagcagggtagtcttaccccggccattgcgcccggtgaagcccagcttccagtcggtgtcaatctgaaagctgcagttttcaaaaatattgtgatagctgcccggataggcaaaggttaggttctccactttgatcatggacatagaggaatggcacctccgatcataaaagggccagccgcgcaaaaaagccgcaggaacaacgattcctgcggctcggcaaaaggcgctttgtccccggtcagggcagtacaaaggcagaaaggtacggatcgtttttccagcagagcgcggcagtgcccgggcattgccgcttgttttcatttacttgcgggaaaaacgcatgtcagatgcacctctttttctattatagtatgaatctgtttccggactgatatgatccggagtcttactcaggtttctcgagaatcacaaaggatacaagggtttccttgtgaaggtagttttccagcttggggtctacatccacagtctgtgtattcatctgggaaacgacccaaccctcctccaggagcttgttgatccgcttgagatatatgttctcgttgatgtcattctgctctgtaaggtcacggctgttgctgatataaacgaccttctgcatcgagcgtcaccctttcggttcagatttacattcattgtatcacagtacccgggcaatggcaatctttactttttcacagctcacttcagatcggctgggacgcgggcgcaaaaagacctggagtgcaagttggagtttggcaatgaaatcagaccggctatggtcatcgctcccgatataaaatccgtgctccgcaggggcacaccttacttcttcacgattcactattacctattcacttccaaaaatcccgggcaggcagtacaaattagtgaaaagtgaagagtgaacagtgaataagtaaaaatcccgaacgctgctgcattcgggatttttgggaggggtggtcagtttagattggaaagggcgtgccaaacaacccgcaaaaggttggtagcgccgcggaggcgtcgcgagggcgcttgcaaccgagcagccgaagcaagcgtgaccttttgcggaagaggagaaatgacgaagcggtatgagaaaagcccggtctttggccgggctttttgaatggagcgcagtccattccgacgtggtgccggtagtgggggtcgaacccacacggtattgctaccaccggattttgagtccggcgcgtctgccaattccaccataccggcgcataatgctgtactatattatacaatagccattgtcccatttcaagtgaaattttctcccgctcgctgtccgccgcagcccaaaggcagcgtgaatcggggaggtttggatggaatagacgaaaaagccggattccctgtaagcaagattttgcaattttagtcttgcaaaaattcaaaactgcgtgtataataggaaaaaatcaccgaaaggcggcggaataaatgaaagaataccgcgaaatgacttcacaggagctgacagccctgcgggaagaactgcggcaggagtacagtgagatccaggcccgggggctcagcctcaatatggcacggggcaagccggacgcagaacagctggcgctctccgatgccatgtggaccattgtggatgcctccactcccatggtgggagaggacggcatggattaccgcaactatggcctgctgttcggcacccgggaagcccgccgcctgatgggagagatcatgggagtgagctgggagaatgtcattgtcggcggcagctccagcctcaccatgatgtatgataccctgatgcggggcctggtgttcggcatgctgcactctcccaagccctggtatgagtgccccgaccgcaagttcctttgcctggtgccgggatatgaccgtcactttgccatcacacaggatctgggctttgagctggtgactgtcccgctgaccgaagccggcccggatatggatctggtggaagagctggtaaaggacccgtcggtgaagggcatctggtgtgtgcccaagtactccaatccctcgggcatcacatacagcgatgaaaccgtgcgccgtctggctgccatggaaactgccgccccggatttcaccatcatgtgggataatgcctatggcatccaccatctctatcccgatgccccggatgagctggcagacatctttgccctggctagggagtatggacatgaggaccgggtcatcgcctttgcctccacttccaaggtcacctatcccggagcaggcattgcggctttggcggcgtccaaggccaacctggaccacatcgctgcccacatgacccaccagaccatcggtgcggacaagatcaacatgctgcgccatgtcctgttcctccaggatctgccccatgtaaaggagcacatggcaaaacatgcggcactgctccgtcccaagtttgagctggtgctccggatgtttgaggagcagctcagggagccgggtgtggcccagtggaccaatccccggggcggctacttcatcacctgtcaggtgccggagggctgtgctaagaaggttgttcagctctgtgccgaagcgggtgtgatcctcaccgatgcgggcgccacccatccttataagaaggacccgcaggacagtgcgatccgcattgcgccgagctatccgcccatcggggaactggaagaggccatgaaggtattctgtctttgtgtgcggctggcagcggtggagaagctgctgggctgttgatcccggtcagagaaacagcaagataaaatccctcgggggcaatgcgatccccgggggattttttacaggaatgacgcatggaatttgcccggatttcacagaatttcgccaaatttgccgaagaacaggcatccgaaaaacacagagctgaaaaatcgctgaaaatcaccggaaaatattcacagtcggttgaaatttctgctctgtgtgatagaatggtagggatagaaaacacaggccggaaagcggcacaggaggtggatcacagatgggtgcagaccctggaagttgcaggatacagatgcagaatacagccaggggagcccggaggtttctctggtattgaggaggaatcgcagtgatcaaattctataaaacactggaaaaccgcatgaccgaactgccggaatacagcgaaggctgctgggtatcggcagtatgtcccacaccggatgagatccggtatctgattgaacagctgggtgtggatgcccagtatatcagcgcggcgctggatgaagaggagagctcccgtatcgaaagcgaagacggtcagactctggtgatcatcgatgtgccctatatggaagaggagcaggaggaaaagaccgttgtctataccaccacttccatcggtattatcctgacaccagcgaacttcatcaccgtatcggcccgggaaaccctggtgatcgatgaatttgccgagggacgggtcaagggagtacagacccatctcaagacacgcttcctgctggcgatcctgctgcgggtagcggcacggttccagctctatctgaagcagatcgaccggctgtcgctggcgaccgagacccagctgcaccgctcgatgcagaacaaggagctgttccagttgctgggcctggaaaagagccttgtatacttctccacctcgctcaaatccaatgagctgaccctggaaaagatccttcggggccggatcatcaagctctatgaggacgaccaggacctgctggaagatgtgctcatcgagatcaagcaggccattgagatgtgtaatatctactcgggcattctgtccggtaccatggatgcctttgcctccatcatctccaataacctcaatatcgttatgaagatcctggctgctgtcaccatcgtcatggcgatccccaatattgtctttggcttctatggcatgaatgttgtgggattcggcggcgtgaccatgtttgtgcccattgcggtcactctgatcctcatggcactcagcgctgtgatcctggcaaagctgggcatgttcaaataatctgattttgtatggaatttcggcggatgccggacatcttctggggaggtgtccggtttctgttttattcactttgaaaaaggagagtttgccaatgaagtatgtggactgttctgctccggtgcgggagtatctctgtcaggcggacccggtgctgggcgctcatatccagcggatcggggagctgtaccgtcccatgaaggacgatctgttcacagccctgtgcagcagtattatctcccagctcatctccaagaagtcagcggcgacggtctataaccgtctcactgaaaaatgcggcggggcgatcaccccgcaggcgctggctgagctgacccccgaggagatccagaaatgcggcatgtccatgcgcaaggcggacaacctcagccggatcgcccattcggttcttggcggggaaacagatctggaacacctgcataccctgtccgatccggagattgtgcgggtactgtctgccctgcccggcgtcggggagtggacggcccagatgctgatgatctttgccatggggcgtccggatgtcatcagctataaggatctgggcatccgccggggcatgatggcagcctatggcctggaaagcctcagcaaaaagcagttcgatgccattgtgaaggcctaccacccttactcgtctgctgcttccatctatctgtggcacctgtccgatgaagtgaccggcagtgtgggtctggcacagatcaactgagaaaagaggggatacaacaatggaagaatcacgatccggctcgctgcggcaggcagctgcggcggcctttccgctgaccatcccggtattcaccggcttcctggtgctgggtatggcatacggtgtgctgatgcagaccaatggatatggtgcattctggtccaccctgatgagcgctgttgccttctgcggcagtatgcagtttgcggcgatcaccctgctcaccagcgcctttgaccctgtcgcggccctgctgctgagcatcatggtcaatgcccggcatctgttctatggcatctccatgctgggtaagtataaaggtctgggcaggaagcgctttttcctgatcttcggcctctgtgatgagaccttctccatcgcctccacagcccagccgccggagggagtggaccggggcagtttctacttctttgtgaccctgttcgactacctctactgggtgggcggcaccctgctcggcggtctgctgggcagcgtgattcccttcagcaccgagggactggactttgcgctcacagccctgtttgtagtgctgttcctgggccagctggagaacgccggcagccggatctacggcctgatcggtacagtctgctcgctggcggtgctgctcctggcgggagcggataatatggtgatcccttcgatgattgtaattctcatcgtactgctgatcgggaggaaacggatatgacactgactgcttcacagacattgattaccgtactggcagtggcactgggctgtatgatcacccggtttgccccctttgtgatcttcccggacagcaaggagccgcccgaggtggtcacctggctgggcaaggtgctgcccgccgccatgatgggactgctggtggtctactccctcaagggggtttccctggtcagcccgccccatggcatcccggaattcctggcgatcctggtgatcgtcctgctccaccggtggaagcacaacactttgctgagcattgccgccggcacagcggtctatatgctgctggtacagactgtattctaaagaaaaaatccctccggcccactgtgagccggagggattttctgtttgccggggaatgtttcccggttcggggattcagcgcacgggaaggctccggcggatctgcaggagcagcagtaccaggctgatgcccagcaggatatgtccgatgcctgccatgcccgagatggcggcgtccatgccggaggtgaggggagagcccagcacctgggtgacaccccgtaccacaaacatcagagcggtgagattgaggccggtgtggtacactgccagtacctttccggtgccggagccggtgaaggagaagttcttctccagcaggagcagcagcagaaagaccaccatacccagcaggaaatagtgggtatgcaccaccgaaagggtggttttgccggtgaaggcgttcagcttggtgaactcccggtagaataccccgcccgccatggcgagaaccgaatagagcagggcacagttcatatagcgtttcattgattggaacctcctttaccggcactctttcttcatggcacgatagccgatggatacagtccatacataggcacaggtcttggggatcatcagcatgcccatcaggggaatggtatcagcccacagcaccaccgggatatagaagccgaagctcagtgtaatggtgagccacatccagcggaaggcggcgtcctggtgttctctggcgctgcggtagaacaggacgatgatcaccagtcccagcagggcaaaggggatattgcggtagatgccccaggagaggggaggattcgcgctgagccactggttctggggcatcaggcacaggataacgcgcagagccgcaagcccatagaccgaagcggtgagaaggttcttcccctggatatggtagcgctgccgccagacatagtagagcagcacatagaagatggtcatggtcaccgaggtaaccagcttgccgatgcccagggcagcggtgtagttttccaggccggtggtgcagagagccacggcccggggaaccagatggaacgagtcaccggaacccagcacgactgccatgatgccgaacagccggaactggggattgcccttgcatccgcggatcatgcggacaccgagggtgatgacggtggtgagatagacaatgtcaaacagagtttctgcaatagcctgcataatggattctcctttttattggtaagatagggtttcagacagccgctgaaacagctctgccgtaattttgaccgaaccgcagtccagccagcagcagggaagcgcccagaccggtatagaaaacggcgatgaatgcttccggcgccaggccgctggcccgcagaccgattccgccggtcatcatcacagccattatcacgaaggacttccggtcgaagaaccggaggaaaaagagccgttcatcgggataagcgccgattctggcggtatgttttttcaccagctttccaaagaccgcctgttggaataccgcaaacaccagtaccgaaagcagggtattccacagggtgagataggcgggataggccgccagaccgatccggaggatattggctcccgctatgccccacaccagcgcggcgaggaacagcagggtgtttcgttttactttcatgctctgcctccttgtgtgaacattgttcagtttcccgggtaaaaaattcccacaccggggtgggaatgtcaatagagggttctgcggacaatttccagaacagcggtgggatcgtagtcctgccgcagcagagcggacagcatcagggaaaacagcacatccgcaaacttctccgctgtgaactggtcggtgaaggcatcgggccggacccgggcatcccgtttcaggaccagacacagtccgtccaggatatgctgccaggtctgctgcatccggcgttttccatcggatttttcctcccgcatgaatcccagggaatgcagggtgaaaaatcccggatactgccggcagccatactccatgcgctcatacatccaggtgacacaggcttcggtatcccggaacacagcttcgtgatcagggagatggaagatctcacaccagacgctttccactgtggcgcccaccagttccgccttggagtcgaagtagttgtagatggagcccaccgatacaccgcaggccgctgccaccgagcggatgctcacagtggaccagccctgctgccggatcagttcccggctggtctggaggatccgttccttggatgtcacgactgtattcacgcagtccgctcctttcttcaatctgaacaatgttcattatacgcacagaccccttgtctgtcaaggggaaattgcaaatcaagccctcccattctgctggaagttcctggggaagtcagcggggacggtcattcttatgggcgttctggtaggcttcccggatgccatccggcaggttgtccggaatcatggccttgatccggttctcattgccgtcctggatggcctgctcatagtaccagcacttgaatttcagcatgtccagcacctggttcatgcgctccatctccgcctccacctgccggcgctgccgttcaaacagctccttgcgctggggataggtggaagccccttccatgcaccagtccatgaactgcttgatgtccttgatctccagtccggagcgtttgaggcactcgatcacactgagcgcgtcaatttcggtatcatcgaatttgcggatgccggatacccgggtcatctccgggaacagcccctgcttgtcgtagtagcgcagggtggagatgggcaggtcgaacatttcggatacttgaccgattgtatacataggcagcctccaaaaaatttttctgaaaaaactcttgacctaaagtcaggtttaggtattaccatgattatagcagaaaagaaaccaccatgcaagatgccagaaggaggattcccatgagcaagaaaatactgattctttcgtccagctaccggaagggcggcaattccgaacagcttgccgcagcttttgccagaggcgcagaggaagcgggacatgaggtggagacgatctatctccgggataaggagatcggattctgccgcggctgtgtggcctgcctgaaactcgggcactgtgtgatccaggacgatgccgtggagatcgctgccaagatgcatgacgcggatgtcctggtgttcgcgaccccggtttattattacagcgtcagcggacagctcaagaccatgctggaccgggccaatccgctctatggcactgactatgcgtttaccaaggcgtatctgctggctgctgcggcagagtcctcgcccagtgcggtggagggctcggtcaaggcggtacagggctgggtggactgcttcggacggtgtgagctggtacagaccatctttgccggcggcgtgaatgctgtgggcgagatccagggccatcccgcactggagcaggcataccgggccggcagggaggcatgagcatgaagatcctgatcctcaacggcagcccccgtcccaacgggaatacagcggcgatggtccgggcgtatgcggagggtgcttccgaagccgggcataccgttcatatcgtgaatgtgtgccagaagaagatagcgggctgcctggcctgtgaatactgccataccaagggcggcggcaagtgcatccagcaggacgatatgcaggaggtatatccgctgctggaggaagccgagatgattgttctggcttctcccatctattatcacagcttttccggacagctgcagtgtgccatcaaccggatctatgcgctggataagccgaagaaactgcgtaaggcagcactgattctgtcttcgggcagtgacctggtgtacagcggcgcgatctttgagtaccagaattccttcctgcagtacctgcatctggaggactgcggtatgtttgcggcccatggtgaggagaaccagtcgccggagctgctggaacggctgcgcgctgccggaagaaacctgaaagactgaacgatacaaggagaaaattcaatggaacaactgaatctgacaaccgattgggacaaggtatttcccaagagcgacaaagtggatcacagcaaggtgaccttccacaaccggtatggcatcacccttgcggctgatctgtatattcccaagggcgcaaccggcagactgcctgccattgcggtatgcggaccgttcggcgcggttaaggagcagtcgtcgggcctgtatgcccagaccatggcggagtttggcttcctgaccctggcctttgatccctcctttaccggagagagcggcggacagccccggtatgtggcctccccggacatcaacacggaggatttctgtgcggcagtggatttcctgtcggtacaggacaatgtggaccccgagcggatcggcatcatcggcatctgtggctggggcggcatggcgatcaatgcggcagccatggatacccgcatcaaggcgactgtggcgtccaccatgtatgatatgacccgggtgaatgccaacggctattttgacagcgaaaacaccgcggaggcccgctatgagaagaaaaagaccatgaatgcccagcgcaccgaggattataggaacggaagctatgcgctggcaggcggcgtggttgacccgctgccggaggacgcgccgcagttcgtaaaggactactatgcctattacaagacaccccgggggtatcatccgcgttcgctcaattccaatggcggctggaatatcacctcctcgctgtcctttatgaatatgcccctgctgcagtacagccaggagatccgttcggcagtgctgctggtacatggggagaaggctcattcctgctatttcagccgggatgccttccagaagctcaccggggataacaaggagctgctgattatcccgggagccagccatgtggatctctatgaccgcatggatgtgattccctttgaaaagctgaagcgcttctttgaggaatacctgcgatgaaacgggcagcactgctttgtgtgacgctgcttctgctgcttggaatgaccgcctgtgcatccggcctggcagaatcaggttcagccgggggagaggaaagctctgccgctgaaccgggatcggcccgggagaagccagctgaagagagctccggggaagcaccggaggagggcgattccccggttcagtccgagccgggcgaaccgaccccggatgcagcggagccggattcggcgagcccgtccgaacaggggctgaccctgtctgtggacggcaccacgctggaagtgagctgggaggacaatgaaacggtccgggagctgatggcctgtgcggcagcggggagcatcacagtgaatacctccctctacggcggctttgagcaggtgggcagcctgccctggcagttcagtaggaacgatgtgcagatgaccaccgcacccggggacattgtcctgtactcgggggatcagctggtgctgttcttcggctccaattcgtggagctataccaaactcgggcatatcgacagcctgaccacggaggagctgaccggactgctgggcggcagttccgcagaggtggagatcagcctgaactgagaataacatagcgcaggaaaacggtggcagggtcttggctcctgaccgctgttttccgttatagcggggaaggggcctgataacgcctcagcccacggtcagaacgcagagggctccggagcagagtttcagacacagcggggtggagggcagcggagcgcctgtctgtcctgatatagtcccccaaacgcaccaaatcacagtcagaatacagaaaatccccggcatctgtcccaatggacgccggggatttttattttacaatcagttggattccggtgtgccttcgccggtttcagcagagagggcttcggcgccgccgctggacgggatctcttccgcagcggcagtactttctcccgggggttcctctttattctccttgggcacaaggctgtcccattttttcggatgctccttggctctccgggcgatcatcgccagattgtagaggtcgggattattcttgagcaggtactgctgatccttcaggggaaccttgtccccggcacggatgcgcgcagcgattttggagcagcgcagctggacatccatgccgcttgtgagggcatccccttcattgccggactgttccgggttcagcagttcctttgccagattttcctcagtctggcggtacagatcctgcaccgaccgggagagttccagagtatctcccaccggcgagggggcagaagcagccggagcaggcgaaccctttcccgcagtgtccgctggacgggcggtataggcagacagcacggttttctgaccgatcagacggatatccatagccattcctccttccatgatgcggcagagccaggcaaacattccgccctgccgcttatcagatatattcggcatattttccagaatataaaggcgattggctatacaaactgtgaaatacggaaaagggcagacaagccctccggcactttttaagcgccatgcgaagcaagaaaaaagcaaggtttcagaaacaggattttgcactattttatgatataataggaagctcagaaaaacagatcgaggtgaggcctatgcagagcagtcccattgcgcatcagcgtgtcctgaattatgcgtatgtcgatacagacacattgtatcaggatttccagatcccgcagcagggctataacgagaaacaggtcgaggagagccgcatcgcatacgggaggaatgtcctgtcgggcagagcgtcggatactgtgctctatcgcctgcgcagagcctttgtcaatctgtttacagtgatcctgtttgtactggctgccgtctcctttttaaccgatgttgtgctggcatccaatttcagcaggaatatcaccacatcggttattatcctgtgcatgctgctgctcagcggcattgtgcggtttatccaggagctgcgtgccaagcgcatagcggaccatctgacccggatggtctcctccacggtacaggtgctccgcaatggccgctggtcggaaatctcctccgaggagcttgtggttggcgacaaggtgcgtctgtttgccggagaccggattccggcggacatccggctgacgcagtcgaaggatttgtttgtttcccagtcggtgctgacgggcgagagtgcgatactggagaagaatgccggtacacttgccgatggacaggcccggtcctattcggattattacaaccttgcctttatgggatcgtccgttaccggcggtaccggagagggcattgtgcttgccgttggcaaggatacggtctatggcggattttcatcaatggaatcccatctgaaaaacggctttgaccggggcgcaaattcgattgcgtgggtgctgatccgattcatggcggttctgatccccgttatctttatcgcctgcggcctgaccaagggcgactggctttccgcctttttgtttgcgctttcggttgctgtgggcctgacccccgaaatgctcccgatggtgatcaatgcctgcctggcaaagggcagtgcggcgatgggcaaaaaacagacggtggtcaaaaacatcaacgccatgcaggggttcggaagcatggatgttctttgtgttgacaaaaccggcaccctgaccggagatcagatttccctggaatactatatggatgtcctggggaacgagtgccagcatgccctggatctggcctatctcaacagcctctaccatacgggtgtgcagaaccatctggatgatgcgatcctgcggtaccgggaaatgccggggcaggagagccattaccaggaactggaacagcggcatcccaagctggacgagctgccttttgaccatgagcggaggtttgccagcgttctggtgcggagcggcactgaaaacctgctcatcatcaaaggcagcgtggatgaggtctgccggaagtgcagccatatcgagtacagaggcgagcggcacccgattgatgcccatgggcgggacagcgtccatgccattgtggatgagatgctggaggacggcatgaaggttctggcagtggcgtataaaccgctgaatcaggagaccatctcgcaggacgatgaaaacggtctgaccctgctggggtatctggcgttctttgatgcacccaagcagagtgccgctgctgccattgaaaagctgcaccggctccatgtggatgtgcgggttctgaccggggataaccaggatgtggcggtttccatctgccgcaggctggggatcgataccatgcacaccctgaccggtgcggagctggaactgctcaccgacaacgaaatcccggtgaagctggaacatacaacggtattctccgagctgtcgccgaagcagaaggtgcaggttgtgcggacactccgggccaacgggcacacggtgggctttttgggtgacggcatgaatgacctgcctgccattgtggaatccgatgtgggaatctcagtggacaccgcagcggagacggtcaaggaagtggcagatgttgtccttctgaaaaaggacctgaatgtgctggaagagggaataaaagaggggcgcagagcctttgccaatgtttcaaaatacatccggattacggcctcttccaacttcggcaacatcttttctattgtgatcgccagtgcttttctgccctttttcccgatgactgcgctgcagattctgctgctgaatctcctgtacgatctgctgtgtcttgtgctcccctgggatcaggtggacgagtcgatctgcgcaaagccgctggagtggtcgggcaaaacactgggacgcttcatgcgctttttcggcccgatcagctctgttttcgacatcatcacctttgcctacctgttctttgttctgtgtcctgctgtctgcggcggcacctttgcttccctctccggaagcggagaacaggcccggtttatcattttgttccagacagggtggttcctcgaatccatgtggacccaggttctgatcctgcatctcctgcgcacccagaaggttccgctgctgcagagccggccttcccgtccggttatggtggtcaccttgctgggaacagcggtctttacgctcctcacattcacccccatgggcgaatggatcgggctgactgctttgccgccggtctactttgtatttctggctgtgaccgtctttttctatctgctgtgggtcacattggccaaacggtggtatatccgccactaccacgaactgctttgagaaaggaggaatccattatgaagaaaaatatcggctttatcaccctggattcctccctggtccagtggctccgggagacgctccggacttccgcgccgcagaacctgtccgcacaggagctgctggaggggttccgggatttgctggatggcacggcgggttccctgatgctggaactgggcgagggcagttccccggcagccgggagcgacatcatccgctgcggtgcgctctccattgatcccagactgcgcagggtgagccgggatgggacagagatccccctgacgcccaaggagtttgacattttgtgttttctggcccgcaaccgtggagaggtctttacaaaggagcagatataccaggctgtatgggaaagtgattatctgctggacgacagcaatatcatggcgtttatccgcaagctgcgcaagaaaattgagcccaatccggacgctccggaatatatcctgaccatctggggcatcggctacaaattcagcgataagctgtaatcagaaattcttaacgaatcgcaagaaaatcgcaaggttttgaccatgtgatctttcctgcgttttttttatactggttaaggccgaaaggaggagtgctgaatgaactggatggattttatgatgcgtatcctgctcgctgttttgctgggatttctgattgggctggaacggcagatcaccggacatactgccggaatccggatcaatgtgctgatcgcgatggggtcctgtctgttcctgatgtttcccatcatcaccgggtcagacgaagtgtaccgcattgccagctatattgtatccggggtcggattcctgtgcagcggggtcgttttcaaggacggcgggactgtgcgggggctcaatacagccgccacactctggtgtacggcggcaatcggcgtgctggcaagctccggatactttctgttggcatctgccgcaaccgggacgccgattctttcaaacctgctgttccgccccctgtccatgaaagtcaggccggttaccggctgggaggagagcgaaaaactctaccgtatctcgatcacctgccgggaagccaaggaaacagatatccgtgctctcctcattaacgggaacaccagcaggaccctgtacctcaatcacctggacagcggcgatgtggtgggcgattgggagtcctgttcatcatagcgggccttgcgtttttcttcggaaggacgcacatccagctcttagcgtgggaaaacatgccggatcaggggaggggcaggatcatgccgctctgccgctgtatgggcgaggtgattgtgctcagcggggagcagacgctgccggcaattataatccgcactgcggctctgtgcggcagagtgcggttttgaatagatattccgcaaaagcgaggtgaacggcatggactctgacggaagtccccgaaggcagcaggcagcaggcgtatggaacacggaagttccatgcccttcatgcattcctgcttgcctctgatcagcataaggaggtaagaccaatgaacaagaagcaaaatcatatttcagcccgtcaggcagcggaaaaggcagtgatccgggacgagcagaaccgccgcatccggtatgcggcaacaaatccggttccggaggttctgaaggagctgcacaccaccctttgcggccttgatatggaagaggtgtccgccagccgggcccggtatggcagcaacaaggtgacccatgagaagaaaaaatccctgctcagacggctggcagacgcgtttatcaatccttttactgccattctgttctttttggctctggtgtccaccatgaccgacatggttttcccgtatttttccctgttcgggagtgcgccggaggactttgactgcctgaccgcagtgattatcctgacgatggtggttatttccggtacactccggtttgtacaggaatccagaagcggcaatgcggcagaacggctgcttgccatgattaccaccacctgtaccgtcacccgctggaaccaggaaaaggcggaaatcccgatggatgagctggtggtgggggatattgtgcatctgtccgccggggatatgattccggctgatgtccgcattctggaggcaaaggatctgtttatcagccagtccagcctgacaggcgagagcgaaccggtggagaaaacgccccatgtaagtgctccggcagagagcatcaccgactatccggacattgcgttcatggggagcagtatggtatccggcagcgcatccgctgtggcagtgtgcgtcggggacaatacgctgttcgggtccatggcatcggctgtggcaggggaggccgtggaaacaagctttaccaaaggcgtaaatgcggtttcctgggttctgatccggttcatggcggtgatggtcccgctggtattcttcatcaacggcatcaccaaaggggattggctgggggcattcctgttcggcatttccattgccgtcggtctgactccggaaatgctccccatgatcgtaaccacctgccttgccaagggcgctgtgtccatgagcaagaagcagaccatcgtcaaaaacctcaactccatccagaatttcggggcaatcgatattctctgcaccgataagaccggcactctcacccaggatcaggtggttctggagtatcatctcaatgtcaacggcgatgatgatacccgggttctgcgccatgcgtatctcaacagctacttccagaccggatacaagaacctgatggatctggcaattatccgccggaccgaggaggcagaggctgaagatccacggctgatggatctgtcggagcactacatcaaggtggacgagatcccctttgattttgcccgccggcgtctgaccaccgttgtccaggataaaagcggcaaaacgcagatggtgaccaagggcgctgtggaagaaatgctgtcgatctgttcttttgcggaggttgacggcagtgtccggcctctgactgaggaggtgcgcctgcgtatcctccggacagtggacggcctcaacgataaaggattccgtgtgcttgccattgcgcagaaaagcaatccatctccggtggggacattcggcgtcaaggacgagtgtgatatggtgctgatcggctatctggctttccttgacccgcccaaggagtccactgcggatgccatcagggctctgaaggatcatggcgtgacgaccaaaatcctgaccggggacaatgataaggttacccgtaccatctgcaagcaggtggggctgagggtgcgcaatatgctgctggggtcggatctcgaacacatgagcgatgccgaactggcccgggcagcggaaaccaccgatgttttcgccaagctgaccccggatcagaaggcccgggttgtctcggtgctgcgggagaatggccacacagttggcttcatgggggatggcatcaatgatgccgctgccatgaaagcggcagacatcggtatctctgtggataccgcagtggatgtcgccaaggagtcagcggatattatcctgctggaaaaggatctgatggtattggagcaggggatcatcgaaggccgcaaaacctacgccaatatgatcaagtacatcaagatgactgcctcgtccaacttcggcaatatgttctcggtgctggctgcatcggcgctcttgccgttcctgcccatgatgagcgtccatctgattttcctgaacctgatctatgacctgtcctgtacagccattccctgggacaatgtggacgaggagttcattgccaagccccggaaatgggatgcgtccagtgtgggcaatttcatgatctggatcgggcccaccagttctattttcgactttacaacctatctgttcatgtattttgtgttctgtccgatctttgtttcgggcggtgtgctgttcaacgatctgcccgctcatttcagcggagcagaactggctgtgatgcaggcaaagtacatcggaatgttccaggcaggctggtttgtggagtccatgtggagccagaccctggttatccacatgatccggacccccaagctgccctttatccagagcagagcttccgcaccgctgacactgctcactatgatggggatcacaatcctgacgatcattccgttcacaccctttggggccatgcttgggtttacagccctgcctgccgcttactttgcctacctgattccgtgcattctgctctatatggtactggctaccagcctgaaaaaagcctatgcacggcactatggggagctgctttgagtttaggaggtgttttatatgaactggacagcgatctgg

SEQ ID NO: 1990 - DNA, 5217 bp, Unknown
  16S sequences of unknown bacteria
agccttttgattacggcatcaagccgcagctcggcttttactttttctctttcgccctccgcaacatatttatcggcaagccgcttcaggacttcttcgtattgcaaatcgggctctattccgccgtcctcgcttcttatatatataaccatgcaggtgtgggtctcaaggctgatgctcataatattatcgaacgattccctgaccgaatggtaaatcgaacgctccttgaattcgccgtacatatccctgccggagattataagagttttctcatctgttttaactattcttatgcggtaccacctaagctgtgagacaggcagtaaaaactgcagctcgagctcactgtctcccttcccgttaaaaagactctttaaataatcctcattaagatattttttccaaagcgagtcgcttatgcctatgccgaattcatccctgaaaattcccgtaagctcgggaacggtatacgcttttccctcgtatttttgcgctgtaatatcgtaatgaagaaatattttcccgctttcgcggtcatattcccatatcatatcacaataatttttcaaagcagcaatcagcatccgtctttccgacacaaaccttcaccctccgtattacagcttttcaccgaagacagccgtcaattaaccggcgcagtttttctgcgtcctccctgttttgcgacgaaaatggaattatttcgacattttccgcatatctgccaagctccccgtgtataagggagagcctttcggcggtctgcgatttattaagcttatccgattttgtaagcacaatcatatatggaatctgcatttccgaaagaaaatgcagcattgtcatatcaaactcggtaggcttatggcgcatatctataagctgaaacgccgtttttatatcccgtcccgaattaaaatagccctccataagctgcgaccagcggtcgcgctcggaaaacggcaccttcgcatagccgtaacccggcagatccaccagccgcataccgtccacacggtaaaaattcaccgttacggtcttgcccggctttgagcttacacgcgcaatggactttctgccgagcaccgcgtttataagcgacgacttacccacatttgatctgccgcaaaagcatatctccggcagatcggattcctccagctgttcagcagttgcaaacgccttttcaaaaaccgcgttgttatagttcatatatcatattcctctattggcttattgttgcggcgctctgctcggatacgccgaaaactgccggcatttcgccttttgcaggcttttttgcaagcgcgcggcttattatctcatcaacaaacgatacgggtacaaattcaatgcttgcctttaccgtttcgtcaacatcctctaaatcgggatcgtcaacatcctctaaatcgggaatattttccttgggtatgaaaacggttttcaccccgcccgtatatgctgccatggacttttccttaagtccgcctatgggcagcaccctgccgcgtatagttacctcgcccgtcattgcgatgtcgcattttacaggagtttttgtaagctcggagatgagacccaccgtcattgtaacgccggcggacggaccgtccttcggcactgccgcttcggtagcgtgaatatgaatatccagctttttgtaaaattcggggtcaatgccgagtctcaccgcatttgcccgcacatagcttaccgccgcggcggcggattccttcataacgtctcccagcgaccctgttaattccagcttgcccgttcccggcattgaggaaatttcaagctgcattatctccccgccgacagatgtccaggcaagcccgtttataatgccgacctcgtcgttttcgagaatgacctcgggtttatagcggtgcctgcccagcatttcgcgcacggttttttcgtccacggtcaccttgccctgctctccgcccgcaataagctttgcggactttctgcaaagcgcggctatgctgcgctcaagccgtctcacgcctgcctcgcgggtgtaaaaatcaataagcgagtatatagcaccgtcggttattttaacggttttcgccgtaagaccgtgccgtgatatctccttcggaacaaggtgacgctttgcaatattgaacttttcctcgcgcgtatatcccgcaagctcaattacctccatacggtcaagcagcggtgcgggaatggtctctgcggtgttcgccgtggctatgaaaaccgcgcggcttaaatcatacggcacttctataaaatggtcaacaaaggttccgttctgctcggggtctaaaacctcaagcagcgcagaggacgggtcacccctgtaatcgccgcccaatttatccacctcatcaagcagtataagcggatttccgctccctgcggtttttacggcgtttattattttaccgggcattgcgcctatgtaggttttgcggtgacctctgatttccgcttcatcatgcacgccgcccaaagaaacgcgcgcaaattttctgcccatacattccgaaattgttttgccaattgatgtcttgcccactccgggcgggccgacaaggcagattatctgcccatttataccgggcgcaagcttataaacggaaagcatttcaagtatgcgttccttaacctttttcataccgtaaatgtcgcggtcgagtattttttcggcgcgtttcaaatcggcgcgcgtagccgtatccttattccagggaagctcaaggcaggtatcaagataccctctcacaacggtagcctcatgtgcgcccgcaggcattttcgcaagcttgtttacttgggtaaacagcgcatccttcacgctgtcgtccgctttaaggcggaatattttctcgcggtattcctcaagctcgtccgccgtttcgtcgccgtaaagctcgctgctgattattttcatctgctcgcgcaggtaataatcccgctgattttcatctatagccgccttggttttctcgtttatgcggcggtctatctcccctatttcgcgttccttatcgagcatttcaataaggattctcgcacggcgaatgggatccgactgctctaaaatatactgcttatcatcatatggagcgggaacattcgaggctatataatcagccaatttgccgatatcggtgctttcggcaatatgcattgccatatcgcccgcaacattcgtgtagacctcggcatatttttcaaactgtgtcctcacgcggcgaagcagagtttcaatatagaccggtctgttcttaatcggcttatcctcgattttaacaatatccgatacgagcatactgcccgtatttacaagccctgtatgctctgctctgtaaagtccctcgacaaaaaccttgactgcgttatcgggcagctttaaaagctggcgcacctttaagacacagccgacctcgtacacatcgttatccgcaggatcgtcaacatgaatttccttttgggtcacggcgaaaataagtctgtcgtgctccattgcgtatttgagcgccgcagccgatttctgcctgcctacatcaaaggatataagcatttcggggaatattacaagtcccctgagcgctataaccggcatttttattgcgttttcttcaattactaaagacataaaagctcctgtttaaattattccgtccaattatcggtatcataaagggtgaccgcggtaagctcgttttcactgaaaaagaagcttataacgcgggttttaaaggtatatttcagcaccgtgccgtccatcgtgcccataaggaagaaagaatttgagtcgtttacatcctcctcggtatattcaagctcgggcagcgcgtttttgatttcgagaatagatgttccgaccccaaagccgtagcccttgcttgttgctatgatatacgaaatgcccttatccttattcgccttttcataataataaacaaagtcaccgttatctatcctcacggtcttctcgccctcggtcacggcaaaggggtattcctcgcccgccgccgcggcagatgaatcctctgcagtcagcttttcttttatttcatcggggtctgctcccaatttgtaggggcattcgggcatttgaccgagctctgcgtaatattccaggtcaaccttattttcggcggttttttcctttttcttcccgcaggcggaaaaagagagggcaagggtcataacaagtaaaagcgcgaataactttttcattttattttactccttaaacaagcgtgacggtttcaaagcctatgaaagctgatttaaaagctcgtggcgtaaattccaaagctcttcggataagtccacataatatgtatgcggattttcaaagcgcttgacctcatcccataaagaatccacctgctcggcgcgatatttcgctatttccttgacagacggcgatacatagacctgcttgccgttttcaaaaatcttgacctgcagctttttggcaataaaatcggtcacgaccttgcgcttccaggtgtggtcggggtcgaatatctcgtaaggctcgctctgatctattttttcggtgttgagcgctataacatcggctattgccttgccggtctcgcggtcgtagagcctccacggaattttaacgccgggaagtgtaattttcgccgcgttttcgctgatttttatcttcgggataatctcgccctttttctcaaccgccgcaagcttatatacgccgccgaagaccgcctcgcttgaagcggttataaggcgctcgccgacgccgtagctgtcaacctgcgcgccctggaatatcatatcgcgtattaaatactcgtcaagcgaattggaaatacatattttgcagtcgctgtagcctgcgtcgtcaagcattttgcgcgcctttttggtaatgtaggttatatcgccgctgtctattctgatgccgagcgggcgcttgccgagcggctttaaaacatcgtcgaatacctttatggcgttcggtatgcccgatttcagcacgttgtaggtgtctacaagcagcatgcagctgtcgggatatttttcggcataggtcttaaatgcggtatattcatcgtcaaaaagctgcacccagctgtgcgccatagtaccggacgccgccacgccgaaatcctttgcggtaagcaagcaggatgtacccgcgcagccgcctattatagccgcgcgcgcaccgtaataagccgc

SEQ ID NO: 1991 - DNA, 6722 bp, Unknown
  16S sequences of unknown bacteria
atttgcagtttctgcggcaaactgcaaattggggactgtcccctttttgcggtttcacacgcgtgctacgccttgggcaggatgaccgtgaaggtgctccccttgcccagcgtgctatcgagcgtgatgacgcccttcgcgcgctcgacagcatggcgcacgagcgaaaggcccagccccgtgccgcccatctcgcgcgaatggcccttgtccacgcggtagaagcgctcgaagatgcgctcctggtcggcggtcgggatgccgatgccggtgtcgcgcaccgagagcgtgaccttgctgtccgtgcagctcaggctcacctcgacggtgccctcgtcggtgtagttgatcgcgttgtcgagcaggttgtcgacgagcaggctcgcgtcagccggcggcaggttgacgcggcacagctcatcgcttccgaccccgtcgtcgtacacgaactcgaggcccttgagcctggccttgcccacgcgcgtctcgtacgacgtgctcacgacgctcgccagatcgcaggtctccttgttcctgccgccaagcccgccgttttccagacgcgacaggtccaaaagctccgtcacgaggttttgcagccgctggctttccttgttgaggcgctccgtgaacaccgggataatgtccacgtcaccgtccttgctggcacgctcgatcgattccgagagcaggcggatgcccgcaaccggcgtcttgagctcgtggctcgcgttggcgacgaagtccgtgcgcacgcgctcgagcctgcccaccggccgcgccgtcaggcgaatcacgaaaaacgccacgatggcggtgagcacgatgacgacgcaaagcatgatcagactcgtcgtgcggaacccctgcgcgagcgagtcgacctgcgagacgggcgtcgccgcgcgcagcgccgccgcctgcccctggtagttagccggaaccgccacgtagaggtactcgaccccttccgtctcggagacgcgcctgtcccgtccgacctccccatcgagcgccgacacgatctcgggacgctgcgcatggctttgcatgtcgtccgcgttgtcctggctgtcggcgagcacccgcccgtcatcgcccacgagcgtgatgcgcagcgagtcggacgatgcgagcttgtccacggcgtcttgggcggagacgtcgctgttcgcgagcatcaccgaaccggcgttggcgatagactcgaggctttggttttgctggtcctcttccacctggtcgatgggcgtgagcagcgagaacccccagaatatcgcgagcatgagggcgatgacgatgtagccgccgatgagccagaaacgccaccccgcggtgcgcccgatgcgcttcgcgcgcgccatcagtcgtcctcgtgaattgcttcgaagcggtatcccatgccatgcgcggtctggatgtaggtccagccgtctttgtcaatcgccttgcggatgcggcgcacgtgcgtgtcgatggtgcgcgaggtggagaggaactcctcgccccagacctcctcggcaagccactggcgcgttgccagcgccccgggacgcgacgcgagcgcgacgagcagcttgtactccttcgtgcgcagctcgacgatcttgccggcgacgcggacgcgcgcggcgtcgacgtcgatttcgagctcgcccgccctgatggtgccggcatgctgcgaggtgctcacgccggcgcggcgcatgttggcgcggatgcgggcgagcagctcgtcgatggagaagggcttggtgatgtagtcatcggcccccgcgtcgagcccgcggatcttgtcctcctcgcggtcgagcgcggtgagcatgatgatgggaacctcgtcattgtgcgcgcgtaggtcgcgcgccacctcgagcccggagagccgcggcagcatgaggtcgagcaggatgaggtcggggttgaccttgtaggcgcattcgagcgccgcctcgccgtccgttgccgtcgtgacggcgtatcccgccttggtcagcgcgaactcgacggttatgcgtatggtctggtcgtcctcgacaagcaggatgctcggcatagtcttcgctttctccctggtgttgtgcgactttatcatgcaccgcgaactgggcactgtcgtgcatttaacccagaattcacaccgttcacgagcgggaaaggcccgcgtcttgccataccgccgccgagccgggcgtcgggcgcctctacggctgcgagacgacgatggtcggaatcgtcaggttcatgagcacgctgtgcgtgagcgagccgaacagtgcccgtccgagcgcgctcgtcgtgcgcgtgcccagcacgagcgtgccggagctcttggtgtagtcgatgagtgcgcgcgtcggcgactctccctcgaccgcctgaccggagatctcgatatcggggtttgcctctttgagctgcgccaccagcgcgtcgatgcgctgctggtactggcgcccgatgtcggtgagctcgccgcccatcgccttggcgggcttcgagagaaacgcgggcaggccccaggtcgagacgagctcgagcggctctttcgtctcgcgcgccatctcgagcgcgaaggcgacggcgctgtcgctcgagtcgtcgggggcaagccccacgacgatgccgcgtcccgagaacttctcggaccagtcgaccggtatgaccgccgttggggtcgtcgtcgagaccgcgatgcgcagcccctttgccccgccgatgttctctcccaccgagccgccgtgatgcgagccgagcacgaccaggtcgtagccttccgcctcatcggcaatcgcctcgagcagccttccctcgacgagcttgacctcgacgggcaccgaaggacactgctgatgtgcctgctccttcgcctcggccaggacctcttcggcgacggcgcggatctgctcgggcggcatgccgctgttgcgggtgaagcgcgcgtcgatgacgagcaggagcgtcaccgtggcgctctcgtgattcgcgaagttcacggcccaagcctgcgcacgtgcgccgcgctcgcttccgtcgatgccgacgaggactttctcgatcatatgctgcgacctttcggatagatgacgaacatggtgaaacgaccgtgcccggggcggacggtgccaggtgccctgcgccggcgtcgacgcgcgacgcccgcgggcggtaccggcacgcgccgccatcctagtggaacaccgggatgatcatgtacagcgcgaacagcacgatggccacgcacacgctgaagcagcacacggcgccgatgcgcgggccgaggtgcgcgttgccctcgctgtcgacgatgccgcgcgcccacaggcgcaggcccgaggcgtacagcagggcgatgctccccgcgacgcagatatcgacgaccaagacggtgaagaagttgagtatctcttgcatgggatgtcctctctcttacgccgcggtcgcgctgaccgcgttgccgccgccttgctttggcgtcaggcgaacgtcgggcgactcgttgacgttggcggaattgatggggttgcgcttggagaggcggaagatgacgagcgcgacgcccaggccgatgattgcgacggcgacggtgccgcccatcccggtgcgtgcgagagcgcatgctgctgcaccgacgaggcccgacgcggggaaggtcacgagccaggcgatgaccattctgcccgcaacgccccagttcaccttgttgccgcgcttgcccaggccggtgccgatgattgagcccgagcacacctgggtcgtggagagcgcgaagcccagatgcgaggagacgaggatcgtcgccgcggagcttgcctcggcggcaaagccctggggcgtgttgatctccgtcaggcccttgccgagcgtgcggatgacgcgccagccgcccgtataggttccgagcgcgatggcgaagccgcagatgaacacgacccacagctgcgggccggtgcccgaggcctgcgcgcccacggcgatgagcgtgagcgtgatgatgcccatggtcttttgcgcgtcgttcgtgccgtgcgagagcgcgacgaggcacgcggtgatggtctggccgtggcggaaaccgtcctcgacgtatttctcgtcgagctttctcacgacgaggtagatgagcttgacggcgataaaggacgcgagccctgcgatgaccggcgagatgagcgcgggaatgagaaccttggtgagcacggcgaaaaagttcacgccctggacgccggcgccgacgatgaccgcgccgaccaggccgccgaacagcgcgtgcgacgagctcgagggcaggccgacgagccaggtgagcaggttccagacaatcgcgccgaccaggcccgcaaagatgaactcgggcaagatcgtgaccgcctgctcgttgatgatgccgcccgagatggtcttggcgacctcggtcgagaggaacgcgccgacgaggttgagcgtgcccgccgcgatgaccgcggtcttgggcttgagcgcgccggtcgcaatggaagttgccatggcgtttgccgtgtcatggaacccattcgtgaagtcgaatatcaatgctgtcgaaatgacgaggaccaccactacgatagtcgcgatttccatgtgattgtgcctgctctccttagccagtaatgacgtgctaacggtaagagcgcgatgtcaaaacagcgtcaccgaaatgtgaactccgtgtaacatgtgcagaggcaccacagcattgccgcaaaactgcaaaatggggacagtccccaatttgcagtttcggcatgacacagccgaggaggagcactcatgttcagttatcttggcgtggactatccgaatatcatgatcgtctcgaaaggcggtatgcccgcggacatccccagcgacgcggcatattgcgagtaccaccaggcgttgcgcctcgaaccgtatgaggcactcgtgaaggccgcgcttgacgaccccgcgaaaaccgtcgtcatcgtctgcgagaacgaggagtgggcagatgacgcaacgttcgaggcgtcttcccttgcctaccgccacttcaatccgccgcacgatgatgccgacatgagcgatgagcgccccgcgacggcactcgagaccccgtttgggacgatcgagattaccgataccgtcggaaacgcgatcgagttcgccgttgtcgactttcacgacgagttcccgtgcttcggagacgacagccacatcacccacgtcatcgaaagcgagggactgcacggcatcatcgtcgacctgaccaggctggaggtgggtaagacgtaccggctgcacctcgacggcccgcgcctcaaggtgttttgccgtgacggcaacaacatcgtgctcggcgccgtcgcgaacggccgtacgttcgcgctgagcgcgctcgacctcaacgtcgggctcgattttcgcaagcccgccgaccgtgcggagttcgtcggttggcgcttgcaactgcccaagggacgtgtgccaaacggattctcgttcacgctgctcgaccaccgggcacccgagatgcccctcttcctaggttgggtcgagggcaccgggcccgacgcgcgcgaggcgatggagagcttcgtcatcgcctagcgagcggcacgacgccgccagcaagactgcaaattggggactgtccctaatctgcagttttgctattggtcccgtgccatgtgcaaaaactgcaaattggggacaccccctgcaaattggggactgtcccctttttgcaggttggttcaggcgaggtcgagcgtgcgcgtcgcgaggcgcttgagaagcgcgtcggagtgggtaaccagcacgaggccgacgtcacggcccttgcagtattccagcaaaaactcccagatctgcacctgcgtgacggcatcgagcatcgtcgagatctcgtcggcgatgatgaagcgcggcgcgacgctcagcgtgcgcgcaaggcagcagcgctgcagctcgcctcccgacagctcgtgcgggaagcggtcgagccactcgtcgcgcacccccagcccttcgagcagctccccaggcacgggtgccgcctcgccaatcgatttgcggatgcgcacgtaggggtcgagtgcctgctcggggtgctgccacacgagctgcaccgggttgggcttgccgggacgtgcgcgcacgagctccccgtccagcgtcacctcgcccgcatccggctcgaggtaccccgcgaggatctggcacagcgtgctcttgccaaagcccgacggggcccgcagcgcgacacgctcgcccccctgcaccgcaaggctcagcccctcgaacagcgcgggcgcccccgcgtacccgaacgagatgttttccgcacgaagctcgctcatcgcgcatcctcccccacgtcggcaaagtcatgcgtcggcagcgcatgccacagacggcgcgcaaacgcggtctcgagcagcgcggggtcgtcgaagcacgcaacgtccgtctcctcgacgaccgtgccgtcccgaaacaccgcgacgcggtcggcgacgcgcagcgcgagctcgatgtcgtgcgtgatgagcagcacgccgccgcccgcatccgcgaaggcgcggaaatcgtccatcgccttgatggcgagctccaagtcgaggcccggcgtgggctcgtcggcgatgataagccgcgggtcggagatgagcgccgtcgcgagcagaacgcgccgcgccatgccgcccgagagctgatacgggtacagctttgccgtgtgt

SEQ ID NO: 1992 - DNA, 19656 bp, Unknown
  16S sequences of unknown bacteria
gatctccgataaaggctcggcggaaaggggatttttgacgctctgctctgtcaaacgcgcggaaaaacgaaaggagcggggatacggttacttttcaatgcgggaaatctgaaattttttcggcgaaacgcccactttgattttgaatatctgtgaaaattgagtatagtcttcgtagccgcattgaagcgcgacttcctgcaacggaagggtggtgcccgacagaagatattttgccaatgtaatcctcttttcaaggatgtacgttttgggggaaacgtggtaggcggctttgaatttcaggcagaaatgatcttcggaataatgggaaagctccgcgagccgagcgacggagagattcgtcgtgtagtattcgtcgatatagtttttgatgaccgcgatctcgttgtcgctgttgatctgtttgttttctttgcgatagatatgggtgagcagctgcgtgatgagcgcgcagatcatattttcgtaattggtaaacttattcatgtattcgtcgcggatctgctttacatagggcagtatggaggcattggcgtccttgtgggcgctgttttttatgtccagaccgcacgaatcgtccagatagaatccgaaggcgatgagatccgcctgtttttcatggcgttcgtcatggacggtatacggccggaaaatcgcgtagctgtcgtcggtgaagcgaaaggatttcgcgccgctcatattctgaccgttcagatagcagatgattttatccgtgacgggcggattttcgttcgtgttttccacgtacattccttcgccctgcgctttgtaataatatacgaattcgtagcaatcgtgaacgtgcggacgaatttgcagtttttcgctcttatattttcggataaacagatatttgaatttaaccatttcgctccccctccaaaaatgaaaaatatgggaaattccgatttttattatagccgacccttcgttctttgtcaagagggaaaacggaaaaaatgaaatttttattccgtcgccgccgcggggacggaaaagaaaaaccaaagacaaatgcggaacgaaaaggtcgtttttttcataaaaaggggaaataaaacttcaaaattgctcaatttatcgtgaaaaatggggctgcgtaacggaagatttatttttaaggaccgaagaggaaaaatcaggaaaaaaatttaaaaagacggaaaacataaaatttatatcggtttttaatattgaaaatcgcgtttttgtatgatacaataaattcagacgaaggaaagggggcaaagaggatgaaaaacaaaaaaatccggcttcgcgcgacagcggcgttatgtcttatggcgacgatactttcgggcgggtgcggcggaggaaaagatatgagcggcgacagcatctccaaagaagaaacgagttcggtggaaaaaatttgtgcggcaaaagtgatcgtgatctcgggacagtctaacgcgtcgggttttacttggtccaaatgtctgaaaaacaacgtttccgaggaagcctaccgaaagtacgaggagggcttcggcaatgcgatgatctattacaacgtcgatacggcggaagagaacggatacagttggaaagacggcggggacaatacctcgggcggcgaattcgtaaacgtaaaactcggtcaggggcataccgcggagcgcttcggaatggagatcgggatcgccgagaagctggcggaaataaagcccgacgaaaaactgtatctcatcaaatgcgcctggggcagcgcttcgctcttcaacgacttcgcctcgccgtcgatgaaaaattatccgacctccgtttattacgacaagtttatctcggtggtgaaagcgggaatctcaaaattggaagagataaccgatctccccgtggagataaaggccctttgctggatgcagggggaaaaggacgcggcgtattattccgaagcgagtcaatacggaccgaatctgcaaacgttcgcgggggatttccgttcggaattttcggcgtataaaggaaggggcgaaatcgcgtttatcgacgcggaaatttccgagggcgaatattgcgcgtacggagaatacgtcaatcagcacaaggcgtggtttgcggagaagtcggacgacaattatctcctctccacgcaaggcttctcctacggcaaagagccggaggaaaagccggatccctatcatttcgattccctctcgatgcttcggctcggctatcgatttgccgaagtcatcgccaagttattgtgacaaaaggaggcggctctttgaaaaatatgatttcagacgaaacgcggacggcgaaggcctctgtggaacaaaccttccgcaaaaagcccaaggcgaaaaaacatccctggacgcagcgcaactggacgatctttttcatcgccactatcggcctgctgcaattgttcgtgttccattacctgcccttggtcgggatagggcttgcgttcaaaaacgccgattacaagggaaatattttgaaggcgtttctcgattccgattgggtgggatttcagcagttttcgctctttttgaaagacgtggattttaaaaacgtcctgatgaacacgctcggtttgaatcttttgatgctgctcatcaatttccccgcgccgatcatctttgcgctgctcatcaacgaagtgagaaacaacgcttataaaaagggattgcagatcgtcgctacttttccgcactttatctcctgggcgatcttcggcgggctgatcgtgtccctgaccgatcaaaccacgggcattgtcaatcccattctcaacattttgggcctttcgtccaaagaaaaccccgtatatctcggcggcgcggattatttttggacgatcatgatcgtcggctccctgatcaaaggagtgggctgggggtccatcgtatatctcgcggcgatcgcggggatttctaacgagctttacgaggcggcggcgatcgacggctccaatcgttttacgaacgccgtgtacatcacgctgccttccatcgcgcccacgatcacggtgtttctcctcctcaatatcagcaggattttaaacaactctttcgaacagttcgattcgatgcagaatgcggtgaacctgacgagaagcgaagttttggcgacattcatttacaggacgggcatttccgcgcggagatattcctatacgacggcggtggggctgttcgaatcgctcgtcagcatcattcttctcctcacgagcaattttatcagcaaaaagacgacgggacggggaatcatatgagaaaaatcaaaaagtataccgcgtttgattacataaacatgatttttctgaccttgttcggagtcgttacgatctatcccttttattacgtcgtcatcggcgcgttcagcaacggtcagacctatatgagcggaggcgtattctttgccgtacgcgggtttacgttggacaatttcaaggcgatcataggggattcgactctttggacggcgtttcgcaattctgcgctgcggacggcggcgggcgtcgcgtcggggctgcttttcacctccctcgtcgcctacgctatgggcagcccgcatttgaggtgtaaggcgctctatcagaatctttatatctttacgatgtttttcagcggcggcacgattcccttttaccttctgatccgcgtgctggggctttacaacagcttttgggtgtacatcgttcccgcgctgttttccgtctataatatgatcgtcatttccaatttctttcggggaatccccgacggactgcgcgaggcggcggagatcgagggcgcgggagaaatcaccatttggtggacgatctatatgcctctttcgaaagcggtgctggcgaccgtcggactctggctcgccgtcaatcactggaacagttatatgggcacgatgctctatacggacgcggacagttcgacgatcacccttcaatattacctgaaacagatcataaacagcgcggcgagcatttcgggcgactatgaaacggtcacgacaaagacggtggcgtacgccgccatcgtcattgcgacgattcccattttatgcgtgtatcccaccgtgcagaagcattttacgaagggcgtgctcgtcgggtccttgaagggatgaggtgaagaggatggaaaagagaaaaaaaatcaagctggtcaacgtcacggcgttcgtccttgctctccttatcttttttacggggctttgcagcgtcgtgtattttatcggcggaaacggcatcttcaacatgaaggggctggaatatcccgattaccccgcggcaaacgtgaatcccgagatagacagctggacgcagtggaaaagctatgacgacaacgtgatcgagatcgattggtttgtagacgatacggcggcggcttttcccgaccaaaacagcatgatttataaacggatactcgaaaaaacgggcgtaaaaatcaatttcaagaaagcgacgtcgggcgacggaacggaaattgcgacgaaaatagcgggcaacaatctgcccgacgtcgtcagcatcaaagcgaacaccactttgaaaaacgaactcgccaaggagcagacctgctatcccatacaggagctagcgtcgcgctgggcgccttcccttttgaaaagactgcgcgaagacgaggaaatggtgagctactacgaatattccgacggatacatctacgggatacccaataatttttatatgacgaaggacgtggaaacgtacggcgaatcgggcaggtcgctggtgcccaccggcgcggcgcttgcgagaaaggattatctcgacgcctaccatgcgtaccggcgggaagcggatcccgatttcgacgaggcggaggtggcgacgccgcagggaatactcgactttttgctttgggtgaaggaaacctatcgtttgtccaatagcaatcccaccgtgaatatttccgcgttcgaaaaggaccgaacgcacggaagcctcgggatgcgctggctcatggagtatttttccgtgccggaagagaacgcggacggcgagtacgtctatcagcaggcgcaggacgaatttgtcgagatgatggcgtggctgaacgagctgtatcgggcaaatcttctgacggaaggctccctcggggcaaacgcctccaccgtcggacaatacttacagaacggcgacatcgctttgttcatcggctccaccgtcaattatgcgacgcagcttaaaaactgggaactgaacatcagcgggaaaaatccgatcggggaagaagcgagatacgttcccgtcatcttttccaatgccgcgggaacgacgcctcagctggcgataacgggaaattcgtatatgtatacgatgatctccgcgaactgcaagcgtcccgacagagtcataaagcttttcgattatctctattcggacgaagggcaggagctagtctgttacggaatcgaggacacggaagagcaggcggggagttttgtctacgcgaaacgtccgggcgctacggaaactttggcaaacggaaagacgtacacctacaaatacgggcagatagaatacagcgccgccgcgaaagccgcctggaacagcggcaacgtcaattcctacgggttttatcagatgactctcttttataagcccatgtatatgtatttgtcttccgcctcgggcgggcagtttaacaattaccgcgactatgtgaagtataactcgaaagcggcgatcattccctatgcgtacagctatcggggcttcgaattcgagttggattcctccgacaagcggtataccgaattgtatacggtagaagcgacgcttcgcaataagtggtttcaaaaatatacgggcatcatcggctcggattcttcggaaacggtggaaaaagagatccgaaagatgctcgtatggtgcgagtccgtgggactggacgactacatcgctttcaaaaacgagtgctttcaggcgcataagaaaaagatggggatcgcttacgcttctcccatcaacgatccgaaaaacaccgcgtataaaaatctgacgatttcctcagtatacggcgatacaagccgctatctgcaagtccccgaagaaatcgcgagaaattaatctggacggtctttatgaaaataatcattgatacggatatcggggacgatatcgacgacgcttttgcgttgcagctggctttgaacaccccggagctcgaaattctcggcgtcacgacggctttccgcaacgcgtacaagagaggaaaaatcgtcgccgcgctgctcgccgcgaacaagagaaaggatattcccgtctacgcgggcgaggacgaggcgctaagcggaggaatctgtaaactcacctatgaaaccgagccgatgaaagacgcggacggaagcgtaaacgttccgcagtatcgggaggaattttcttcctatgaagtaaagagaggaggcgtggagttccttttgcgggcggctgcggaaaatccgggagaagtgacgctggtgtgcctcgctccgctgacgaatgtcgcggcggcgtatctcaaagacggcgaaacgttttcaaaactgaaaaaaatcgtcatgatgggcggacaggtgaacggggactacgcggaatggaatttccgatgcgacgcgaaggcggcgaagatcgttttcgaaagcggtatgccgataaagatgatcggcatcaacgtcacgaaatactgtaaactcacggagcgggagatttctctcgtcaacgcctccgagagcgggagcggaaaattgctctcgcaaatgctgaaaaaatggctcgcggacaacgactacgaaaaaagcccgatcatgcacgacggattggccgtcgcggaactcaccgaaaatttctgcgtttacgaaacgagaagcgcgaccgtatgcgaaaagggcgaaaacgcgggaaagctcgcgccgggaaaatatcccgcagagatggcgacggaagtaaaaaacgaggaatttatcgactttttaatgagtcggttgaggaggactatatgaataaatggaaagcggttttggcttgtatgacggtctgcgcgaccgtcgccgtcgggacgaacgttcccgcgggatcggggcgggcgaacgcgggggcaagcaaggcggatttcagcgaagcgcccgttctcgtcagtacggacgtaaagcgcagcggcagcgagtccatgcgcgtggagctcgattccgcgtacaccgtgacgggaaattgcgcggcggtgaaggtgtacgtaaaaaacgccagtctgcccgccgtgctcatgagcgtttcgctcacggacagcgcgggaaaaacgtataagagcaacacgttcgacgcaggcaaggtaagcgccgtcgattacgcggcggcgggggacgagtataaaaagctcaatcgcgtcaaagacagcgagtttatcgaggtcccttacggcttttacggcaccgtttatctcccgtatgcttctttcaatcgcaacgcgggggaaacgcccgcggatattcagtccgtcgaggtgggattcggcgcgcagagcctgggctacgacacattggaggcggacattcagaaggtgtacgtgttcggcgtctacgacgcggcgttcgacgaagagaaacggacggaatcggcgcgttcgacgatcgtggattacagcgaaaaggcgatagcggatatttccgtggacggcgacaccctcgtcctcgccaaagcggacgaatacgatatggacagtttggaatacgcctacaatcataaaaaagacgcctgcaaacaaatcggggacgtgaaaattgtcaacgatttcgatattcccgcgtccttgaccgcgctcaacgccgaaaaagcgcagaccgacaggcgctggcggtattcgaaaatggggcagacgagcgagtattctttcgtggaaagcgggataagcggggagatgctgaaatacacccttcccacagagcagaatcccgacgtttccaatgtatattccagtctgcatttcaatctcgccgacgacgcgcaggattggtcgggcgcgaaagggatcacctgctgggtaaagaatcctgccgccacggaatacagcgtcaatttcgagatctttctctacaacgacaaaacggatattctcgaacagtacaatttgaacagctcctcctcggcttataagacggtatacgcctacaatacggcgacgggagaggagttcagctataacacgcagacgtttatccgcgtccccgcctccttcgagggctggctgaggatccctttctcgcagtacgaggcgcccgcgtggacgatgaacaagccgtataacagcgagggcgtattcgatatcgaccgctataaggtctacaagatctccttttcgcggttgttgaaatccaattacggctccacgttatacatggataatctgggcgcgtattacgacgatttttcggtgggcgggctgtttgacaagacgaagccctccatcaaagagtgtataaacggagggaaataaaatgaaaaaaatatcctgcattttaagcgcgctgttttgtctttcgcttctcttcgcctcctcctgcggcggggaaaagacgagcgaaagcgaccattcgggcggcgtttcctccgaagaggaaacttacgaacagaaaaagctttcgggcatagaccccgtattctcggaaagccagggctattacaacgaaagtccgtccgtattcgaggccgcttcgggagaacgctatctctattatacccgcaatacggtgaaaaacgacgacgccacggacagcatcgcggtcaggaaagccacctacaccgcgaacggctggacatacggcgaggcgaaaacgcttctcgtgccctccgaaagcggctgggattcaaagagcgtattcggcgcggacgtcgtcagggggagcttttcttatcgaggaaccgattattcctatctgatggcgtacagcggcagcgacgaaaagaatcgggcaaacgccgagatcggcctcgccgtttcgaaaacgcccgacggagaatgggtgaaagtcggatcctcgcccgtcgtcacattcgacgcggggcattacgacccgatgggaatcctctcctaccgcggcgcgatagagccgagcctcgtcagcttcgacaagggcggaaaggtgtatctgttctacacctactacgaatatctcaacggcagttatgtgctggaaatggacgcgggcgacctcgatcatcccgtcctcggcggcagaaagctcgtccccgtgtcgggtttacaggatatgggcgcttccaatactcagctatatagcggcgatttcgtgttcgacgaagaggacgattccctgatcgccgtccgcaacgtagccacgacggtgaccgtgcagcccaaagtttctcaggctttgcagatcgtcagggcgaaagcggacgtcctcgacgcgatcgaacaggagtggaagcctgcggacaaaaagaccgtatggtggtcgcaggtcggcgctaacgggaagatcgacggggacagcacggcggtagaggacgacgtggataagatgttcggctatgagcggatcttcggcggcgcgatcgtttccgacgaatacgggcatttgctgacgtacggagaactcgacgtctacttcacgacgcagggaatatacggcgacgcttcctttgccttagaaaacgactataagtattcgcagatgatccatatgcttacggtaacgttatgaaaaagaaaatcttaaaattattttccgtatgccttgccatgatgggagcgctgctcatgagttcttttcgattcgaaacatctttatcgaccgcttctgcggcggcaaacgacggaattacgatccgccgttcgacggacgagggcgttttggatacgcccgtgtcttcgggttcctcggaaacgtacaaggaaagcgatcggcaatggctggggctgcccacgatctccaagacgcccggaggaaggctctggtgcgcgtttcagacgggggacgcgaaagagggcgcggagggcacggacaattacgacgtgatgtattacagcgacgacgagggcaggacttggtccgaggaatatttcatcttcgacgtggaggacgaaagcatccgactgacggaccccagactgttcgaggacaatttcgggaagctgtggctcgtcctgattcggggcggcggaaagggaacgtatgcgatgcagatgaaaaaccccgactgcgagagtccgatggaaaatctccgattcggagagcctgtctggtggctgacatatccgcccgcgcaccgtcccaccgttctttccaacggcagatggacgacgcccgtcgaggcgaacgtaaagagtcagtccacgtacatttgtaatcccgacgacgaaaacggcacgtatatctggcgcgaaattacggcgcctgacggtcaggcggtcacctctttccccgacaggaaatcttacggggaatcgcagatcatagaactgcaaagcggcaggctgatgatggcttcccgattgcagaaaaatgcgggcaacggcttggaggtgtcttattccgacgattacggcgcgcattggacgccctatcgatcggggctcgactttccctttgcgggaccgagcagcaaattccatattcaacgcctgaaaagcggcaatatcctcttcgtcaatcacgagagcctgagcgacagaactaacctcacggcatggctttcgacggacgacggaaagacgttcccctataaaatcctgctggacgacaggcagatagacggattttggggcgttagctatcccgaagccgccgcgcagcagggcgaaaacggagagatctatatcgtctacgacggaggcaggtatacgcagaaagagatccgcatggcgattctcaccgaggaggacataaaagcgggcgaaatcgtttccgaaagcgggacgctgaggagagccgtgatcagcggaggcgggtataccgatctgaccgaactggacgcgtcgactctttacgacagataccgctacgtggaaacgggaacgagcagggaagcggtgataagcgatttgcccgccgaagtgaaggcttcggacaaagagggaaggacgtatacgcttacgggcgaatgggtaagcgggaattataacgcaaacgaaaagggaagatatacgtttgaattcatcacgtccgatcttcccgacaaagtgcaggacggactcgggctgttaagggtgtacgtgggggtcggactgaccgacccgaaggaaaacggcggcgattcgtccgattcgtccggcgcgggaacttcggattcgggaaacacggaaagcccgggcggaaactcccgcgcaggcggctgcaacgggatgattggcgggatcgccgcgggattcgcggggcttgcggcgattgctttcatccataaaaaaagaaaatcataaggaggaattttatgaaaaaattgacaaaaatcaaattggcggcagtgttcgcctgcgcctgctcggcgatccttggcgcggcgatgatgctcggcgggcagatccgcgccggcgcggaagaaaatatgacggcgatcacttccgttcccgaggacgaactcgtctgcctttccaacgacgacgcggcgatgttttattccaataagacgggggcgacaaaggtgcgctatacggctgcggaggactatgcgcttacggacgtcaccgacatcgcggtgcgccttacgaactcgcagcgccagacgaacaagtcgaacgcgagcgcgggactgacctattatcggataaaattcaaggataacgatacggtttacaatatcaagaacgagcaatatatcctgggcgaggacggaacgacgaagttatatacgcactttaagacgatctccccgacgggctccgtcaagaggacgttcggcatcacgggcgcagggcagatgtctttcacggaaactttcgacggaacggtgtatattcccctttggatgttatacgacggaaaaagcacagaggaggcggactgcctcacctcccgcagcgattacgccgatttgaagatagaatatgtggagtttgaagtttccacgtacagatgggatctgatcgtcggcgacatggctctcgtaaagcacacgggcgaagaatacacggaaacggtgatgcgtttcgagagagaggctcaggattctaactgcaccctgctgacggatatttacgacgacgtggaactcgtcgtcaacgacgtaaaggcgaccgcggacggacagggcgcgttcgctgccgcactgggcgagatggggagcgtgcagatgcccgcggacaaactgatgttcttccgtcccgtttcgctgtcgtcgaagctcggcgcgggatacggcatcacgaatattttgatcaattattataaagacgacgtcctcattgacgcggcgacgagaaatcctttaagcgaagagtatgcgcttggcggtgaatacaccgtccgcgacggcggaagggaggaaaatacgtcggcgctcgggcagtcgcccgtcaaagtggagataagggcgaccgtttcccccttgataaagctgaatctcgcgggagagagcgaaggcgtagagatttcttacaaaaaattggacgacggcagcgacggcgtcatttatctcgccaagaatcaggattccacgcttacggtaaaagtgaaagagggcttcgacttcgcgggactgaaactgggaaataaggaacttgaaaacgtcggcgcggaaggaacatacgaatacgtcgtgaggatcgcggaggaaagctctctcaccgtactcgggctcggggaagaggtcaggctcaacgtcctcctcgcggacggcataaaggcggaggttgccatcggcgataggatattcaccgcggcggcgacggaatacgcgagcaatcttctcaaaaaactgacgctcagcgtccttcccgacgcgggctatgcggttaaggtggaaaaggtgattcccgcgacggaaacggaagaggaacaaatcaccgagattttatccgacaccgacgaatacgtcatctccgtagacggcgcgttcaatatccgcgtttcgacgtccgtgctcacctatcgtattacttaccgactgaacaacggcgtcctcgcggaaggcgagagcaatcccgaaacgatcaccgttctcgacgccgtcgaattgaagaaccccgtcagagagggatatacctttacgggctggaagatcgagggcagggatggatatgtgaccgagcttaaaaatatctccgaagacatcaccgtcgtcgcggagttcaagagggaagtcgctcccgacagttcctcctcggcggacgcctcctcgtccgtggaaagctccggcgaaaacagctcttcggtcggaacgggctgcggctcgacgataggggcagggatgggaataacgattgtttttctcgccgcgggcgcggcaattctgaaaaagaaaaagcgttgaaaacggattgccgacaggcgatcgaaggatttttatggacataattaagatggttctgcgcgaaagtttgagctgtgaggcgattttgcgcagagcccccgacggggatttgattattctttctcaatgcgggggaacgaacgagccgcaaaaggaaaacagggtggtcctgctccgttcctcggacaacgggaaaacgtggtcgaagccgacgaaaatttacgacgacggcagagcgctttacgtttcggaggtgttcgttgcggatggggaaatttgggcgtttgccctggcgcacgacggggattttctcggctgggaaacgttccttttaaaaagctttgacagcggttatacttggcaaaaatgcgaatcggtatggaaagacagagctttttgctttattcgaggcggcattcgcgtaggggacaccctcgtttttcccacgcagtattacgaggtgccggacgccgaatgcaggcgtctgaaagaaaagggcgagctattgttaagggcggagattcctttcgtcaaaaacggcgcgttgatcagcaaagacggcggaaaaagcttttataggagcaggaccacagccgatttgccgatggcgatcgacggaaaacggctctggaaatggtctgagcccactctggcgcgccttcccgacgggaaaatcgtcatgctgatgagggcggacggggaaggtttcctttacagaagcgaaagcgcggacggcggcgaaagctggtcggctccgcaaaagacggggatcccaaaccccaataataagcccaagcttctccatcttgcggacggaagaatcgcgctcctcaatacgcccgacaaaaggatcgggttcaactaccgcacctgcctttcgctgtggataagcggggacggactgaaaacatttgcgtataagagagaacttctccgtttccccggctggctctcctatccggacggattttacgacgagagggacggaaggatcaaatttgctttcgagctgaatcgtcacgacgtctattttgtcgattgcgccatcgagtgaggcgggcatggatctgtttatcgacgtgggaagcacgaatatcaaatggatggacgaaagcggcaaagcgaataggctgccttttcccgctcccgagcgttccgactatccgttctttgaggtggacgcggaaaaaatctatgcgggcattgaggaaattatccgttccgtccttcctcaacgggtgtttttttccgtacagatgcacggatacgtgctattaaaacggggaaaagcggttacaaagtatatttcctggcgggacgaacgcgggggaaaactcgtgcccgaattttcgctgaatgcagagtacggcgtcaaaatcaagcccaatctgcctcgtttgagtttacaggcgcaaagcgtggaagccgacgaattctgcaccctcggctcctatctcgtatacaggcttacgggaatcaataaaacgcatatcacggacggcgcggcgagcggatttttcaacgtcgtaaagcgcacgtcggataggtccccatattctctgccccgcgttgcgtattctgtggaagaggcgggcaggtatgcggcgagtcggatttttacgcccgtgggcgatcagcaggcggcgatcctcggcgcgaaaaaacgcgccgaagcgaacggctttaaagactgctatatcctcaatctcggtacggcggcgcaactttgcgcgatttcgaagcgttttgtaagcggcgattttgaaagccggccgtattttaacggcgaaactttatgcacggtgacaaagcttttggggggcggatatctctgcgaagcggcggggcggaagagcgaagccgagcttgcggaggagttgtacgccgattatgcggcggcaatgaaaaaattgcccgagcggaacaggctcctcatcacgggaggcgtcgtggcgcataggcggcgtctgcttgaaaaagtcggggaaaggctgggcagagaatgtatgttcaacgattcctgcgacgcattggacggattaaaaatcatatcggaggtcgtaaaatgacggaagcggggatcatgctttcggaagtgcctttttcaaatcttcccgtaattttaaaaaagggaggaatggacttctttattctcgactcggaacacggaggtttcgattattcggatatttcgaaaatcatcatgacgtccaggctcgcgggactgaaatgtatcgtcaggcttgcggacaatacgagaaaagacatcaccaaatttatggatatgggtgcggacggacttttgctgccgatgacgaatacggcggcggatatagaaaaagttgtggagtatgcgaaatacgctccgctcggcaggcgcgggctttcgacgatgcgggcgcatacgctgtacgatcctcccaagcttctcgactatatgaaggcggcaaacgaagccacggaaatctatgcgcagatagaaacggcggcaggcgtcgaaaacgtcgtggaaatcttatccgtggaaggcgtaagcggcgttttgacgggaccgaacgacttatcctgcgacttcggttgtctggcggacaatcacgcgccgcaaatactttcttccatcgaaaagacggcgttcgaagctgtcgggcgagggaaaaagagcggcatcattacaggcaatgaaaattatcttgccaaggggaaagagtgcggcatgacgatgttctgcgtggggagcgagctgaatctcctgaaatcgggcacggcgagcaccgtaaaacggattaaggaaatttaacaaaactttttgccgacgaacaacgaggacgtttttaaaatatccacgtcctccgtgttttttcgattttcctaacgggaatgaatatgcccttatcaattttattaatagaaatccgtgcggggtggacccgaacggattttttacgcttttttgatagcgaaacgggaaaacagacgggcagcccgaaggcaaaaaagcaggaccttttttgcgtaagcggaaaaggaaacctatcaaaagcgggacattcacgggcggacctatttgggcgagccgcgttgtaaaatggagcgggaagaagatccggcggcattttttcggcggcgcgccctccataattttacaaaagcggtttgcaatgggctcttttgtcgaatccgcttttacgggcgatcccttttatatttttgcgctttgaaagaacgggaacgccgcaaaggtagttccgaggacggagttaaacgaaacttatgtcatcgaagaacggtcgggattccttcctttacagcgagcgcttacagtatatccggaacgtcgccgcttccctgctcctgcgaagaggaaagctatacgctggcggaaaaccgcggcgacaacgcctcgggaggcaggcggggtacgatttcgataacgtcgaaagcgacaaaatgggaaccggaattcttggcaacgctgtggaatcgtctttgaagaagatctttctgagggaaaaatagaattattttgtgaaaagatcggaaaaaacaagcaggacttggatcaagaatctttctgaattccgtagtggcgaggcgatgattaaaattttcctccgtgcaggaaagcaggggaataaaatgcaaggcatcagtggacgtcgcagtgcgcgtcaaaaatggagaacgggaaaaaggcgttgaacggttgacctttatttacagggacgcggtttaattccccgagctttggcaaaacttaaaacatatgatttattttaacggcatcaaaggaaaaaattatttcgagggttggttttttcgtgtctgctccgatcattttaactgcgcgctcattccttccgtcagcgtatgcgggggagaacgaaaggcatatattcagataaactgcaatcgcgtcagcaaaagaatcgagttcgacttccgggatttttccgccacggatcaggaggtgcgtatcggaaacaatcgtttttccgaccaagggatcactttttcttctgagatcgtatcgctggacgtaagcttcggcgggtttgcgggactggaaaaagacattatgggctgctttaagttcggaactccctgtaaacataaaattatcagcatgaaacacgaagtaaggggaacggcgcgcttccatcataaaaagatgacgctgtataacgcggtgggatatatcgaaaaggattggggaaaatctttcccgcgggcgtattgctggcttcaatgcaacgagttcgcggaaaaaaacgccgcgttcttcttatccgtcgccgatatcaatctgccgattttaggtttgatttgcgtcttgctcgtggacggcagggaatatcggtttgccacctataatttcgcgcggatcgaaaaattgaagaagggggaaattgtcttgaagaaatctaaaacgcgcttacagattaagttttggggcgacaacgcgcaagaactttccgcacccgagaaaggaagaatgaaaaacgtcatcaaggaagatctggacggcacgatagagctgaaattgtttgaaggcgaaaagccggcgtatacgtttcacggcaaaaacgcgggggtagaatgggtggacttcccttgacggaattgtaaaagcaatctgaatttccctattgactttgactttcttctatgttataataaattgcgtaggaggaagaattatgaaaatgataacggctattgtcaacaaaaaggatgcgggttccgtgtgtgacgcgctcacgaaagcgggatattttttcaccaaaatggcgacgacgggcggatttttaaaggcgggaaatacgacgctgttgataggcacggataacgataaagtaacggcagcggtagaaattatacgaaaaaactgcgcccaaagaatgcagatggtgccgactatgccctcgggggaaggcgggtatcgcggctttaactacttccccaccgaagttttggtgggcggagcgaccgtattcgtcaccgacgtcgaatattacgaaaaaatgtaacggatagaaacggctcttcgcttagcagaaaagaaaaatcggcgtcatcacggccgcgactttctttctttgagggcgccggtcgtttcttaaatcgaataggggcaaagcatttggagcgtacaagaactcgatactgaaaaaacaccttgaaagcggtcgttttcaaggtgttttagtttgtataacaacaaaaacgcggttttttatgggagaagagtttaagagattggactaacctataagaaattattatggaaaaataatccatattttcttgacaaaataaaaagaaagaggtataataaagaaaaaagcgaacatatgttcgcgttttaaggcaaacaataggaaagataaggagaaaagaccaatgcagaatacgagaacaaataaggcgaagtgaaaagataacataacatataaaagcggaacgacattaaaatcagagataatcacggggctgtcccgctctttggatgccgtaaatacgtataagtttaacgttgtttatacgaagcggggcttacttgaaacaagcacttgcaacatcacggagtatcgttctgacccattcagttctcaaccgcaggcgacggaagaaaccctgaccaaagcttacacgtatgacaaagcaaaccgattggaaacggaaaccgggagcggcgaaacgattgcgtatagctatacggcggacggaagcctcgaaacggaaacggatcagcgtggcgtttgcaaacagtatctgtatgccaaaggtcgattgacgatgattaaagacgaagacgacaagaggaacgagagaataacggaatttggatatgacaatataggaaattgtacgcattacaaacgaagcggaacggaaagcgcgaacatagaatgggaacgcggaagcttattgaaagaatatacaaacgagtcacatcagacgacgcactattactataacagtcagggaatccgctataagaaagtagtaggaggtacggaggtagcgtattgtttggacggcgggaaactgctgttagaaaaaagaggctataagcaaatgtcgtttgcgtatgacgcggaagggatcataggattttattaccacgacgatacgccgggacaagcggttaaaaa

SEQ ID NO: 1993 - DNA, 19440 bp, Unknown
  16S sequences of unknown bacteria
aatttccaaaatgcgggaaattcaccgtgtgttctgttaccatggggcggagcataaaacgattttttgctatgaggccggtttgccacttacagtggaaaatgtcagaatacaaagccgttttcacccaaggtgcggcacaagctttatgtttatagttcttgttgtaagtataattgtgttttcttttgtgccgtggcagggcacgctgcaaagggctgtgttaaaggtgatatttttgcctcttgtaatgggcatagcttacgaaatattgcgttttaccggtacccatgataacaagctgacaaaaatacttgcggcgccggggttgtttttccagcgattgacaacggccgagccggatgacagtatgattgaagttgccattgcatcggtaaacgccatattgccggagacaaaagttgcggagaatttaaatgaaactgtttgatgtgtttaaaaatatgctttccctcttgccggaaagccagtacagcgaccggcactttgaggccgattgcctcattgagtttgtcttaggcaaaaaaagagcagatttgggttccgattttacggtgacggaagaaaaccgggaaaaattgtactctctgtgcaaaaagcgccgggagggctaccctttacagtatattttaggtgagtggcctttttttgatatggatttggaagtgggggaaggggttttaatccctcgccgggatacggaggatgtgtgtctgcacgcctttgaatatgtaaataagtttataaatccaaatgttttggatctgtgccggggcaccggggcaataggtctacggattaaaaaacattgcccccatgcaaatgttgtggcacttgaaaaatacgacgaggcatatacctatcttttaaaaaatatagaaaaaacaggcttgtgtgttttgccgttgaaaggggacgttttcaatacggattacgtgattgaagatgaaacatttgatgtgataatctccaatccgccgtatattgacccggcttttcgggacagtatgcaaaaggagcttacatttgagccggaacaggcactttttgccaaggacagcgggttaaggttttataagtttatatcaaaatattattaccacgccataaaggacgacggttatttgatttttgagtacggctatgaccaggcggaaaaagttaaaaatatcatattggcttcaccttatcgcataattgaggaaattgtcgacagccggggcaacccaagggggataatagcccaaaaattagccaatataaacaaaaaaatacttgaataatttttggcaatatgctatcatattaacaaatgacaactgaaagttgtaagcgacaatgcgagatcttgttttgcaatgccgacttgaattttactgaggagaacaaccatgacggataaagaaaaagcgctgcaaacggctttggcaaatattgaaaaacaattcggcaaaggtgcggttatgcgcctgggtgaaaatgtcaccatgaatgtggataaaatttcaacaggttcactttcactggatattgctttgggcataggcggtttgccccgtggccgtatagttgaaatctacggacctgaaagcagcggtaaaacaacccttgctctccatgttgttgccgaggcacaaaatggcggcggcaatgcggcttttatagatgttgagcatgcccttgacccggtttacgccggtgctttgggggttgatatagactctttgcttgtttcccagccggatacaggcgaacaggccatggaaatttgcgaggctctggttcgcagcggcgccattgatgtaattgtagtggactctgttgcggcgatgacaacaaaggcggaaatcgaaggcgatatgggggacagccatgtgggcttgcaggccagacttatgagccaggccatgagaaagcttacggcggcaatcggcaaaacaaatacaatagttatatttataaaccagcttcgtgaaaaaatcggcgttatgtacggcaatccggagacaaccacaggcggccgtgctttgaagtattacgcctctgtccgcattgatatacgccgtattgaggctcttaaatccggcacggaggttataggcaaccgcacaagggcaaaagttgtaaaaaataaggttgcgcccccatttaaagaggcggaatttgatattatgttcggcgagggcatttcaaaaacaggggaaattgtcgatatagccacaaagcttggaataataaacaaggccggcgcatggtacagttacggcgatattcgtttaggccaaggccgtgacaacacgaaggaatactttgccacaaatccggaagttgccaaagaggttgaggataaggtctttgccgcaatagaaaaggcaaggcaggagggcataaatattctctccccatcatccgcaaagaaaaagaccatagtttcacggcaggtggccccaccggccggtgaaggtgatgcaaaagccgaagaaaaacccccggttacaaaacgcagaagcgcaaatattgatatagatgttgaataatattaaaattacggatataaaaaagacgaaaaagggcttaaatgcccttttttgtgatgggggatttttgttttccgttgatgatttggctctgtatcaaaatcacatagaaataggctctcggctttcccaaatcgaaatagacggacttgcaaaacaaagcacaatggcaaaggcaacggataagtgctatacactcctcggtttgcgtatgcacggcaagagagaactgcaaaacaaattgcttaaatttttcgacgctgacaccgcagctgccgcagttgacaaaatggaggaaatggggcttatagacgacgaaaaatttgccgctgccaaggcggactatatgataaatgtaaaaaacagctcccttatgggaactaaaatgaaacttttaagccttggtattgacaaagacattgttgataatgtattattaaattttgacgaaagtcaagaagatacaatcagagatattatagagaaaaaatatgcgtcaaagttggtaacgccggaaaaggtggtggccgctttgatgcgaaaaggctttaagtacggagaaataaaacgtgtcttagagcagtttgacatacagacggaggattattaagtgaaagttacattggtgtctttgggctgtcctaaaaaccaggtggacggcgatattatagcgagaaatcttatagaaaaaggccatgaaacggttgcggatatgaccgaggccgatgtttgcatcatcaacacctgcgggtttattcagtctgcaaaggaagaggccattgaaaatattttcaatgcggtaaacgcaagaagcgaaaacccgaaattgaaaattgttgttaccggctgtcttgcagagcgttataaagacgaaatattggaagatattccggaggttgacgccgttgtgggcatcggcgcaaataatcagctttatgaaacaatcgaaaaggtacataacggggaagaacatttttccgtttacggccctaaaacagatttggatataacacaaaagcgtattatttcaacacctaagcactatgcttatcttaaaattgccgagggttgttccaacggctgttattactgtgcaattcctcttatcaggggtccgcatcgttcaagacctatggaaagctgcgtagaagaggcacagtggcttgcggatcagggcgtaaaggaagttatcgttgttgcacaggacattacgagatacggtgaggatatttataaaaagaactgtcttgcggaattgattacccggataagcaaggtagagggtattcagtggataagacttatgtacgcctatccggaacgcttaaacgacgatattataaatgtcatagccacaaacccaaaggttttgcactatttggatttgcctattcagcacattaacgacagagtgcttaaaagcatgaaccgccccggcggacatgatattattatgtctgcaatcacacgcttgcgtgcggcggtgccggacatcacaataagaacaagcattatcacaggttatcccggtgaaacagaagaagaatttaacgaactggcacagtttgttaaggatattcgccttgaacgcttaggctgttttgcctactccgaggaagagggcaccgttgcacggagaatggagcagatgcctgtggaagaaagagagcgccgtgccgagcttataatgcaggtacagcagaatattatggctgaaaaacaggcaaaacttatcggtaaagatatggaagttatcgttgacgattatgacagcgaaaatgatttgtttgtgtgccgcacacactttgacgccccggaaattgacggtgaggtttatatccccggtgccagcaatgtaaatgtaggcgatattgtaaatgtacatattaccgaaagcgatatatatgacctttacggcgaactttgtgaatgattggagtgataaaagtgaatttgcctaataaacttacggttataagacggattttggtgcctgtttttatggcgtttatgtacatcgactccccttatagctttttaattgctcttattattttctgcgtggcatcttttaccgattttttggacggacacattgcaagaaaaaacaaccttgtaacggactttggtaaatttatggaccctttggcggacaaattgcttaccacggttgcgattatttatctttgcaaactggatttttgcagtgaaatagtcttgtgtatagttttggcaagggaatttgccgtaagcggtataagaatgatagccgccgcaaacccggccggcagcagggtaattgctgcaggcattatgggtaaggcaaagaccgtattccaaatggtttcgataattcttgcacttgcggatcttgctctctttgatttgggagttttgtcacggggaacttttgatatcattcacactgttgtgaatgttttaatgtggattatggctgttttgacagttgtttccggcatgcagtacattgttccgaattttgatttgataaaaaatgcaaagtagtacttgacaaatcaaaaacaaattgttattatatgcttataaattaaatgcgattgtatcaagaccagtaatcggtgtaaaatctttacagagaatgggtgcgacccgctgaaagcccctaagcacaataaaccgatgaatgcacttgaaagcaggcagggcgaaaataaagtagttttgcacggcagtcaccgttacaggacattcgagttataaatcgaagtggaaccgcagttatttaaccgccttcgtttgccgtaccggcaaatggaggcgtttttgtttatataaatttatttgcagagaaaggaattaaaactatggatcatatgcaaatttttaatacacttacaagaaaaaaggaagaatttaaacctatggaagagggacattacaaaatgtatgtctgcggccctacggtttacaactatattcatataggtaacgcccgcccggcagttgtgtttgatgttatgcgccgtttccttaaatatatgggtaacgatgtgaaatttgtatcaaatatcacggatattgacgataagattattaaaagagccaatgaagagggcataacctttgacgaagttgccagaaaatacgaaaaagagtattacaaagaccttgaagggcttaatgtaatgcctgcggatgtaaggccgagagtttccgaccacattccggaaattattgatattatacaaactcttatagacaaaggccacgcctacaaggctgaaaacggcgatgtgtattacagggtaaaatctttcccggaatatggaaaattatctcatcaatctcttgaagatttggagagcggcgcaagaattgccgttgatgaaaagaaggaagatccggcggactttgcactttggaaagccgcaaaacccggtgagcccgcatgggattcaccgttttcaaagggtcgtccgggctggcacattgagtgctctgcaatgagtaaaaagcatttgggcgaaacaatagaccttcattgcggcggcgaggatttgattttccctcaccacgaaaacgaaattgcccagtcggagggggcaagcggcaaggaattttcacattactggatgcataacgcatttataaatgtaaacaaccagaagatgtccaagagcttgaacaacttctttacggttagagaaatagccgaggtttacggatacgagcctataagatatttccttatgacagccagatacagaatgccgttaaattacacaacagatgttatcgagcagtgcaaacagagccttgcgacactttataccgcaagagaccagatggactttttgattgaacattcaaccggcacaaaagaggatataaaggaagttgccgacaaggcaaaggcaaaatttatccgggttatggacgatgaccttgacactccggacgctctttcaaccctttatgaaattacgacggcggtaaataaaaccggccgggagcaatccaaagaagcgctgaaatatgcaaccgaaatatttgatgagctttgcggagttttgggacttctttacaacagaaagaaggacgaaataccgcagaatgtaaaagatttggttgaggagagaacacaggttcgcaaggaaaagaactggcggagagccgacgaaatccgtgacgagcttgacaaattgggatatgttgtaaaggacactcctcagggtccgcagattttggcaaaataatcaagtttaaaatttcactttttataaattattacaaagacaacgcacgcttgaaaaagcgtgtgtttctttccctaaaaacaattacggggcaaattaaaacagaggccgaaaggcctctgtttttgcgtttttatttgattttgttttcttttaaggcaatttctaccgacaaaaggttcggaaaaacctttacaccggctccgataagttcttccgtggggggaagcatatccggcaccataactgcggttacgccggcagaaacggcggcctgcaagccgttgtaagaatcttcgataaccatactttcccgcttttgtgatttcaaagcggataccgcctttaaaaatatttccgggtcgggtttgctgtgggttatctcgtcaccgcatacaattttatcgaaatatttataaatatctgcggatttaagttctttttcaacaatagccctgtcgctggatgaggcaagtgccgtcatatacccgttggtttttaaaaacatcaataattccgctacaccgggttttatcggcacgccgtagctgtctatatatcggttaaaagtccgtcgggtgtcttgtaaaaaatcttccacggggaaattttccccgtaataattcagtaaaatttccgccgcacggctgcggttgcaaccgatgatggacgggtagattttgtccatattctttattccattttgccgggcaacttcaagccaacagcggtgggcaagcctttcggtgtcaaaaatcacaccgtccatatcaaaaatcacagtatttatcataggcacattctgtaaatattttccacatctttcggcgtaagggttttaaagccggcaatcctattgcctttgcaggctttttgtgccatttgttcaaagtgggtgtcgtctatgtgcaattttgtaagggtgtcatcaagaccgagaatgttgtagaaaaagtcacggagacaatcaataccctgctgtgctatcagtgccttaggctgatttggatttaccccaaaaacattaacggcaaagcttacatacctgtcaagattgtcctttgtcatacagtattccatccagcgaggggtcaaaatcgcaagacccaaaccgtgggtgatgtcataaaaggcggaaagttcatgttccatagggtggcatgaccatgcaaaaggagcagttgcccttacaaaaccgtttatagcccagcttgaaacccacataaggttggctctggcttcgtaattttccggttctgccattgcgatcggcgcatattttactattgttttaagcagaccttccatttcggcatcaagcatataaaggctttcgccggggttaaaatatgtttccataatgtggctcatcatatccgccgcaccgcaggctgtttgatatttacttacggagtaggtgagagccgggtcaaggaaactccgcttagggaaaagttttgggtcggctctgcctaatttttcggtagtttccgggtttgagataacgccgccggcatccatctcgctgcctgttgccgcaagagttaaaatcgttacaagaggcaaagccttttcaacaggtgcattttcggaaaagaacttccaccggtcaaagtccgcacaggcacctgcacagataaattttgaacagtccaaagttgaacctccgcctaccgcaaggacaacatcaatatttttttctttacaaatttcaacgcctttgcgaacggaagaaattctcgggtttggctcaacgccggaaagttcataaagggtgaaaccattttcggcaagctgtgatgtaatcttttcataaagaccgattttctttatagaaccgccgccgtaaaccagcaacacatttttgccgtaatttgcaagctctgcggaaagattgtcaatttggcctttgccaaagtagacttttacaggattttgaaatacaaaattgttcatcttattacctccataaatttgattttattatataatgaaaatgtgaaaaataaaactgcaaaattgtaaaaaaataaaaggtcggagccggagctctgaccttttaaattcaaattagttgccttttttggccttgcttgccattcttgctctctctgagtggtcaagaatttgttttcttattctcaaagtcttaggtgtaacttcaagcaattcgtcaggtgcaaggaattcaagacattcttccaagctcatctgctttggaggaataagtctcaaagcgtcatccgaaccggatgcacgggtgtttgtaaggtgttttgtcttacatacatttacaacaatgtcctcgcccttagggttggaaccgcaaaccatacctgcgtaaaccggtacgcctgcaccgataaacaacacgccacgttcctgtgcgttgtacaaaccgtaagtgatagaagtacctgtttcaaatgaaataagtgaaccggactgtcttacaggcaattcgcccttgtaaggcttgtatccgtcaaatattgtgttgagaacgccttcgccctttgtgtctgtcaagaattcgctcttgtaaccgaacaaacctcttgaaggaattttaaattcaattctcattcttgttgcaccctgaggagccatgtgaatgagttctgccttacggcttgaaagtttttcgataacgctgccctggaattcggtaggaacatcaataacaacaagttcaaacggttccaaaagctggccgttttcctctttaaacaaaaccttaggaggtgaaacctggaattcgtaaccttctcttctcatattttcaatgaggattgaaaggtgcatttcgcctctgcccattaccttaaagctctcgcttgatgtggagtcctcaactttcaaggctacatctttcaaaagctctctgtgcaaacggtctctgatctgacggcttgttacgaatttgccctctctgcctgcgaaaggagagtcgtttacggcaaatgtcatttcaacagtcgggtcgtcaatctttacgaaaggcaacggttcaatctttgaaggggagcaaattgtgttgccgattgtaacatcttcgatacctgagataacgatgatgtcacctgcgcttgcagagtcaaccggaactttgtttgtgccttcaaatgtgtagatagctgtgattttgcccttgcgtgaaacagaagaatcatgccagtcgcaaacggcaacttcctgacctacttttacactgcctttttcgattttaccgactgctgttctgcctacgaatgaattgtagtcaatgtttgaaacaagcattgagaacggttcttccggcaaaacatccgggcccggaatatactttaaaatagtgtcgaaaatcggcttaaagtctgtgcctcttacttccggtgagtagtttgcaataccatcacggccggagcagaaaagcatcgggctgtcaagctgttcgtctgttgcacccaaatccataaggagcaagaggatttcgtcgatgatttccttgattcttgcatcgggtctgtcgattttgtttacaacgattacgattgaaaggttctgtgcaagagccttttccaaaacgaatcttgtctgtggcattgggccttcggctgcatcaacaagcagcaaaacgccgtcaaccattttcaaaacacgctcaacctcgccgccaaagtcggcgtggccgggggtgtcaacaatattaacttttacgccgttatatctgaaagaagcgtttttggccaaaattgtaatgcctctttctctttcgatatcgccggagtccataactctatcattgacaacctggttgtctctgaaagtgccgctctgtttaagcataccgtcaaccaaagttgtcttgccgtggtcaacgtgggcgataatggcgatgtttcttaaatcttctcttatcatttttcctccgtcatttatacatacctaaataaaacgtttacactttataatactacttttgcagggcataatcaagtttttttgacagaaaatttaagaaaattcgcaaaaattaacgatttcataacttttataaatcccatactcctttatttgttaacatttttatagtaaaatattatctaatggcaaattgccgttgacagtcttgtttgtattgaagaaaacaacgctttgtgatataataaattgtttaatatacagattatattcagttttatgaaaaaggtggaaaattgcgaattttaggcattgacccgggttacgctatagtgggctacggggttttggactatgaaaaaaacaagttttatcccatagagtacggtgcggtgacaaccgacgcccacacagactttcaagagaggataaaggacatatacatcgaggttgacgaaataataaagcgcacaaaaccggctgctttggcgatagaaaaacttttctacaccacaaaccaaaaaaccgtaatacgggttgcccaagccaggggtgtcatccttttggcggcggcaatgaacgatttgcctgtttatgaatacactccgttacaggttaagcaggcagttaccggatacggcaaggcagttaaaaagcaggtgcaggaaatgacaaaaatgattttgcaccttgaccggataccgaagcccgacgatacggctgacgcattggcaatggctatttgccacggatattcattccattcaaaattgtttacacagataggaaaaacattatgatataccgacttacaggcaagttaatagaaaaaacagttgaaaacgtggtgcttgatgtaaacggcatggcctttattttggcagtgccgcaaaccgtaagcggaatgttgccggaaatcggccgggagacaactttgtacacctatttgagcgtgaaagaggacgccatggatttgtacggctttgccgacagggacgagcagagatgttttaaaagcctgctgtcggtatccggcgtaggcccaaaggcaggtcttgccatactgtcggttttgtcaccggcacaggtagctgcggcggtagccggcggcgactacaagcggtttactgcggctaacggcatcggcccaaaggtggcacagcgcataattcttgaacttaaaaacaagtttaaggacagcagcttcggcacaggtgcggcggctacggcaggggcagccggggcagagccgggtaaaatcaaccaggcaatcagtgctcttgtggctttgggatatacccaggtacaatctgccaaagcggttgcttgcttagaccccactttgtcggtacaggaacttataaaacaatctctcagacttattgcaggaggtaaaatctaatgaacaacatcggttttcaagactcggccagacttatgagcgcagacgccatgagcgaggacgaagaaaacgaagtctctttacgaccgaaaacccttgatgattacatcggtcaggataagctgaaagataatttaagggtttacatacaggcggccaaaatgagaggggagccaatagaccaccttttgttttacggccctccgggcttgggcaagaccacccttgcaggggttatagccaatgagatgggggttaacattcgtgttaccagcggcccggccatagaaaagcccggagatttggcggcgcttttgacaaaccttgaagagggcgatgtgctttttatagatgaaattcaccgcctgcccagacagaccgaggaggttttgtactccgccatggaggactttgtccttgatatagttgtgggtaaaggcccgtcggcacagaccataagaatggatttgccaaagtttacactggtgggagccactacaagagcagggcggctttcctcgccgcttcgtgacagattcggtgtggttttaaaattggagccctacagcaatgaggaacttgcaaaaatcattatgcgttccgccggtattttggacattcactgcgaggaacagggggcactggctcttgccaagtgttccagaggcacgcctcgtgtggcaaacaggcttttaaagcgtgttcgtgactttgcacaggtaaagggtgacggcataatcgacacagccattgcagaggaatccctgcgcagaatggacatagattttttgggtcttgacgccttggacagaaatatgatgaggactattattacggttttcaacggcggtccggtgggcattgacacattggcggcgactatcggtgaagagggtgtaacccttgaagatgtgtgcgagccgtatcttatgcagctgggctttttgtcaagaacacccaagggcagaatggttacggatttggcatataaacatttgaacattaaaaatcccaaggctcaaaatgatattgttcagcagagctttgacgaaattgacgaataagccgcacaggcaaaggagatatatgagagcagagaataaatggaaagactatgttcttttggacgccaccgacggggaaaggcttgagagctggggcggtgtgattttggtacgcccggatcctcaggtggtttggaaattcccgaaaaaaagccctatgtggaataaggctcaccgggtttatcaccgttcctcacagggcggcggccggtgggaatacataaaaaaatttccgcagagctggaacatagattatgataatttgaaattgcgtgtttcccccacaggctttaaacacaccggtgtattcccggagcaggccacaaactgggacgaatacggcagaatgataaaggcggaaaaccgcccacttaatatactcaatcttttcgcctacaccggcggcgccacattggcgtgccggcggcggggagcaaaagtttgccatgtggactcatcaaaaggtatggttcagtgggcaagggaaaacgccgagctgtcgggattaaaggacgcacctataaggtggattgtggacgattgtataaagtttgtaaaccgtgaaataaggcgtggcaataagtacgacggtattattatggacccgccaagctacggcagaggccccaacggcgaggtttggaagttggaggataacatctttgagcttatggaactttgcatgggcgttttgtcggatgacccattgtttgtggcggtaaacagctacaccaccggggtatctccaagcgttatggaatacatgcttggcactatgatgaaagaaaagtacaaaggcactgtggattcacaggagataggccttacggtgcaaagcaccggtatggctctgccctgcggcagcaccgcattttggaaaaaagagggttattgattatggaaacaatgcttaaagcggaaaacgtttggtttcgctactccgaagatggggattgggcgttaaaaggaataaatgttgagataaaaaaaggcgagtttgttgcgattttaggctctaacggctgcggcaaatccacccttgcaaaacattttaacgctatactcaccccggacaagggggatgtaaccgtccttggtatgaatacaaaagaagaggacaggctctttgacataaggcagaaggtaggtatggttttccaaaacccggataaccaaatcgtagccaccgttgttgaggaagatgtggcctttgcacttgaaaatttgggtgtgccaacggacgaaataaggaagagaatagatgacgccatgaaaaccgtggggatttatgaattcagacacaaagcccctcacaatctgtccggcggccaaaagcagcgtgttgccattgcaggcattatcgccatgcgcccggactgtatagttatggacgaacctaccgccatgcttgaccctaagggcagacaggtggtaatggaaaccatcaaagatttaaacaaaaaccacggcataaccgttgtgcttattactcactacatggacgaggccgcccaggctgaccgagttgtggttatgagcaaaggtcatgtggaaaaaaccggcacgcccagagaaattttctctcaggtggaatggataaaaagtcttgcccttgatgtgccgcaaacaagcgaactggcatacgagctgaacaaacagggggcaaacctttccacaggggctatcactattgacgagtgcgccgcacaactttacaaatttttggaggaataaaattgtctgttttaaaaatcgaaaatttatcctttgtttacaatcggggtatgccgggagaaacaaaggcacttgacaatataaatttggatattgaagagggtagttttgtgggcattatcggccacacaggctcaggcaaaagtacccttatcagtcatttaaacggccttacaaagcctcagtcaggcagaattcttttagagggtaaggatatttggaaggattatgaggatatcagacaggtgcgtttcagcgttggccttgttttccagtacccggagtatcagctctttgaggaaacttgttataaggatattgctttcggccctaaaaatatgggtcttgatgatgaggaagtggacaggcgtgttcacatggcagctgagttctgcggcgttaccgaggaaatgttgcagggttctccctttgatctgtccggcggacaaaaaaggcgtgttgccattgcaggcataatcgcaatgatgccaaaagttttggttcttgacgagccctgtgcaggccttgatccggagggcagagagcttattctctcccaggttaaaaattatcatcaacagacaggcggcacggtaatacttgtatcccactcaatggaggatattgccaattatgccgacaaagttgttgttttaaacagcggccatgtttataaatatgccgacacggaagaagtttttgcggatgcgaaaaatcttgataaaatggggctgggcataccggacatcacaaaagtatttttaaaacttaaagagatgggctgtgatatccccaccgatgtttacacaattccttacggcgttaaaactcttatgaaatacaaaaaggaaaaggaggcaaaaaagaatgcttaaagacattaccataggtcagcattttccgggcaacagcgttgtgcataaaatggacccaaggcttaaaatagttcttatcatagcttatattgtcgttttgtttatgagcacaaatatacccgggcttttgctctgcggcgtttgcgccttttccctttacaaagtggcaaaagtgcctgtaaaaatgcttgtaaaaagcataaaacctttgttgcctttgattttctttacggttgtcttgaatttgttctttataaccggccggggagacccacttgtttctttttggaaacttaaaatttacaaagagggcgttttgttctgcttggttatgataggccgtatagtatttttgatttccggcacatctcttttaacctacacaacaagccctatcagccttacagacggtttagaagaacttttaaagccccttaacaaggtgcatttcccggtacacgaactgtccatgatgatgactatcgctttgagatttatacctacattgattgaagaaaccgacaaaattatgtcggcgcaaaaatcaaggggtgcgcttttggactccggcacatttatggagagaataaaggccatggtgcctatacttattccgctgtttatttccgctttcagaagggcggaagaacttgccaccgcaatggaatgccgttgctatcaggggggcgagggcagaacaagacttaaacagcttaaaatgacagggctcgactacaaatctttggctgtttgtgttattgtgtttggtgttatattgtcccttaaatttgtattcccacgggtggtttaattttgaacatacttgttaaacttgcctttgacggcacaaattaccacggcacacaaatacaggaaaacgcaaacacggtttttcgggttttccaagaggctttaatcggctttttggggcataaaaccgatataaagggctgttcaaggttggacagcggcgtacatgcgaaaagtttttatctcagctttaaaacagatagggatatcaacatcgcaaaactgccccttgccttaaatgtgcgcttgccggaggacataaaagttatgtcggcacaagttgtgccggatgattttcacgcaagatattcatctaagggcaaagagtacacatattatatatggaacagccatatagatgacccttttaacagcaaatactactaccgctaccctaaaaaactggacgccgaaaagatgaatattgccgccggctactttgtcggccggcatgattttcgctcctttatgcggtctaactcgaaaattaccgactgccgccgacaggtttattccgcaaaggtagagcgccggggggatatggtgaaatttatcgtaagtgccgacggctatctttacaatatggtaaggattatggcaggcacacttataaaaataggcggtacagctgcccggccggaacttgtaaaggatattataaccgctgaaaacagagccgccgcaggggttaccgcaccggcaaagggtttatttttaaccgatgttttttatgattttaacgaattatgaatgatggaagaatcagccgaaaagagctgagaaaacaaaacgaaaaaatacaaaaaagacgaagcggcataaaaacggttttaattgccgcagtaaccgctttgtttttatatataaccggcatttacggcacaagccttgcttatttgggagattttctctcaaacggaatgacgattattcaaataggcggcggatggccggttcaggaagatttttccggctatattcaaagtcataaaatgggttcggcactgtgtgtgctgacagacgataatctcctggcttattcccccacaggcaaacaggtactttcttacagccattcaatgagccgcccggttatatcaacgtctaaaaaccgtgctgttttgtacgatttaaacggaacaagtttaaaggtgattaacagccacggggtgctgtttcggaaagagaccgacagcaatattgtacactgtgatatatcttcctcaaaccgtgtggcggttacaacacgctcccggacatataacggagaagtgacggtttacaactacaatatggaacctcgctttgcatggtactgcgcaaccgggtacccggtgtattccagactttcctcaaacgggaacaccatggcggtggaaacattggacacccggcagggtattttgcaaagcagaatttatataatagattccaaggaggggcgggagctatactacatagaaaccggttcttaccctttgaatatgatgtttttgtcggcagataaactgttggtagcttatgtaaacggtttggttttatatgatgttaaaaatcaaagccaaattcgggaggtaagctttaacggggacagtttgaaagcagtggaaaaaacaggttcctatatagccgtaagctacggcggcaacacccgggcaaataccaccgttgcactgctcaatttggatttgtcgcaaaaagcgaaattcaatattgacgacaatataaaaagcctttcaatatcaaattcaagggtattttgtctgggggaaaaggctttgtacgaatacgattacgccggcgagcttgtaaacacaacccggataaacggatttacaaaagctttggtaagttataacggcacatcgcttatagacagcgacagcattacaaagattgaaaagacaacatctcgcaattaaatttgcgtaatggttggaaatggcaggtgttacatttggatatattggaaatattaaatgaaaataaaggtatggttattgacggaatacttattcttgttttgcttttaacggcgattaaaggttataaggatgggtttttgtctgcggcaattaaccttgccggaaatttaggcagcctttttgcaggccggtatgtggcaaaaaattatgcacaggtgttttttgaaaaagttttaagaagcggccttattgaaaggtcttacaattacctgtcgcaaaatcggcggtcaacggatatatccgaggctcttgcttctgtccttgataatttgccacaatcctttgtggaaaaagtggtttctgccgcacaaaatgcggcacagggagttcttgccccaacccaggacagcgccgctgtgcttgtggatgattttatagctcctatgctgttgccggttattgcggcgggtctttttgtgataacatttttagtagtgggcatattgtgcaaaattttggcaaaacggcttaaaatagtaaacgaagttccgctgataggcacggcaaacaagatagcgggctttttgataggtaccgccagcggagttgtcaatatcatactattatcatttttattgtatataatatgtatagtaacaaaggacggaatgtcctttgttactttggatattttacggcagagtaaaataatcggaatgatgaatatagcaaatcagattttataatatagggagaaagtgtatgttgttttgcgaaagatgcaaaaaacgcccggctatgatatttgttcagcaaatggaggacggcgccatgaaaagcaaaggctattgccttacctgtgccaaagagctgggcataaagcctgttgacgatatgataagccaaatgggtttggacgacgagaccctta

SEQ ID NO: 1994 - DNA, 6473 bp, Unknown
  16S sequences of unknown bacteria
cttcttgccgcggagctttccgataagctctatcgtgtccgggtcggcgctccccttgtcgcaccagtaggtgaggacgaatgtgtcgaaggtatcgatgacctcgtcgttcacgtatcttatgttgtaaggtccggcgtgatccggaatgacgtccgcggcggcagcggcgagcttgtaaccgtttccggttattgtcgagaatattattacgatcttttccatttcttttcctcttttctttattttgccgcgcgcctgagatgcgcggcgtagagagcggcgaactcctggtattccccgagccccctgacgacgctttcaacctcgaatccctccgcgcggaacctcgacgcgacgctctccggtctgtccccggcgatgtcccgcttcgcgtgaccggcggcgccgaacaggagcggtatcagacgaacctttccgaatcccgcggcgcgtatctccggcagaatatcgtcaagcgacggcgacgcctcaagcgtcatcacgaatatctcgtcaaagccgagccttttcgccgtctcctgaagctcgccgtactttttgttgtccgtatggtccgacccgtgccccacgagaactatcgcctgaccggcggagccgtacctcgacgcgaagaagcggcagacgaactcgttgtcgctctcaccgtcaagaagcggtcctccgacgcgtatcactctgaacctgtcatctctcgccgccgcacagtcgcgtattccgtcgtactcgccgccgcttattatgtgggtcggctgtatgtacacgtggtcgaaaccgtcgcggcagagcctgtcgagcgcctcgggaacggtatcgaccggcgtcccggcgctccgcagagcctctatgacccgcctcgacgtgaacgccctgcgtatctccgtctccgggaaaacgcgcctgtattcgttctcgacccggtctatggtgttttcgatctgtgattcgtcggaagagccgtagctcaccgacaggattgcttttttcatttatatgaccatgcctttcgtagtagcttacagttttgaggcggttttgaaagacggcttgtccggctttcaaaattcacgaccctatgtcgtgaaagtctcaaaactgtttggtctgaaaatttattttcagacttaaaactccgttgtgatcagttcttcgcggtatctttctccgccgcgtccttcgtcctgacaaaaaagacgaagtacacgcagtgcgccgcccagacgacggcgagtattatcctcccgacaggaacccggctcatcatcgcgaagccgaccgccatcaggatcgtcacggttatcatgatcttcgcctttgtccgcacggtcattccctcgcctctgacgtagctctcgagattgtccttataaagcttcgtgccggtgaaccacctgttcagcctctccgagcttcgtgcaaagcagtacgccgcgagcagcaggaacggcacggtcggtatcagcggcagcaccgcgccgacagctccgagcgccaaccctatcgagccgataacgataagtattatcttctttatccctttcattttccctccgggatttatcatatattgagttagcatccgctaacgcaaatattatagcacaagtcccggtctctgtcaagcgccggaggaaaaattcacagactgttccgcgtctgtacagaaaaaaggatgtcctgacaattcctttcgtcagaacgccatcatgttaaagcgtaaaaaaggctgccgcgcgccagcgtgacagccaatattcgtttaaccgatcatcagagcgggagctcggaaacgagcttcttcaccttgtactcggaagcgatcggcacatacttctcggtgtccccgagcaggatgtactcctcctcatcgtccccgtcgcggagtatcggatagatcgaccacacggcgaccccgtcgcgcggcagcgtgacgtcgatgtcctcatagcagctgacgcggatgaacgtcttcgtgaaatactcgtacgcgacataacccgccttctcggaaagccccggaatacagccgaaatcgaccttgtcggtgacgtccccgtcagagacgttgaacgccgcgagggcgaagttcgcgccgctgcggttccagatcttgaggagcttgttctcggcggagcagtcggtgtagaggcagtcggtcgtcggtctcgccgccctttcgcagagcatgactcttccgtcgctctcgatgaccggcataattgtctcgcgcttcgactttccgatggcgtcgctgacataaaccggcgagccggagatcgcgcgcagaacgccgctctggtacgccgactcgtggtcggaccaccacatatcgaagtcgcagtaatatatctttccgtgccagaccgcgttgtagacgttctgggtcaggtgctttatgaatccgcgctcgcgcttcgggaagaagtcgtcgctgtttctcgacacggcggaaccgggtctcgcgaggacgttctccatgtccatgcccatgcagttgatgaccgcgccgccgaaattcttctcgatcgagcgctcgagcgcgcggtgagctatgcggcagccctctgcggtcgcgatcgctccgaggatgtgtccggagttcgacgactgattgtcgaccttgaggaaatcgactccgcagtccgcgaggaaggagtgccaggtgtcccagaacctgaacgccttgtcctcgtcaagcgactggagcgcctttccggacggggttatgaacagattctccttctgcacgctgtagagctgactctccgggtcgacgccgttccagtagccgttgaacgcgtgccagacgccgaccttctcgacgccgtagacgttcttcatcttcgagatggtcgccttgagtccctccgggaacttcgtcaggttgacgtcgaagcctgcgagcatgctgtttctcgtggtcatccagccgtcgtcgattatgacccacttcaccggaatgttcttttccttgaattcctcgagcttctcatagatcttcgcgctcgtgacgtcggcgtagaacgcgtcccatgtgcaccagccgaaaccgtcgaagaactcgggcatatgtctctcgtgtctgagcggcacgcggatagcgccgcactcgcgcgcgttcgcgaagttgtcgtcaacggcgctgtaaggctcggtcgatgcggcaatcgcgaggaagtcgcctgtcagtctgcaaattccgctcgtgtcggaggtcagcgtgagctttccctcgccgaactcgcagcggaagttgtcgccggtcagcgggagcagatgatagtgcagagcacccgattttataagcagcgactgagtgcgcggagagagagcggagaaatccttcacaaacgtcgggtacatccaccaaggaccgtcgtgacggctgccgagcattgcgtccggcatgaggtcgccgagatccatgactacggcgttctccggcgcgaagccgcaggcatacccgtttccggcgtttatgcgggcgtcgatcgaaaggacgattccggtctctccgatcttcgcggttattgtgagcgattcgagacccgccgcgggcgtgtaggcgcagattatgcgtccgtcctcctcggtctcggtgaactcggtgagctttccgctcttgccgcggacgaggttcacgccgacaccgaagtttgacagtatatgttcctttacgaatgcgtataatttgttcatatcatattcctttcagggaagaaaagtatccgtatatattttaccacaataatatgtccgggtcaagtcataactcacggcacgggtgtagattttttcacgcaaaaattgttgatattaacgggcttctcacttgtccctcccgagcgagcgcaggtattccgccggggtcatcccgtactcgcgcctgaaaacgcacgtgaaatgccgcctgtccgaatagccgaacgcgtcggagacctcctttatcgtcatactgccggacgctaaaaactccttcgcctcggcgagccttctctcgcggtgatacttcatcggcgtcatgccgtactcctcgctgaatacgctgatcgcgtgcatttcactgatatagttcgccgccgcgacctcgcgaagtgtcacgccgcgcataaggtgagcgtcgagaaaaccgcgtattctctcagcggaggacgcgcgtgtcgtcgttccgaagagctgcctctcgttcgccgccatgtcgatcaggcggtagattatcatcgcggcgcggcgcatggtttcgggctccggagagtttccggcgggctcgagaaggctgtggagctctcggaagatgtcctcgcagttcatttttttgtgaatgaacatcccgagtccgaatgaatccacaaggctgtcgacaagcgttcctcggacgttgacccagacttttttgtacgggtcgtccgggtcggaataatatgtcagcttcgcgttcttatggtagaaatagaaatccccggcttcgacacgtatcttttcgccgttcatctcgatgtacccggcgccggagatcacgtattcgaaaacgtagtagcagcgtctcgttccgattatcggataatagctgatgtaataccgtgggttcggattagttattccgaattgcgccagatcgaagaactcgctcgacggcgagaatccccagttgtcgtatacgatcttttcgcccatatcgtttatatacatcggataaccctcccgaaatgttgatttctcgcccctgtttgcttatacagaggtcttgacggatatgcgaataatatgctataatatatccaatacatacaatatcgtcagacagaggcaaagcttttggcattttatgactttaccttattgaagcgctgttgaaattaaatatccctctgccgcgatagtatgctaacagtaaaccaagaaaggaacaccatcatgacaaacaagaagatcctctcggcgcttctcgccgcgatcctgctcgcgaccgtctcctgcggcgggacatcctccggcggaaacgaaacgacgccctccgccgcgacagattcaggcacgacgaccgaggaaacagcagctccggatccgctctcatccctcagaaaagaggatttcggcggccgcacctacacgatgctcggcgtcagcgactcgtcaatgtccgccctcgcgccgaatgagctcaacgcgaccgaagtcaacggagatatcgtgaacgacaccgtctacaaccgtaaccgcaagatagaggacatttacaatgtcaaaatcaccgccgagacgaagccgggcggagagatagtctctctcgtgaagtcctcggttctcgccggcgactgcccgtacgacctcgtctggccgtcaatgagcggcggctccacgctcgcgacttccggcgttctcgcgaacttctatgacttcaaggacatcgacctcaccgccgagtggtggaaccagcgcgcgaccgaacagctcacagtcaacggcaagtgctacctccagctgaactacatcccctacaccggaatgctcttcacccactgtatgttctacaaccacagactcgcggagaaatacctgacggaaagcatgtacgacctcgtgcggaacggcaagtggaccatagacaagtttctcgaggtcaccgagaacgcgacgcaggatatcaacggcgactcgaagtatgacgagaacgacaactacggcttcatggcgtccttcggaagcgtcggaatcttcacctactcctgcgatcaggacatggtcagcgtctcaaaggacggagaggtcaagatcgagatctacaccgaaaagatgcaggacatcgtcgagaaggtcaacaagctctgctacgagggcaaccgcagctatgtcaagggagtcgacaaggaagcggcaatcgcgaagatgttcgcgaacggtcagagcctgttctacgccggattcctgtccgacgcgctgctctacttccgcgatatgaaggacgactacggtatgcttccgttcccgaagtatgacgagaatcaggagcactattacacgagcgtcagcggcggaaccggaatgctcggcataccgctcactgtcgccgacccggatttcaccggactgatcaccgaggcgctcgctatcgagagctacaacagcgtcagaccggctatctatgagactgtcatggagaacaagctcctccgcgacgaggattctgtcgaaatgtacgagaccctgctcgacggcatcagagtcgagttcgcggtggtctaccactcctcgaacagcgatatcccgttcaccctctggaacctcaccgagaagaagtcgaccgacctcgcgtcctatataaactcgcgcggtccgaaggctctcgcggcttaccagaagatcgtcgacgcatggtacgagtgattatctgaattataccacaaaatcaaggatatgtcaagagcataagctattgacatatccttttatta

SEQ ID NO: 1995 - DNA, 12252 bp, Unknown
  16S sequences of unknown bacteria
cttcgcccgccgcggcggctccgccgctgaaaccgcccttcgggcggtttggcctgcggccctaccgcttacccctaaaccttgcaaaatcccgaaaggaggaaccacccatgcctcgtcagtacaccacccgccgtgagcgcaaacggctctggtgcgcctttttcctgctgctggccctggccgccttcctcctttggcaggagctttccccgtgggagaaagcccctgcccccaacccgcccgccgcagggctgaccctccgggtcattgatgtgggtcaggcgcaaagcctgctgctgacctgcggcgaggacgccatcctggtcgatgccggagagtatgccgcgggcggcagggtgctggccgccctttcccgtgccggggtgaagtcgctgaccgctgccatactgacccacccccacggcgaccactacggcggtatgcgcaccatgttggagaaaaccccagcggccgccttttatacctccgccgtcccggaaaaccagctccctaccacccagtcctacgaaaagctgctaagtaccctctcggagcaggctattcccgccgcctatctttttgcgggggataccatcccccttggtgatgctaccgtcaccgtcctcagccccgctcggggcaccacttgggaaaacctcaataactattcattggtgctgcgtgtcacctacggcaataccgccttcctccttatgggggatgccgaagcagaagtggaagaaaccctattggcggtaaagaccgaactggctgccgatgtgctggtggtggggcaccatggcagcgccacttccagctcggaaaatttcctcaaagccgttgccccacgctatgccatcctctcggtgggggaggataacagctacaatctgcccaataccggcgtcctcacccgcctcaaagaacagggtgccgctctctaccgcaccgacctgcaaggcaccgttaccgtcaccagtgatggcgaaaatctcaccatcaccaccgcaaaataaaagcggcccgcatttttacaggccgtcagtcccctatatgggggcggtgaaaatcgattccggctgtgtcgccccctcgtcaggcgtcagcccgccttcgtcgggcgcaagcctgccttcggggtgctccttgccgcctctctattttccctcgccccccgattcatgccaaaggagatcctatcatgtggagcatcgaccgcatcgagggcgatttcgccctctgtgagaataccgtcaccggcgaaacctgccgcatccctctcagtgagctgccgcagggaataggagagggcgctctgctgcaccgcacccccgccggttggcagcgcgccgaagaagcggaacgcgtccgtcgccgtcaattggccgccaagatccgcaatttgtttggcccatcccccttcgaaaaataaaatcccacgaaaggatcgactccatgaatatcaccgtctatctcggctcctcccccggtaatgatccaaagctgaataccgtcgtccgcgcccttggccgctggatcggtgaaagtggccatgccctcgtctacggcggctcccggaccggcctgatgggcgctttggcggaaagcaccttgcaggccggcggggaagtcaccggcgtggaggtctccttcttcgtggagcaagacctccagtacgaggggctgacccacttttatgtcgcccgcgatcttccacagcgccgcaccaaaatgatcgagctgggcgatgccttcatcgcctttcccggcggccttggcaccttggaggagatcagcgaggtgatgtcccgtgtcgccctccataagctcgtcgccccctgtatcctctataaccttgatggctactacgagggcctgcgcgcgcagctcacccatatggtcaaaatgggcctctgcatccaggaaaagctggaaaacatccactttgccgccgatctcgcggagattaaaaccattttggcaaaaaaataatgccgcaccaaccgcaaaagggagactgcaagcatgaaagaattcctcgaaaaaataagaaagccgaaaacgggcatcccgctgaaacggcagcttgccgccaccgtggggattatcctattgggggtcacactcggcgttttgcaaaaatggcttgatgcaaccgctgccaataccctcccgctgctgctccaaaggctggatatcgggaactacttcggccgcttggcgatatggttcctgctggggaccgccgtctccgtttattcggcatcccccctgcgggccggcatcaataccttctgcttttttatcagcatggtggcggggtattatctttactgccactatgttttgggcttcctgccccgctcctatatgatgatatgggtcctgatgtccttcgcttcgttcttcctggcgatggtctgctggtatgccaagggggagggagctccggcggtgctgctatccgccgttattttaggcgccctgctggcgcaggcggtcaacttgaggatcgaccgggggttttatgtctaccacctgatggaggtctttacatggcttgccggcgtgctgcttctgcgcagaaggggaaaggaatttgcggtggagatggggctgtccgttgtggcggcggtcttgtatcagctcatcctgccgcactggggataaccccgcagccgaataaaaacccgaccgaggaatccccggccgggtcgttttttgggcaggtcaatcgtttcccacaaagctgcggaaggggaacgggcagatctcttgaaagctggaggtgacaaagctgccatcccgccccgcaaagtacagcggagcctccagcgcttcatcggcaaattccagcataaactgccggcatgccccgcagggtgccgcttcaccgcccttttcgccgccgtatatggccactgccgcaatccgccgctcgccctgcgctatcatggtggtgcaggcgttgcgctccgcgcagatggtcaggccaaggctcgcgttttccacattgcagccggtataaatcccgcccttttctcccaggatggccgcccccaccttaaaatgggaataaggcacataggcattttgggaggcttcccgcgccattgcgatcagccgatctctcatttcgttggatatcatacttgcttctcctttcgtggtggaatgattctgctttcattttatcacatctccccgcaaaagggaaggcgcatttcgcctatcgccagcacagcccgccccgccggggcagctccggctccatgtggtgccgcagccagccgcacagtagcagcacaggcagtgagagcatcagccacagaaagcaaaaaagcgggcacacctgccccagcacattccccggctgcgaggagtaatcccacacctgccaccccagccgcagattcaccaggcaccccaccacaaattcataggctgtgatgatccccgcggaacgcaggcatcgccgccatagggtatggtgggtccgccgctccgctgtgtaaacggtcagcagcaccagcccgccggtcaggctcatgctccagtgggtgtgcccccgccatatcgtctccagcaggctgtaaaagctcgcccccgtcccaaataccagcgctcggtccaatatctttttccccataaaaaatccccccaatggttccatataccactatggttccatcaaggggccattttattctgttttctgccgtgaccgtccttcggcgacggtaaaaatggattccggctgtgtcaccccttgacaggcatcagcccgccctccgcttcgctccgccgggcaagagcctgcctgcggggttccttgccgcctctccatttttcctcgccgcctcatttcagctctactaccgtcacgcccatctcgccttcgccgtacatgccggggcgctggctcttcacaaagctcagccgccgcaggtgctgctgcaccgcggcccgcagtacgccggtccccttgccgtgaataatggtcgcgttcttaatgcccatcatcatgcaccggtccaggaagcgatccacctccatcaggccttcgtcgctcgccatcccgcggatgtccaactcggtgcgggcctcccgctcggtgttgccgggacggctggtgcggctgccgccggtgggcgtctgtttcttcttggggggcttgggggcgtcctccggcagccgcaactcgccgggctcgcacttcatcttcatgttccccagctggatctgataagccccgtttttatccggcccggagatcaccgtcccctgccggttgatggccgccaccgtcaccgtttcgccctcccgcagcgcccgcggcagatgatactcttccgtcttgcgctcctttaccgggtcggcggtgtcccgcagctcctcaatgcgccggttgtagccctgccgcatcgccgccaccttctcgctgaaatccgccttgtccttctgcttcttcagctcctccagctcgttcagcagcaggtcggtgcggctgcgggtacgctccaccagggcgcgtgcgttgtcccttgcctcggcctccagcttctccagcgcggcctcgtgcgcctcggtctgctttttcatctcggcccgcagccggtcggcctccccgcgggcggtctcagcggccgtcacttcgttttccagctgctgccgggtgctttccagctcgcttaccacatcctcaaagcgggtgttctcactggaaaccatgctcttcgcctcttcaataatttcctccggcaggcccagccgccggctgatggcaaaggcattgctgcgccccggtacgccgatgagcagccggtaggtgggggagagggtcgccacatcaaattcgcagcagccgttttccaccccgtcggtctgcagggcatacatcttcacctcggcgtagtgggtggtggccgccagccgcacaccccgctgccgcagcgccgtaatgatggaaaccgccagcgctgcgccctcggtggggtcggtgccggcccccagctcatcggtcagcaccaggctcttggtatcggcaattttcaagatctctatgatcttgacaatgtgggaggagaaggtggaaaggctctgctctatgctctgctcgtcgccaatatccgccagcacatgggtaaagaccgccgcccggctcccggtcgccaccggcagcatcatgccgcaggccgccatcagggtcagcaggcccagcgttttcagcgccacggtcttgccgccggtatttggcccggtgatgaccagcgtatcaaagccatcccccagccggatatccaccggcaccaccttttccttgttgatgagcgggtgccgcgccttcctgaagtcaatgatcccttcctcattcagctccggcaccgtcgccttcatcttgtcggccagccggctcttggcaaaaagcaggtccagctgcaatagcgccgcaaagctgtcccgggtggcgtccgccacctgccctatgcgctcgctgaattcctgcaaaatacggtcgatctccagctgctcctcgttttgcagcagccggatctcattattggcatccaccaccgccatcggctcgataaagaccgtcgcaccgctggaggaggtatcgtgcaccaggcccttgacctcatttttgcattctattttgaccggaaccacaaagcgcccgtcgcgcatggtgatgatcggctcctgcagcgccttggcgtattgcggcgagcggatgataccatccagctgttcccgcaccttcagctgtgctttgcgaattcggcggcgcagatcattcagggcaggggaggccgtatcggcgatctcctcctccgagagaatggcatcgaagatatccttttccagcccctccacgggcgccagcacatggaacagatcatcggcggcggtaggggtctcgccctgtccccgccacttttttatggtgcggatggtacgcagcacccgtgccacctgcagtatttccccagcggaaagccgggaacccagcttggcccgctgcagggcgccggtgcagtcctgtatgccgcccagccccggtgttccgtaccgggcggttaatgtattgatatccgcggtccgccgcagggcatcgcaggcgtcccggtagttatcacagggctccagccgcagcgccagttccttgctggccgcgcaggttgcctgctccgccagcatttccagcacccggtccagctccagcgtccggtggtgtttgttcatttttctccctccttctggagtacatcctccagcatcacggcataccgcgcaaagcgctccgccaaatgcccgatcaccattccttcgcggcaccgttccagcagctcgaccggcgtcagccaggcatagtccacggtctcggtgctttgcagggctattttcggctcctccgccagccgcagcaggtaggtatcgctaaagatccggggcgttatcacatggtcaaagaggatcagctcctccttttcgaccttgatcccggtttcctcatacagctcccgcaccgcagcggtgcggctgtcctccccggccagggcgctgccggtcgttacctcccaatagccaccgttgtgcttctgcgggtgccgcagtgtggtcaatatcctgccctcccacaccgtaataatctccacgcagagatgccgcgcccccgccggcagcgcgtctccccgccggtgcagcagccccagcggttctcggttttcgtccagcaggtcccagtattccgtcatagtttatcctttcccatctctgcaggccgcagattcggcccgcagggcctcgcttcgctcgcggcggctccgccgcccggcccggcctccggccgggccgccctgcgggccccgctctttgcccggtctgcggccctgcggcggccttcggccgcccactcaccggttcttctctatcacaataaaaaccggcgggcagttgggccggttatagaattgctgcaccatcacggtgtacttcttggcgtccagcctcgccagatactccagcagcgcgtcatgctcggcatagccgctgtccccgccgtagtacaggcagatggtcacaaacccatcctccgcaatcaggtgaagcgccgcctccaccgcagggaggctctccgccgccgtggtgccgatggcatggtcgccatggggcagatacccgaggttaaaaaccaccgcatccgctgccggtacatactccgccattctgcggtggcttgcgtggatcagcgtcgcccgacccattagcccggcttcggtcagccgctgccgggtgctttctatcgcgtccgcctggatatcaaaggcgtacaggtgccctgtttctccgatcagacggcacagcacctcggcatcccggccccgcccggcggtggcgtccacacaggtcatgccggggcgcagccgctcccgccaaaaggcatggcacagctttagggcattctggtcgtagtaggtcatacgcggtttttcagctcctcctccacatagcccacgcagtcggcaatgcaggtatcgcaggggacgaccgggcagccggtcctgcccttcagtacctggcagatgcagctgccgtgctccgccaaaaagcgcgcggtcagggtggaggccagccccatggtggcccgcttggtggtgttgggggcgtccaggtccccggcgctgttcagcagccccatacaggccactgcaccggtgatggcgccgcaagtctggctcatgtcacccatgcccagtccaaagccctcgcccatccggaaggccgttacctcatccacatccagctccggcgcaaatacacacgccaccgattggaagcagttgtagcccttcccgtgcagctctattgctttttgttgtttctccgtcatgatgaacccgtcctttctcttgtctcaaaaatcagaaacatgttccgtaatatcgctctccgccctcgccctccgcgaaagcaggcttttggttttgtataaaatgcagatcgtcttgcaaaaaaccattcccctgttctcactttccgcgaaagcagatttttagctttgcttcaaatgcagatcgtcttgtaaaaattcagggccggcaggatccgctccacctggcacagcagatattgctccaccgcgtgggccagcaccggcagattttcctcccccagcttaaattggaacagcttctcaaagtcgcagtagatgatgtgccgcatggcggcaaagacccccggcggcagcggcagcagccccaccgctccgctcggcgcgcaccccgggcagcaaatgctcccgcccgagggatcaaaaagcaccaccccatcctccggcagcccgccgcacgcccggcaggcaatgagatccggcatatagccggtcagcgtcagcagccgcagctccaggatcgccttcagctgcagcggcggcagcttgtcccgctccaggcagtaaagggtgttcagcatcagccgcagctcctccaccgccggctcgttctcaggtatcagctcgcagcacagctgcgcgaagtaggtcgccagcgtcagcttttccaggtccccccggatgccgaaaaacagcgtattggcctccgccttgtcggcaaagcaccgctcacggttctggaacagcacaaagtgagaatagcaaagcagctcggtggcaccagccatcgagcccttcatgcgtcccgctcccttggcgtaagcggttatgatcccccggtcggcggaaagcagcgtcagcaggcggtcctgctcatccagcttgcgttcccgcagcaccagagcgtcggtcactgtctgcatcggtcggctcctttggggcggcagcctgcgccgcccggtacgctaggtaatcttccacccggccgctgtgccaaaaacgctcccagcagccggtcaggtcattgtttcggtcctcggcaggtcggttcacatcgggcgccccctcgcagcagattttctactctcattgtgcgcccggcgccgtgggttatgttagggaatttttgcccctgccccacaaaaattttccgcaagctcgcagattcggccgaaggccaaaccgtccgcaggacggtttcagcggcggagccgctggctccggcttcgccggagcggccttcggccgctcgtcgtcgcgggctgcgctctctgtcgggtcgctatccctatgggatagacaaccctccggcgctccgccgctcctcctctccccagcgggccttgcgtcccgccgggggccccgggggcttctttgccggcccttgcaggtaaccggttcagcgcccctagcgggctgatccctctgcggcgccctgccgggcgcccgcgattatatcagtttggcttaccgctcctcggtaaagccaaagttccgcagcatccgctcctcgttgcgccagtcctccttcacctttacccagcactgcaggttcaccttgcagttcaggaaagcctccagctcctcgcgcgcggcggtggcgatttttttcagcatcgcgccgcccttgccgatgatgatgcccttgtggctcttgcgctcgcagtagatcacggcgtcaatatcaatgacaggcccgttggcgccctcccgctccttcatggtctctatcgtcacggcaatgccgtgcgggatctcctcggaaaggaaacacagcgccttttcccgcagcatctcggcggcgatgacccgctccggctggtcggtcagcatgtcgtcgtcaaagtagtgtggcccctcaatggcggcctcgtgcagcagcttccgcaggagcgctaccccatcgccggtcttggcgcttagggggacgatctgctggaagtcatacgcttcgttcagcaccgccatcatcgggatgagctgctccttgtccttcagcaggtcgatcttattgagcaccgccacagcgggcaggtccagcttcttaaactgctcgatgagatccatctccgcgcgggtcagcttttcccacggctcggaagcgtccgtcaccagcaccgccaggtccacatcggaaaccgaggaccccacctgccgcaccatatattcccccagggaattgcgcgcccggtgcaggccgggggtatcaatgaataccagctgggtcgcgccctcggtcagcacgccggtgatgcgggtgcgggtggtctgcggccggggggatacaatggccaccttctcgcccagcagggcgttcagcaggctgcttttgcccacattgggccgccccactatcgctataaatgccgatttctgtacttctctcatgcgcttctcctcactccacataggtgttgtcgcgggtcagccccagccggcccagcgcttcctcttccttttcccgcataatggtcttttccaggccgccgttcacatggtcgtagcccagcagatgcagcatggagtgcaccgttaggtagcccatctcccgctcgaaggtatggccaaactcattggcctgcgccacggcgtgctccaccgagatcacgatatcccccagctgcttgcagccggtatcggggttgatatcgtactcgccgttttcgcccaaagggaaggagagtacatcggtggcggcatcaatatgccggaactggttgttcatctcccgtatcttctcgtcattggtaaaggtgatattcacctcggcgtccccctggaactgctccatccgcagcacggcggtgcagcagcgccgcagcatcagccgcagcccggcgggtatttttacggccttctggtcgttggtgataatgactttcagcttgtccatgttatttgcctctccttgctgtatcttgcttcgcgtcctgcttgctgtaatatttctcgtaggcccttatgatatcctgcaccagcttatgccgcaccacatccttctcgctaaagcggcagatggcgatatcgggaatatcccgcagaattttgctcgcctccaccagcccggaacgcttcgcgtccggcaggtctatctgggtcacatcgccggtaataatggccttggaattgaaccccagacgggtcaggaacattttcatctgctccggggtggtgttctgcgcctcatccaggatgataaagctgtcatccagtgtgcggcctctcatataggccagcggcgccacctctatgttgccccgctcctggtatttctggaagttctccgcccccagcatatcgaaaagggcgtcataaagcggccgcaggtaggggtccaccttgttctgcaggtcgccgggcaaaaagcccagcttttccccggcctccacggcgggccgtgtcagcacgatgcggttgacctcctgcgcgcggaacgccttgaccgccatcgccaccgcaaggtaggtcttgccggtgccggcgggcccgatgcccatggtgatggtatttttgcggatggcctccacgtatttctgctggccgatggtcttgggcttcaggggtttgcccttggcggtaatgcagatgacatccttgcccaaggcttccgcctcctgctcgcgtccttcctccaccaggctcatcatgtagcgtatattctgcgccgaaagctcctcaccggattccaccatcttcagcagcccttcgatgcaccgggtgcaggtcatcaccttttcggcgtcgccgctcaccttgatatcggtgccgcggaacaccaccgagacgccgtagccctgctccagcattcgtatattttcatcggagttgccaaagagggtcagcgcgtattccattcgttcaaagttgacgatttgttcggtcatagccgtcctccttcgcacctgttttctacattagcttattgtatcacatctcccgtcaaaattctatgaaatattcatagaattttagctataaatttgtatcattttttagcattgcgaaggaaagcaaatctccttattactggctgccgccggggcccctactaggctaactggcgacccgcgacccatagcctcccttgtgtaaagggaggtggcacggcgcagccgtgacggagggattgccgatacaagctatgccagtttcatctcgccttcggcgtcgcaccgccctaaaggctaccctgtgtaaggggcaatgaagtggcggcgcagccgtgagggaggggttgccggtataaagtttcatctcgcctagcggcgtcgcggggccttttgcaaaggcatagttagcaccgctcgccgcgggggccttccttttgctcctgcaaaaggaagcaaaacagggca

SEQ ID NO: 1996 - DNA, 4624 bp, Unknown
  16S sequences of unknown bacteria
caataagctgcaaaaattccgaaccaaattcaaaatcgaaaacaaaaagcagtttttaaaaatatctctgagtttcagatcaactgttacgatcatcaaaaacacatggaacgtttcaaatgccacaagcaacgccataatgagaaccatcgctttgaacacataattcataaatcccatgttcaggtgttctccgtaaaacaaataagaagcgtagcaggcaaacaaagcaagagaattaaataaaaacgccagcgctgattgtttataattttccttaaactgctggaaaaagtctgacagtaaaaacactggcgtttgcgtggcaaaattccggagaatgtaaatcgcgcccgccgtagccgggccagcggtaaaagttcctaccagaaaaaaggccaaataagccagcgttgcattatatggtgtcagcaacgtgccggcgatgagcggaggaatccagaaaagaatatataacaaatttaactggatcagcttccaaaacttacggaaaaacaactcaaaaaacagaaaaaaacggcgtttttgctgttcttctttctcaatgcccgggcctggtttagaatagttaaacatattggaaataagtcccattggatgaatctctcctgatttttcacattacggaaaatccgttctattttatcataccataaatccgaaaaatttcatatcttttctgtgaacaatctctcattttgtcatatgggagagaatagaccgcccaaccaataactgcaaacactgtctattaacgctgctgcaaacagacccgccgccaaaaaagaaaactcaaggcaatatggacgggcggtcattttaccagaacctttcatcgctccatacaaaccggtagaaaaacgaaatgcgctttgccccgcccagagcaaaatcaatgcagtcaaaatgcagtttggtaataaaagtagcgccacataacccattccgctgattccgtatacgctgtaaatccctccggcagtcaaaccatatcccataccgcgaaacaataaagcaagacagatcaacggctgccctaccgcacaaaatccacatagaaaaatcgccagcaaaaaaactgctgatccagccagagactgtaaaaaagtttctgcaatcgtttgttcaccgcgccctcccgaaaagcctgctaccaactggcgaataaatccccgcaaactgtctccatttgcccggattaaacaagcgccgagcaaaacgccgaccaaaaacaacactgccagcaaaaaaaagatttcattgcgataaaaaagttttcggataccacgtttaaattgctgtcctcttcctgctctttttaccaagtcctgaatccccctttgcctattttgcaagacgaactttacaatgcagtatatggacaagaagggaaaaaaagaccgatgaagccagagtatccccctcgtcttatctccaatcaacatttcttttctaggcctatcgtacccgaaaaaaataacagagaaccgtttcaccctaaaatcaatctcttttcacttttcctcttaaaagcttcacattcgttttgcaattatttctatttttgtttataaggaggtaacaatcaattggtaagatatagtcattccaaggaatcattaccgccgaggccatcgggtatggacggaataccgaaccaatgatcaggcggacaaccaattcttcctatattgataggatttttatacagcatctcaccaaaaaaccggcaggttcttttgaactgccggttttttggtacttatttgtagcataaatgagattcgttttttccattctgtttgcaattaaatttatgcccctatcttacctgcccatttccttcaatcacatatttataactgcataattcctctaagcctaaagggcctctggcatgaagtttttgtgtcgaaattcccatttcgcaccccaaaccgaattctcctccatccgtaaatcgggtagatgcattaacatagacagccgcgctgtccacatgcgcagtaaagtatcgagccgcagttgtgtccgctgtgatgatcgcctcactgtgaccggtggagtgaacagaaatatgggaaactacttcctccacggaatccaccaccttaactgcaagaatgtaatccaaaaactcggtatcaaaatcctgttcttttgccggaattccagaaattatttttcgtgcacgggcattgagccgcagttctactggatgatccttctgctcatcgaccaaccgccgttttaattcaggcaaaaaccgacctgcaatgtcagaatgaaccaaacaaatttcttctgcattgcaaacagaaggtcggctggttttcgcattttcaatgatatccagcgctattccaaattcagccgctttatccacgtaaatgtggcaaatacctgtgccagtttgaatacaggggacttttgcattggcaacacaagtagaaatcaggcctttgccgccgcgcgggatcaaaagatcatatcaaaaccattttccattgccgtttttaccgctttcagcttcgttgccatgccgccgcaagacaagccgctccccttttctcctgccagcgcataaatctccggcgttaacgcttccaccaagggaatcagacaggcatccggatccttgcggggatctgaggtaaacaggccgtcgatgtcgctgagtagaaccaacagttctgcaccagcacatttggctacaatcgcggccagagtatcgttgtcccccacggcaatttcttctgtggcaatggtatcattttcattgacaatcggcaatgcacccaattccaacaaccggtaaagcgtgttttgaaaattcacccgccgtccgctgttttccaaatcctctccgctcaaaagcatttgggcaaccgtatgattatactcggtaaaaagcttatcataaacgtacatcagttcacattgccccaccgcagctgctgcctgttttgttgacatatcacattgggccggcagggcagcgacagtttacctgcacccattccaattgcaccagaagaaactaaaataatctggtgtcccgcattttttaaatcgctgagcacccggcacagctgttctacccgccggatattcaaccgcccggtcgtatgtgccagcgtggacgtaccgacttttaccactacccgcatcaaacactccctcttatttttgcagctgtcccaagctgctggctttcagatacgcgttgataaacccatccagatctccgtccattactgctccgatgttgccgttttcaaacccggtacgatgatcttttaccaatgtatagggcataaatacataagagcgaatctgattgccccatccgatatctttctgatcgcctttaatatcctcaattttttccaaatgctcccgctctttgatttcaatcagtttggaacgcagcattttcatggcaacttcccggttctggtgctggctccgctcattttgacaggccacaatcacgccggtgggaatatgggtaatccggatcgcagattcggttttattgacatgctggccaccagccccactggaacgataggtatcaactttcaaatcttcttcccggatctccacagccgtatcgtcatctatttccggcataacctccagcgaggcaaaagaggtatgccgccggccagatgcgtcaaagggagatacccggaccaatcgatgaacccccgtctccgatttgagataaccgtaggcattcattccttctaccaataccgaggcgcttttcacgcctgcttcctctccgtcgaggatatcgagaattttcactttaaacccatgccgttccgcccagcgggtatacatccgtagcagcatctgtacccagtcttgagattccgtaccgccggctccggcatgaaaagtcaaaatggcgtttttcccgtcgtattcgcccgacaataaagtcaaaagcttttgttcctcataataggcggccagcgcttgatagagagactggatttcttcataagaagaatcatcctgctcttccatggcaatctcaatcagagtgatcaggtcttcgtaatcactctccatttttgtgtaagtggcagcctttgccttgatctggctgatctgctgcaaaactttcgaagagttttccaaatcatcccaaaaattggggtctgctgtttctccttccagttgctgctgttttttcagcaaatcgtccatcccaatggcagaacgataatcatcaatctgcggttttaattccagcagtttgcttttcagttcttctaattgaatcataatatctccttatgtcatagaattttattggttgaaacttcttaaaaaatctgctcaagcggcaaaaaaactcctttgaaaatccagtgaacccaaaacaaaaacctatcagccatacgcctgcctttgggctttttgttctatatcttgaatgactttctaaaaaacttcaaaaggctgtagctgcaatcaacagcatatggatatccgtataaaatcaagtgatacggctatttttattataagaatcatttaatagatttctaattatctctttagatgttcttatatgccggtatag

SEQ ID NO: 1997 - DNA, 6752 bp, Unknown
  16S sequences of unknown bacteria
ctgatattcatgttaacaatgaccggcttagtcgcgccgtcaggcagcgtgagcatatcaaactgttcgcgcagcttggtggcggcaatgtccagatcggttccctccacataagtcacctggatctgagacatggaatcggcggaagtggaactcacttcatccacaccggacacagacatgacagcctcctccagcgggcgggtcaccaattcctccatatcgctgggagatgcgccgttgtaataacacaccacaaccgctgcgggataattcatatccggcatcagcgccatctgcagctgcgaaacaaatgtcagaccgaagatggacaccataatggcggccagcagcgtcattaccttatgctggatacaaaacttggaaatactcatgaatcgttattcctccccggacacgattcgcacgggagtgccgtcggttaaatacgtctggccgactgtgaccagctgctgtccggcggacaggccggaggtcacctcagtaaccccgtttccggtgagtccggtcgttacttctgtatattttgccgtatcctcttccaccacaaacacatactgaagatcaccattggtcaggatcgcatccgaaggcaccacgattgcattctcagaagtttctgtatggaatgtcacatcggcaaacatacccgaaagcaggcccgtaacgtcggcaggcacagagagggtaaccgtatacagcttagtctgcaggttggccgcccggtcaacggagcggatcgtgccaacaaaagacttccctgctgcgctgacagcaatatctgcactgtcgccaatggtcagcttgggtaccagtgcctcagacacagaaaccgtcactttcatctgatccacgccgtcaatgacagccaccggcatggatgtggaaatcatactgttttccactgcgttcatactcacaagcgtaccggaaatgggcgcaataacatttccgttgtcatccacattttccagtgcaatgctcagctgttccacattggatttagcactttgaataccggcttccagctgcgaaagcgtagcatttttctgcgccacagcagattgcaactgcaattctgcctgatcgatttccgtctgcgaagcggcaccaatttcataaagggccttagtattgtccaggtttttctgatacagggcaatttgagattcaaacaccgcagcctggtcctgatagctctgagtgctggattgatagctgatgttcgctgcatggtaagaagccagtgtactgccaagatccaacgtacagatcacctcgcccgcctgaacggagtcccccgcccgatggtttacggcagtgcactttgcactggtggcaatataaatagaccgctcattgtcggcgcccacctggccggacaccgtattttccgctgaaatcgtctccgccgaaaccgtttcaatctgtacggcagtccccgccatttgctcaaggtcggaaccttcctgcgaatcagagccgcagccggtcaatgccacagtcaatgccacagtcagcgccagagcggcaacgcgtttgtgctgttttttcttcatgttctgtgtcctcctgctcagcccatcacgccgctgttgattgcccattcataagagcggtaagcggtatataggttgtgttttgccgtcgtaacctcatcgcgcgccgcagcgagatcgtcctgggcggtcaaataggtgttctttgaaatggatccctgctcatatttgagcttctgtgcttcaaaatccgcctgctcaatggccagcgctgtttccttggctttcaaaatctgatgataatcctttacagaggcgcacagggcacgaaactgcgcctcaaagctctgctctgcggcctgataggtatattgcgcagcttgccattggtgctccgccatcttacgttcatatgtatttttgccgtgctcttttttggcttctttatagtcctcttccgcatcattcagcgtcacccgagccgcatagaggtcatagctccgctccttggcactttctacttcattttcataatcgatggcttctaccagcgcatctgaaatctccggaacctctgctacgcgcattcttccggtcacgtccgcgcccaccatcatttccagttgtacaacagcgccgtccatgctgctttccagcgtagcgatgccgctttcaatctgtgtgcgtccgcctttggcctgctgcagctgaagtgcggaaatctgccccagctgatagcgcagctccatctcctggatggtgcggtccatggcctcgagggagcgttccagagcggaacgtgtattctgcagttccaatactgtcatatacaggttttctgcacccacgaccacctggtcctccaggttttccatttggcggattccatcctgtgctgttttctgcgttttaccgctgcgaatatcggcaatggtgtcctccagcgactcaatgctggattcgagtgaagcgacagtagcactggccagtgctttggtcaacaaattatttacggtcacctgtccatacagcttcagatcgacattgctctcttctcccgatgtaagcggaggttctacggaagactgcagctgcccgatcagcgcttcaatcccgtcctttgcatcttccagttcatccagctggtcatccaaatcccggagaagctctttatagtccgtagcttccacggcggcaatattttcttccagcgccaaaatcgtcagattgttgttgcgcacgcgctcttccacctgcgcaaaggtcaaatccgccacaggcgacaaatccggcacattcgcatccgcttcgttctcttgtgttgtctcctgtaccggtgcggcggcagtgtccgtttctccctgcgcgccctccgcagtgctttttgtggctgcattgtccgccgtcgtttcactctgcgcttccgcctgagcagtctgtgcgctttgttctgcagtatcttcctctgccagcgctgtggcaaacaaaacgccgctcatggccaacgccagcagcagcgctgtaattcttcttgacatcggtcgtattcctcctctgtttagtctctctcctgctgaatgcacacaccgctttcttccgaggaatacttcggttcaaacgggtgtgttccgcaaaaggcggtaatccgccggatcagccggatatattccctggcatccttttcgcccaattcatccatcaattcctgaagataccgaagtatcacatcttttcgtacttttgccgcattctggcctgcctccgtgatctggatcagcactttccgccggtcatccggcacaggcatgcgccggacgtagcatttccgttccagctgattaatcagcgtggtaatccgcgccgtggacacattgaaaaaacggctcaactcagtcggtgatacagggctttcctgttcactcagatattccagcgtcgcgcattctcccatggtcgcaacatggatactattataaggtccgcgcaccaggcgccaaagttcatcaaacatttcgcccgccagggccttgcttttctctgttcccacgatttttcccacaaccttctgcttttttgttccattgttctcctgcactccaggcgcagcagtgctgcataaattgcagcttaatctctaaccacattaatatctaacgctattagttttctgtgcaaaattatactgtgtattgccgaaatgtcaatagacaaaacggttgttttgtatcatgtggattcgttttcctccttcccatggagggctgtcccctccggctatttcttttccctgccagttgtgttatagtgggggcggccagatggcaggttctaaccgcctccgtttgggtcttagatagtcgcttgcttgttcagggctgggcggctatctttttttactgcttggggattgcgtcccggataatgcgggctgcgtcctgcgggtcttttgctgtggcctctaccagcttggtcagagtttcaagtaagatgcaagttctgtctgggtcatgctatcaatttccattcgtatacctcctgcctgaacgaaaaatattcggggccgcagcactgctgcggccccgaatattccttttctaagctgacagccagcgctgtaaaaacatcgttttacggttccacgactttaatattgcccaccggacaaatgtctgccgcttcccggatggcggccatgtgctgggagaagtccgccccgatattaaccttcaccttatacacatccgtgtcgaattcaaacacttccggacaggctcctacacaagccccacagccaatacagtctttcccaaaatcaatacgcatacaaaatccttctttctgtatcatcaatacgtttcataatgcccgtaacagatactgtccgccaattgctctgccgccgccggatcttccagcaaatacgcagcgatcgtcagagcaaatggaatcgccgttcccatactgcggctggtgatcaggttgccgtccaccaccacctcaccaggggcatgctccgctccggccagcgtatcctccatgccgggatataccgtcgcccgttttccctgcagcagacccagtgcaccgagaatactgggcgcagcgcagatcgctgccaccagttttcccgacttgaaaaagctgcggcaggtgtccgttaccaaaggacacgccttcagattcggcgtgccgggaataccgccaggcagaacgactgcatcgaactgcgccggatccacctgttccgccagcacatcggccgcaatctttatctggtgggaagaaacgacctgctcccgtcccatgatggacgccgttgtcaccgatattcccgcccggcgcagaatatctaccacgatcagcccttcacattcttcaaatccatcggccagaaacagcaatacttttttcatgcgctttctctcctttccctgcgatgtacgtgtttatagagggagttgcaccgccagacgggctcctcaagtatttccgcccaaacggcctgctcatcactttttaaaactgtctttcaaactgacagaacggttaaagaccagatgccccgggcaactgtcctgattgtccaggcagaaatatccctgacgcataaactggaaatgcgcaggcgctgccgcatccgcaagtcctgcttccactttgcagtttttcaaaactttcaaagaagccggattgatacagtccaaaaagtttttgtccgcgccgtcgggatcggcatccaaaaacagatcgtcatacaggcgcacctccgcgtccaccgctgtgacagcatccacccaatggatggtggcgcctttgaccttgcggccatcggccggatcgccaccacggctctccgggtcatactcgcacaaaatctccgtcacagcgccggtttcatctttgacacagccggtacaggtgatcagatatgcccctttcaggcggcattccggaccgcccgggaacaaacgcttgtatttcggcaccggcgtctccaaaaagtcttctgcctcaatccacaaatggcgggaaaacgtcacttcgcggctgccggaatccggatccaacggattgttttccacgcaaacggtttcgctctgcccctcgggatagttggtaatcgtcaggcggatggggcgcagcacagccatgacacgctgtgccgtgacattgagatcctcccgcaggcagtgttccaggaaactgtattccaccgtgctgctggccttagacacaccaatgcgctcacagaagttacgaatggaggccggcgtatagccccggcggcgcagtccgcacagcgtgggcatacggggatcgtcccatccagaaacctttccttcctccaccaactgacgcagcttgcgtttgctcatcaccgtgtggtcgatgccgagccgggcaaattcaatctgacgaggcttagccggaaggtcacagtgctccaccacccaattgtacagcgggcgatgcgcttcaaattccagagaacacaagctgtgggtaatgtgctccagcgcatcttcaataggatgggcaaaatcgtacatcggataaatgcaccatttatccccctggcggtgatggtgggcatggttgatccggtagattaccggatcgcgcaggttgaaattgcccgaagccggatcgatcttcgcccgcagcgtcatactgctgtcgggaaactcaccgtttttcatgcgttcaaacagcgccagattctcttcaacaggtcgatcccggtaggggcactgcgcaggggctgcagtatccccgcgcatttgacgcatttgatccgccgtcagctcgcacacataggccagaccctttttaatcagtcccactgcacattcgtacatttgatcaaaatagtcggaagcataataaaagcgatcgtcccaagtaaagccgagccagcggatatcttctttgatcgcatctacatattccgtatcctctttactgggattggtatcatccatccgtaaattacacaggcccccaaacttttccgccgtgccgaagtcaatgcacagcgccttgcagtggccgatatgaaggtatccattcggttccggcggaaaccgagtatgcactgtcattccttcaaattgtccgccgggcgcaatatcttcttcaataaaagcatggataaaatttctcccctcggaagtttcttccatagaatcgttcttgttctcttccgccatagccgttcactcctctgttcat

SEQ ID NO: 1998 - DNA, 11818 bp, Unknown
  16S sequences of unknown bacteria
ttacacagcacattcaatacttgcagcggcactacggcgtgaagctgtttcaataccgggacaagcacctgtttttgacggaggcgggggctgcgctgcgcagtgcggcgctgaccatggagcacgatgaacgggaactgatggaacacctgccgctgctgcagaaaggtatgcagcatctgcgactgggagccacgctgacggtgggcgaatacgcgcttccgccgcacttgggacgttatatgaagcgtcatcccgatgtggcgctgcacctggtggtcggcagcacccggcgcctgctggagggcctgaaccgcggcgaactggacgcggcggtggtggaagggtattttgccaagcgggagtatgatgcgatccggtggagtatggagccttatgtatgtgtatgcgcggcgggaagcgcactggaagggccgatggagctggaagatcttttcacgcagacgctgatcctgcgcgatccggagtccggcacccgggaaattttggagcgcgctttgctggagcggaattttcagctgtcagactttcggcgggtggtggaaatcaacgatttgacggtcatcaagcagctggtcgaacagaattgcggcatcacctttttataccgccgtgctgtggaacgggagctggaggaaggacagctgcgccaggtctttctgcggggctgggaggtgcagcacgaatttacctttctgtggagaaagggcagtgtttttgagcaaaattaccgccggctgtacgcaaagctgtgccagaatcaggaggaataagtataaacatggaatttatgatattggacgctatccagacgctgcgcacgccgtggctggatgggtttatggtgtttgtcagcagcctcggaaacaaaggggcggtctggattgcactggctgtggtgttgttggcgtttcccaaataccgtcgtttgggtgcagtggtggcttgcgcgctggtgctggatctggtggcgtgcaacttggttctgaagcccctcgttgcccgaccgcgtccctgcgacatcaatacagcactggattatctcattgcccgcccccatggatggtcctttccttcggggcacacggcggcgtcttttgcggcggcgtcggcactctggtttggaaagagccggttgtggatcccctgcgggattttggctgcgctgattgcgttttcccggctttacctctatgtgcattttcccacagatgtgctgggcggcgcagtggttggtattctctgcggtgcactgggggcgtttgcggtgcgccggggtgcggcacagcggaacaaagggtaaacggaaggcgggatttggggaaaatgcacagaaagaaagtgcagaaaaaacacgattttttcgttttcttcccggtattttgtgcgaaaataattgcaaaagcgaatcaaagggaatataataaaaaactgtgcttatctgtggacaagggggagcagcggctgaggctgtttccagcgccccgtccaataccatattattcaattcaaagaaacaaaaccgaagcggcgccggccgggatacggtacagccagtctgtcagaacgtaagccgggcggcacattatcattgaggggagccttttgcatatgcaggatcagaagttaagaaacgtagctattattgcccacgttgaccacggcaaaaccacgctggtggatgaaatgctcaagcagggcggcgtgtaccgcgaaaatcaggaagttgtggatcgtgttatggactccaatgatcttgagcgcgaacgcggcatcaccatcctggccaagaataccgccatccgttacggcgatgtgaaaatcaatgtggtggacaccccgggccatgccgatttcggcggcgaggtggagcgcatcctgaaaatggtcaacggtgtcattctgctggtggatgccgctgagggtcccatgccccaaacccgcttcgtactgtccaaagccctggagctgggccatcgagtgattgtggtggtcaacaaaatcgaccgccccgaccagcggatccatgaagtgatcgacgaggtgctggagcttctgatggatctgaacgccaccgacgagcagctggacagccccatgctgttctgctccggccgtcagggtaccgcgtcttattcacccgatactgtgggcactgacctcaagcccctgtttgaaacgatcctcaactatatccctgcgcctgaggcagacatagaggcgccgttccagatgctggtatcctccatcgactacaatgaatttgtaggccgcattgccattggccgcattgagcgcggcaccctgaagcagaaccaggagattgctgtatgcaactaccacgatgcggatgcgcctgccaaaaaggcaaaggctgtcagcctttaccagtttgagggcctttcccgcgcgcaggtaagcgaagcttctgccggcaatattattgctctgtccggcatcggcgaagtgacgatcggcgacaccatctgcgatccagcccatgtggagccgcttccctttgtgaaaatcagcgctcctaccattgagatgacgttctcagtcaacgattccccctttgccgggcaggagggcaagtttgttacctcgcgtcagctgcgcgaacgcctgtacaaggaaaccatgaaggatgtgtccctgcgcatcagcgaggtggaggactccatggatgctttcaacgtggctggccgcggcgaaatgtctctgtctattttgattgagaccatgcgccgcgagggatatgagttccaggtgtcgccgccccgtgtgctgtataaggagatcgatggaaagaaatgcgagccgatggaacgtttggtagtggacgtgccgcaggactatgtgggtgcagtgattgaaaagctgggccagcgcaaggcggatctgctggagatgaatcccgtgggcagccgtatgaaagtcgagtttctgatcccgtcccggggcctgttcggctaccgcaacgagtttttgaccgataccaagggcgagggcatcatggcttccgtctttgattcctatgcgcctttcaagggcgaggtgtcccggcgcagccagggttccatgattgccagcgaaaccggcgaaagtgtgacctacggcctgtataatgcccaggagcgcggcacgctgttcatcggtgccggcgtgaaagtgtatgagggcatggttatcggtgtgcaggccaagaccgacgatatgactgttaatgcctgcaagcgcaaacagctctccaacacccgtgcttccggctcggatgatgcattgcgcctgacgcccccgcgccagatgagcctggagcagtgcctcgagttcctggctgatgatgagctgttggaagtcacgccgaaaaatctgcgcatccgtaaacgtatcctgaaccatgccgaccgcatgaaggccatgcacggcaagaaataatttttgagtggttttagatggacatcccccggagaacgcgtttcttcgggggtgttttgctaaatgggtctgatctttcgacactttgcggcgatgttcatacttggttcatgattttttcttccgctttcgatatagtattatatactgctcatttttcacttgcggagcaaaacttgaaacagaagaggggagaggcggtctgtggcatattcctactgggagttggcgctgtattttttcttttattcttttttgggctggctggtggaggtcgggatctatgccattaaggaaaagcgagtgtgcaaccgcggcatactgacgctgccgctgagtttttcctacggcatttccatggtgttgctgatcctgctgctgcccaccctggaaagcaattacatttttcagctgttgatggcgctgattgtatcttcggcggtacgaaacctggcgaattttttgatcgaacgtctgggtaagggacgtattccaaaagacagtgactacagtatgttcagcggcgaactgggaaagagcacggtggcgctgctgattgccctggggttcctgtttgtatatctgctggtgcatcctgtggtattcttggcggttcacacgctgccccagtggctttccatcctttccgtgatcgtgttggcagttttgtcctgcgctgatgcggcggtgctgctgtatgtgttccatatcgatgaccgggacggagaaaacgagcagcggcgcagggagtactcccgggataaagcccgctttggccggcggatctatcagcttgtctggggccgcattgagcgggcctaccccggcatggaaaaggctcttccgggggaacgctgtcatgtgtttgcccagggaatctgctttgataagctgatctggatgtttatgatctgcgctcttctgggcgatttgatcgaaacgctgtactgcaagctgaccatcgacgtgtggatgagccgatccagtgttatctatggaccgttcagcattgtctggggtgtgggcgcggtgctgctgaccattgtgctgcaaaaagtggtgcagaaggacgaccgctatgtgttcctggcaggctttttcctgggcggcgcttatgaatatctgtgcagtgtgtttacggaagtgtttttaggtacggttttctgggattacagcgatatgcccttgaacatcggcggcaggaccaacctgctgttctgcttcttctggggcgtactggcggtcatttgggtcaaggtctgttatccgcggctgagtggctggatcgagcgggtgcccccggtgccgggcaagatccttacatggatcatgctgctttttatgatctgcaatatactgatttccgctgcggccatgacccgctatacggaccgtatggcgggaaaggcggcggataacgcggtggagttgtttttggatcagcgctataatgatgcgctggtggaatttgtgtggcccaatctgcggatccgggacagagcaaatacataaatactaaaagcgtccttgcataaaaaaacaggtgtggaggaaacgctggcggagaacagttgtttagaggttctgtgcattgacatttttcgtgctgttctttattatggggcaagtgtcctccttgtggggataaagatagaaggcggcctgtgggcggcagaattttagcgcggcggcatcgaaaccggttacgctggagagaaagaggaaagagtatgaaaggatttctgcgtaagtggaatgaaatcagtctgatcaagcgcatcgtgtgcggcctggcgatgggggcggtgctggcgctgctgctgccggatatctatgtcatcggcttgttgggcacattgtttgtgggcgccctgaaagccattgcgccgttgctggtttttttcctggtcattgcgtctctggcgcgggcgaaagcgggagctggcaatatgagccgtgtggtggggctgtatctgatcggcacctttctggcggcgctgacagcggttgcggcatcgtttctgttcccggtgaatattacgctggcagctgcagccgcgggatatgaggcggcttccggcattggcgcggtgctggagtccctgttgatgaaggttgtggaaaatcctgtgggtgcgctgatcaatgccaattatatcggcatcctggcctgggcggcggtgttcggcgtggcgctgcgccgggcaggagaagcgaccaaagagctgtttggccacatagccgacgcgctgacccaggtggtgcgctggatcattgcctgtgctcccgtcggtattctgggacttgtgtacagtgcggtgtcggaaaatgggcttgggatctttacagagtatggccggctgctgctgcttttggtgggctgtatgctgttcattgctctggtggtcaatccgctgatcgtgttctgcaatacgcggaaaaacccctatccgcttgtgttgaaatgtttgaaagagagcgggattaccgcctttttcacgcgttcttcggcagccaacatcccggtaaatatggagctgtgcaaaaaactgaagctggatgaggacaactattcggtgtccattccgctgggagccaccatcaatatgggcggcgctgcggtgaccatcactgtgatgacgttggctgcggtgcatacgctgggcctttccgtggatctgcctacagcactgattttgagcgtgctttcagcggtgtctgcttgcggcgcttccggtgtggctggcggttcgctgctgctgatccctttggcctgctccttgtttggcatccccaatgacgttgccatgcaggtggtgggcgtgggctttatcattggcgtgatccaggactcttgtgagacagcgctgaattcctccaccgatgtattgtttacggcctcggcggaatatgctcaatggcgcagacagggaagagacctgccgatctgaagcgtagaaaaaaacgcagaaccggaattccggttctgcgtttttgcctgaagattgcttttacgctttggtatagaagggttccacaccctctacggcgctgcgggagaattcgtcttccagtgtgatcagatccagatacatgtcctgcagatgcggcatggcggcgctggatacctcaccgaaatcgccgtgggtatcggtatcttctgcgtcgatgatcacgagatagcttgtctcgtcctcattttccatcagacgcagccaggcgcggcggatgctgtcgtttgtagccatatagtccgccatggcctgcaccagtgctgtggggtacggttccggagtgcgcagctgcggaccggcatcttccttttgctggaacatctgctcgatggccagtttgcccacgaaggctttttgcacctgcagatagtttaccatatcgcggtccaggatgaaattcgcgccgtagggatcgaccaccagaccctgtacccggctgtcctgggcgaccatttccgcatagctgtcaaaatccagcaccacggagccggaatccttttcttccgtccatttggacagctcgtccagatcggtgaaaatggggtagaacagattgccttttccggtggtgagcacaggaaaatcgtatttctgctcgccgggctggctgtctttggcagggtggacggcggagagaaaatgggcctgatttgcgatgtgatcgagggctttttgctgcaggtcggcgtcttcacggaaacgtagggttgccagcatttgttttagttccgggttggtcacaatggtttttgttttactcatgatgcaggtctcctttgcataccgttgtagatttgtatattgctttacagcatggggaagcggctgttcttatgtgcaagcacggcgtcgtacagggcgtccacggcttcgggggtggttttctcgcagaagctgatacggaatgcgccggcggcttcctttttggaaaggcgcagggcggcaattacatggctgggctttcccttgtggcaggcgctgccggcggagatgcagatgcccttgtcgcccagctcactcaccagattctggctgggatagcccggcagcgtcaggcacaggatgtgaggtgcgtcgggagtgcccagcacctgcacggtggggatggacaaaagccgctccaaagcatagtcccgcatggcgcgggtatgagcgaggatctcctccagctgatcggcgcgctgtgcgacggctttggcaaacccggcgatctgggcggtggcttctgtacccgagcgcaggccctgttcctggccgccgccgcgcagcagcgggatcattttgctctgcagcgccggggcgatatacagtgcgcccacgcctttggggccgccgattttatgggcactcagggaaatgagatctgccccgtcctcctgcgcgtgcagcggaactttcaaaaaggcctgcaccgcatcggtgtgcagcagcgcccggctctttcgggctttgagccggcgggcgatctccgcgatgggatatacgtttcccgtttcattgtttacagccatgatggataccagtgctgtgtcctcccgcagggccgcctccacctggtcagcggtgatgcgcccggcgtggtcgggctggagatacgttatctcatacccctcttgggtcagggccttgcacggttccagtacggcgctgtgttccacggcggtggtgatgatatgtcgcccggtgtgacgtccgatatgcagcgctgcgcggatggcccagttatcgctctcggtgccgcaggaagtgaaatacagtgctccggcgtcgcagcccagggcctgggcgataacagcgcgctgggcggccacggcatcccgcgcttcccggcccagaggatactgggcggaagggttgccgaaagccctggtcagcgcatggaccatcgcttcggccgcttctggcgccaccggtgtggtagcggcataatcaaaataatacatggaaagaaaaacgccccaatcttaaaactttaggcttgtccagccgtcgctcataacgtataatattataattatgttgcaaagaaatgacaagggggaagagaaaactttgaaaatcgccctttacacgctgggctgcaaggtgaatcagtacgagactcaggctatggagcaggagctgctgcgccggggccacacgctggtaccctttgaggaagccgcggacgcctacatcatcaatacctgtacggtgacggcggtcagcgacaagaaatcccgcaatgccatccgccgtgcgaaaaaacgcaatgaaaatgctgtggtgggtgtgtgcggctgctatgcccaggtggcgccggaggaactgcacgcactggggattgacgtgctctccggcagcggcaaccgcatgggctttctcgatctgctggagcaggaatttgcccagcgccgtcctgtggtggcggtggatgacgccatggcccggcgtgtgtttgagccgcttcctgccggtggattggccagccgcacccgtgctatgctaaaagtagaagacggctgcgtaaacttctgctcgtactgtatcatcccctatgcccggggcagggtgcgctctctgtcgatggaggaggcggtggctgagagcctccgcttggccagggagggataccgggaaattgtgctcacgggcattgaaatttcctcctggggccgggatccctgaccgatctggtggaggcagtgtgccgggcggtaccggaagtgcgcatccgtttgggcagcttggagccgcgcacggtgacggaggagttttgtatccgcttggcggcgctgcccaatgtgtgcccccagtttcatttgtctctgcaaagcgggtgcgacgagacgctgcggcgcatgaaccggaaatatgacacagcacgctattttgaatcggtacagctgctgcgcgatttttttgatcgtcccgccatcactacggatcttattgtggggtttccggaagagacggaggaggaatttcagaagacccttgcgtttattcggcgctgcggctttgcgcagatgcatgtgtttccctattctattcggccaggcacgccggcggcgcagatgcgtcaggtggacgcagcggtgaaagaggagcgcgtgcgccgcgccggcaccgcagcggaacagatgcacacggactatctggacggctgcgtggggaaaacctatcctgttttgtttgaacgggaggaaaacggcatgtccctgggtcatgcaccgaattatatggaggtgtgcgccgccggaagcggcctgcacaatgcggtgcgcgccgtttccataatgcagagaaaaggtgctgtgctgcagggagaattggtttgattgcccattgtgccgcgccctgaaatttgataaaatggaatacaaagacaggaaagagaattatatgaacgaaaacttttttgcctatatctcccgcatgcgctacatcacgcgctggtcgctgatgcgcaattcctattccgaaaacatccaggagcattcccacatggtggccgtgctggcccatgccctggcggtgatccgcaaccgctgtttcggcggaaccgtggacgcgggagctgtggctgcggcggcgctgtatcacgatgcttcggaaattctcaccggtgatctgcccacgcccatcaaatattataaccccgcgatccgggattcgtacaaagcagtggaatccgtggcccaggaccggctgctttccatgctgggagaagagctggcggaggagtatgagccaatcctcaaggaaagcgacgtggatgtagcgaatctggtgaaggcagcggacaagctgtcagcctatatcaaatgcgtggaagagggtaaggcgggcaacaacgagttccgcgccgctgcggagcagattctggacgccctgcgccagaaccccctgccggaagtgcattattttatggagcacttcctgccggcctttgagctgacgctggacgagctgaacgaaacctgaaggaaactgaaatcagaaaaacaaaaaaggagaaagcgagcatgaaagcaatcgttaccgtgattggcaaggatcaggtgggcatcattgccggggtatgcacaaaactggcggagtatcaggtgaacgtgctggacatcagccagaccgttatgaacgactatttcaccatgatgatggtggtggataccgagcagtgcgcacagcctttcgataccctgtccgctgccctggcggactacggccagaaccggggactcagtgtgcgcattcagcgtgaggatattttcaacgcgatgcataagatttaagagggtgttttgtttatgatgaatcaaaacgatattctcagcacgatccacatgatcgatcagcagcatttggacatccgcaccattaccatgggcatttcgctgctggactgctgcgacagtgatcccaagcgggcctgcgagaaaatttatgataaaatcacccgcagcgccaaagatttggtgaaaaccggagaggccatcgaggcggaatttggcattcccattgtaaacaaacgcatttctgtcacgcccatcgccttggtggccggcgcgtcggaggcgcgggattatgtgccctttgccgtggcgttggacaaagcccgggcggaaacgggcgtcaactttatcggcggcttctccgcgctggtgcaaaaaggcatgactggggcggatctgcggctgatccgttccattccagaggccctggccaccacggaactggtgtgtgcttcggtgaacatcggctctaccaaggcgggcatcaatatggacgctgtggccctgatgggcgaagtgatcaagaatacagctcagcgtaccgctgacgctcatggttttggctgcgctaagctggtggtgttctgcaacgcagtggaggacaaccccttcatggcaggagccttccacggcgtgtccgaggcggatcaggtcatcaatgtgggcgtttccggccccggtgtggttcatcatgcgctgcagagtgtgaagggagagccttttgatgtggtggcggaaaccattaaaaagacggcgttccatatcacccgtatgggtcagcttgtggcgcaggaggcatcccggcgtttggacgttccttttggcattgtggatttgtctctggcgcccacgccggccatcggtgacagcgtggcccgcattctggaagaaatgggtttggaagtctgcggtacccacggtaccacggcggcgctggcgatgctcaatgatgcggtgaagaaaggcggcgttatggcgtcttccagcgtgggcggcctgtctggcgcgtttatccccgtcagcgaagatgagggtatgatctgtctcttatacacatctccgagccca

SEQ ID NO: 1999 - DNA, 2200 bp, Unknown
  16S sequences of unknown bacteria
gcaaagagctgcggccgcgattgcggggaagacgggcgttccgtggtaaaaaacgccgccgccccggctgcgcagagagattcagccgcaactgccggtaaaacgggcttcccattgttaaaaaggagggcgcttatggatgtgccgaccatcccggccaggagcattgtcatcaaaaacaaaagcaccgcctggttcggcacccggtatacgatgaatatttacaggggctgcagccacggctgtatttactgcgacagccgcagcgagtgttacggcgtgcaggattttgataccgtgcgcgtaaaatcggacgcgctggccgtcatacggaacgaccttcgctccaagacgcagagcggcgtggtggccacaggctccatgagcgacccttacaatccgtttgaaaaggagctgcagctgacgcgccacgcgctggagctgttggatgcttacggcttcggcgcggccgtcgccacaaaagggacgctcatcacccgggacgcggatatcctgcgggagatcgcgtctcattcgccggtgctgtgcaagataacggtgacgacctgcgacgatgcgctggccgcgaagctggagccgcgcgcgccttcgtcctcggcgcggctggcggctgtggagaagctggcggggcagggcatttttacaggcgttctgctgatgcccgtcctacctttcctggaggatacgccggacggggtgcgcaggctggtgcgggcggcgtacaacgcaggggcgcgctttgtatatccggccttcggtgtgacgctgcgccagaaccagcgggcctattttctggacaggctggacgagctgttccccggcgcagggctgcgggcgcggtatgtgcggcagttcggcacacagtatgaatgccgcagcccgcgggcgcgggagctgtggcaggcgtttacgggagaatgccgcgcaacgggccttctgtatggcatgcaggatattgtggcagcgtatcggcagggctacggcagcggacaactcagctttttgtagcggagcggcagcctggacttcgggcagcgtgcccgcagagttttttcagccgggcttttgcggcggccgtgggatatggtaaaataaccgcaggtcgtttttaggctgtccaaaagctttgagcggtgaaaggccttgcaaatactataagtttgtgcccctcaaggtgctttaaataagaacaatttttgacactttggcgcccagatggcgctcgaatttcccatagagaaataaaacgatacggacaaatataagggagaaccatccatataaatggaaaaaggagaggggaacttgtatatgtatggtctgacccgatcgaacaaattaacgaacatgaagttgcaaaggatcgatgtattatgaaacataaagtgaaagtaacggtaatagataaaaagctatatccagaattgcagcaacagtattgcgcagactctgattcgggttcttgcccttgctataatgttggcgatgaatttgttttttatcgtaatgatgaaagagatgatttctggcatatggggttgaataccttaacgaaaacaacgtcggatcctgatacagtggccggcggacccaaaatgccacattgttcagaagcctgggatgcaatttcaagatacatctacacagggctgcagggtggctcgattatgaaaggttggatgaaagaagagaatacaatgatagcttgttgctcagatggaacaaggcctgtaatatttaagattgagagaattgacgaaaaataagtataattccaagcagtacttatgtgtattgtcttatttgtggtgctaaaatggtggctcgagcctgcaaaaccaacttatacgacgatatgaaaatacaggcgtttttctcgcttcaataaacatttgcaggaagttataaggcgatttccgtctctataatcgataaaaaatagccgaagattgtttttcagatcctgcggactgtccccggcccgcggctatcaagataagctttttattgcagagcaataaaaaacagcccgcgcctgtttttggactctgcgggcggtctaaacagcggcagtgccgccgcttttatgtgcagccgggctgcgcgggattttaagagcgtgatccggggggccacaggagggtttccaggctttgcgcagcaaagcctggaaagacga

SEQ ID NO: 2000 - DNA, 7979 bp, Unknown
  16S sequences of unknown bacteria
ttagtctcgtgggctcggagatgtgtataagagacagccaccaaactcttatggaggtgtaaaaatgattggatttgtttgtggagtcaaaggctccgggaagaccaaaaagatggtagagatggccaatgccattgtgagagatgcgctgggcaaggtcgtgtttgtagacgacaatacccgccatatgtttgacttaaaacacagcatccgcctggtaacgaccgatgattttgcgctgaataaccatgacgccatttatgggtttttggccggtctgatcgcaggcgattttgatatccataccattttcgtggacagctttttgcgtatgacaaatagcactgtccaggagatcgagccgttggtaaaacggctagagcccctcatggaacagaataatgtgcgcctgatcctttcgatctcggcagacatcaaggatgttccggactatattaaggaaaaggcgattgattgacgatgatgtctttagtatctacgcgtacagcggccaccgcttctccgtttgaagcggtactctgtgggctggcaccagacggcgggctttatgtgcccgcctctttgccaacatggaccctttcacagattcaggacttagtggggttgccctatgaaaaggcggcagctctgattttgcatggtttttttgacgagatttcgcaggaaaagatggaagcgttatgcgccgaagcctacgcttcattttccgacgaacgcagggtgcctgtctcctcgatagagccggggttatttgcgatggagctataccatggtcccaccttggcgtttaaggatatagcgttgcagctgctgccgctgttgatggcatatagcgcaaaagcaacaggacaaaaagaaaaatccttgatcctggtagccacgagcggggatacgggcaaggccgccctggaggggtttgcggacaagcccgataccgccatcgtagtgtgttatcccaacaacggggtatccccagcacaaaagctgcagatggtaacgcaaaagggcggcaatgtatgtgttacggcagtggaaggcaattttgatgactgccaaaatggtgtaaaacgcttaatgggtgatccagattttcacgaaatggtacgccaaaacggatataccattaccagcgccaattccatcaacttcggacgtttggtgccgcagattgtctattattttacaagctatgcacagctgctggagcaaggggccattgcgctgggagaggctgtcgacttcatcgtgccgacaggcaactttggcgatattttggcgggctggtatgcaaaaaaaatgggtctgcccgtaggcaccttaatttgcgcgagcaataagaacaatgtgctgagccgtttttttgaaacaggaacctacgattgtggcggggaactgtataaaaccacatctcccagcatggatattctgatttcttccaatctggagcgtctgctgtttgagttgaccgggcaaaacccggcacccattcaggcatggatggagcagcgcacggcggaaaagaaatttactgtggatgaaaagacaatggagaaagcgcgccaagatttctttgcggcttgggcggatgaccaagcggccagtgaagcgatcggcacggtattccatgcgcagcatgttttgttagacccacacagcgcggtaggatactgtgcgtatcagcagtacaaaaaaacgaaggatacaaagcgcaaggcggttttgctttgtacggcaagtccgtataaatttgccgctaccgtgctggaagccttgggccggaaggcggaaggacaggaacagacggccagggcattggaaaaggcgacgggcaagcctgtgccgcaggccattctcgatttgttttccgcagagcagagacattttagctgcgtagagccaaaagaactggatgccctggtggaaagcttcttgaagcagtcatgacggttgtgtgtttgcaaatcaccgcgtacctggcgcatagcagttcactgaaggataagcgtagtgccgttaagcggctatgtgcacagcttcggcgcgagtatggggcttcggtatgcgaggatggtttgcaagacaatagacaatggatgcagcttggaatggcgatggcgtgtgccgatatgccgacagcacagcgtatgatgcagcgtgtggaaatgcatttgtatgaggagccggtgctgtctcggcaggaaatcaaaagtgaaatttactagataaggaatgggcggatcaatggagaagaaaaaggtagtttacagcggcatacagccttctggcatgctgacgctgggcaattatgtgggcgcggtgcgcaactggggcaaaatgcaggaggagtttgactgtatctactgcgttgtgaatatgcatgcgatcacggtacggcaggagcctgctgtgctgcgcagaaggacgctggaaacctatgcgttgttgatggcttgcggcattgacccggcaaaatccatcctatatgtgcaaagccatgtgccagagcatgcccagctatcctgggcgctgaactgctatacctatatgggtgagttaaaccgcatgacacagtttaaggataagtctgaaaagcatccggataacatcaatgcggggctgtttgattatcccgtactgatggcggcggatattctgttgtaccaggcagatctggtgccggtaggggcagatcaaaaacagcatttggagattacacgggatattgcagagcggttcaacaacttatatggagaggtatttacagtgccggatgggtatattcccaaggtgggcgcgcgtatcatgagcttacaagagccggaacgaaagatgagcaagtccgacgagaatgaaaacggctatattgcactgttagacccaccggatgtcattacgcgtaagatcaagcgggccgttaccgattcggatacggaaaacgccattcgtgtggcgccggagaagccgggcgtaagcaacctgatcgggatctattcggtcttgacggagaaaactacccagcaggtggaagaggaatttgccggtaagggatatggcgcgttcaagcctgctgtggcggaggccgtagtggagacattaaaacccattcaggatagatatcaggcgtatttatcggataaagcgcagctggaggcgctcatgaaggatggtgcggagaaagcggccgcgattgcaagacgtacgctgcgcaaggtgtataagaaaatcggcttttatcaaatctaaaattcaataggagcgtggttggcatggatcttggtctatcgggcaagatagcgattgtaactggtggcgcaaaaggcattggagcaggcatttgccgatgcctggtgcaggagggagccacggtggtggtcaatacccattccaacgacgaaatgagccaagcgttttgcgcagagctggcggaagtgggcaatgtgctggccatacagggtgatgttagcaaagaagacgatgtttcggccattttcaaaagcgctgtggatgcatttggcaggatagacatactcgtcaacaacgcaggggtaaccgatgggtatcccattgataaaatgacgcttgcacaatggcgcagggttgtggataccaatttaacgggcacatttttgatgtgccgggaaatggtgcgcctatgtagaaaaacaaagaaaggcggagccatcgtaaacatcctatccaaagcggcggtatcctccaccacaaaggggaggacggcctacaatgccagcaaggcgggcggattgggatttaccaaagccttggcaggcgaggtcatcggcgatggaattcgtgtcaatggcgtgttgccgggatttgtgagaaacagccggactgataagctatttgaaacggattttgaggccatggagatcaaaagaaaacgtttgccaacacagcaatttggtatgccggaagatatcggcgtgatggttgccatgctggccagcgaaaaatgtaagctagccattggcagtatcgtcgatatgacgggcggattgttgctataaaatagaggcaaagggccataggaacctcctatggcccttttttctttgctggaacatggcagcaaaacgacaatccaatggttctataagaaaacaccggctttagtggaaaattcaaaacgagcatgatacaatatattttcaggaggtgtgccgtgtttgggtatatatcaccgatagaatcggagatggggccagaagaccgggccaccttccgcgccttttattgtgggacatgcaagcagatggggtggccggcccgcatggcgttgagctatgaatgcgcttttttagccgcggtgcgttctagttgtggccaggcacagccgatttgcacgaaacgatgcccggtaaaaccttataaaaaggtagaaatgattttatccgaagaaacgtgctatgcagccgatatcaatacgttgctggcctattatgatctatgtgataaaatcgacgatggagcagggcgcgcgatgcgcattctgcggcgtgcatttaagccaaaggtaaagaagatccggaaaagaatgccgcaaatcgacagcgccatccgtcatcagctgtcaaagctggaagcgctgcaaaaggcaaatagcgaagatgtagatgcagcggcggatacctttgccgcgctgttgcaaacaatagcggcgcctggggcggatagaaaagggccgctgggccggtttttttataacattggccgctggatctatttgcaggatgcaatgaatgattttgaacaggatatctttgaaaagcagtataatgttttggtaaaccgataccatgaccttgcagatgcacaggaagcaatggagttttcgctttggcacactttgggcgaagcggatctttgcattgaacagctgaatcccggtgcacagtctgcaggaatcatagaacatatgctagtttgtgcgctgccggaaaagacgcaggcggccttggatagaggaggagaaaacgctgaacccgtatgatgtactgggcgtaaaaccaggggctagtgaagaggaaattaaaaaagcgtatcggagcttggtaaaaaaatggcatccggaccaatatcaaaatacgccgaagcatgatgaagcggtggagaaaatgaaagagatcaacgccgcgtatgatatgctgacaggcaaaaacgcaacgccaaattttggccagcagggcggcgccggctatggaggaggttatggccagcagggctatgccgggcagggacagaatgcaactaaggagcaggtcttccagtatgtgcgtatgctgttgcaaatgggggactggcgacgcgcagagatgttcttgacgcaggtacaggaacgcacggcagaatggcattttttgatgggtatgatcttttggcaaagcgggcggtatgatagcgcgcgcatccatctgacccaggccgtgcagatggatccttccaatgcagagtatcggcaaaacaaagagcagtttgaaaaaagaggaacgcaattccgcggtggacggcgcagggcggtcacaaaccaggatattttctgttgcagcacgctgtgtgcgctcagctcggtatctatgtgccgtggcggtgggttgccctgcatgttttttccgttctattgttaggccaaaggggagaggagtcgcgtagctgtatgggaattcaaaaaaggcaggcaaagggcggcagatatactgcacttgcctgtatgtttggcatgatgatatgcttattcttatatgtttcggtgttgatgccgcgctttatgacgatcattatgctgtttttggctagttcgttgctgggctgtcttgtcgtggagggggaatttggcaaagccttttgggtatatgtggcaacaagcgtgtttggcttgtttatggtagggggcatctatgggatgatgccgtacttcttgttttgtggctggtacccgattttaaaatttgccttggaagaatctagagataagatcatcgtatttgccatcaaaatgatgctgtttaatttgttgatggcgctggcagtttttttggcgccgcaacctgtatttaccccttatgctacaaatttgccagcctggttgatggcgctgatcttcaatgcattctttctgctctatgatggatggagctccttggtagcgttggtatatgccaatcatatcaggcaacacttattataaaacgattgaaaaacgccgtttcaaggcgtttttttattgcgatcttgacaaaaaataagacaaataataatatcagtataaataaatgtattgttgttgggtgggaggaatcaaccatggaggccaattcggaaagcagggtatacgagcaggagaccatgcagcatagcgatgtagaagcgtctgtacaggatacagtagaacctgtgcgcaagatgagccaaatgcgtcagctggtcatggactatgggacaagccagcaggccgcacagttttttaagacgtttgcggacggtaccaggctacggcttttgcaggcgttgagcgttcgggagatgtgcgttacggatttatgccacttgttggaaatgtcccagcctgcggtatccaaccacctgcgtgtgttgaataaccagcgcattgtaaaatccagacgcagcgggaaaaatattttttattctttggacgggtggcatatcaacgccatcattggaatggcgatggaatatttgtctatgaatgggacgcagatctggtaatgcatagagctgtttgcatattctatccccctcgcctataatagggcataactaccggaaaggagtgtgttggcatttgaccgatacagtcataagcattgtgaccgacatatccaggttctggtttttgttgattacgctttatattttgatacgattgattgataattccttgacggaatattcctttcggaaggaaatgctcaactatgggccgggccaaatctttggagaattggtcgttcagcagaaaacatctaaaaaccggctaaaaccgcctacgcagcgctttggcttaaaatgggaaaataccatcggaagccatcggctctgcgatgtatgcgtttccgatgatacggttgccaagcgccatgccgtattgtatatggcaagagggcaggcgtacatttctcctttggggcatgcagaggtcatgataaacgggaaaccggcggaaaaaggggaagaggtctatgatggcgacgtattgacgcttggtaatacgagccttaggctgaatctttatacggaggaggcgtaagatgtctagaaatcgcagaaggagacctagcttaaccagcgtggtctttatgatgatcttgttcgatatcagcgcctttgccatcttgatcatgaatagcgagacatttgacccgctctccctggttgccatggcggccacggtgctgctgctgatttttcagtattttattctgtcggtatttttcccaaactgtgatcgaacagtattggttatcgccaattttttggtgtcggtggggctgatcattcaattccgcatatctcccagcgtagcgatgaagcagctggtttggatcggcattggcatggtctgtatgatcgtgacgacgctggccattcgccgttccaagatctggccgacgctgtggaaggcccttatcgtattgagcgtgctgtttttggcttcggcggtcgtgcttggctctgaaaagtttggcgccagcaactggatcaacctggggcccttttctttccagccctcggagtttgtgaaaatcatgctgatttttgtgctggctgccttgttgggtcgtgaaagaaacatgaagaccatgattttggcggcctgctatgtaggcgcttgcctgctgcttttgctgctgcaaaaggacttgggcgcagcgctgctatatgctggtaccgccatcatcatgcctgtctcttatacacat

SEQ ID NO: 2001 - DNA, 8764 bp, Unknown
  16S sequences of unknown bacteria
gatccgccagtatcaccgtgccaaaggaaacacggtgctgctggtgagccacagcatggaggaaattgcgtgtaatgccgggcgcattgtggtgctggatcagaaacatatcgtgatggacggcgcgccggcggagattttttcccgggccgaagagctggagtccatcggactgggcgtgccggaggtgacgcgcattgccatggccctgcgccggcgcgggctgccaatcgacagcgccgtgtatactcaggaagcgctgcgcgcggagatcctgcgcctgagagggggaattgcctcgtgctgaaagacattaccctcgggcagtatttccctggaaatacactggcccaccggctggatccccgcacaaagctgatgatggtggtgatttatatcatcgccctgttttgtgccaaatcctttttctcatatggtcttctggcgctgttcctgcttatcagcgtcaaaatttcaaaagtaggatttcgtgcgttgatccgtggcatgaagccgctgattttcattctgatttttactgcagtgctcaatatgttctatacgccggggcaggccatcggcactttctggatttttacgctgacagtggaaggcgtctgggctgcggtgtttatggtaattcggatcgcgctgctgatcatgggcacatttttgatgacttacaccaccagtcccattgcattgacagatgccattgaaaatctgctgggcccgctcaaacggctccatgtaccggtgcacgaactggctatgatgatgtctattgcgctgcgcttcatcccgacgctgatagaggaaacggacaaaatcatgtccgctcagaaagcccgcggcgcagattttgaaaccggaaatatcctgcgccgggccaaggcgctggtgccgatcctggtgccgctgttcatcagcgcgttccgtcgggccgacgaactggctacggccatggaatgccgttgttaccacggtggcgagggcaggacaaaactttatgtgctgcgttatcagcggcgggattttttctgcattctgctgacgacgctgatcactgcggccgtggtgctattgagccgcctcggactgtgaggaaagaaggaagctgtgcagatcgttttcgctctgtgcggacagtaggatttttatgaaaagaaacattgccttaaaattgatgtataacggcacggcctaccatggctggcaggtgcagaagcgggacgttacggtggcgggcacattggaaaaagcgctttcgggtctggctggggagcatattcacctggtgggggctgggcgcaccgacgctggtgtccacgccgagcactatatcgccaatttccgcactacgatgacgattccctgcgaccggctgcccctggccatcaacgtgcgcctgccggaggacatcgccgtacaggcggcctacgaggtggcggagaatttcaacgccatcggctcgtgcctgaaaaaagagtatacctaccgcatttacaactcccgcatcagcaacccgttttatgtccaccgcgcctatttttaccctaaggtgctggacgaagctgtgatggaccgggcggcgcgaatgtttgagggaacgcacgattttgcagcggtgcgcagcgtgggaaccgacgtcaaaagcaccgtccgtacgatttactattgccgcgtgcagcgcagcggagatcttctggaaatgaaagtgtgcgccaacggctttctttacaatatggtgcgcgcgattgccggaacggtactctatgcggccgaaggtaaattgctgccggaggacattccgcagattttggacagcggtaaccgcacgctggccgggccgactgtgccgcctgggggattgtatctgacgagactttggtatgaggatgaacggctgaatggatgacaaaaaacgcaaaggaactcccgagggccgcaacattatcgatttggatgcggcgcgggaagaaaagcgccgggctgaacgggcggaggagaaacgtatagcccgttcggcgcgcccgtcgctgcgccggcgtatgctttccctctttctggtgcttgttctggttttgggcgcagtgctggtgacggtatattgggacgatatcaattttgacgcgctgcgccgcacgatctcctatatcggtactacgcaggacgaaagcgggggaaccgatccctttttctatgaccgcggcagcgccagcgcctttgcggtattgggcaatcacctgatctgtgccacgaacaaagagacgacaatctatgattttgccggcaacgaactgtatcaggcggatgtgaagctggaatctccggtgctgtgtgtgggcgggagcttggctgcagtgtatgaggtgggcggcagccatttgacggtgtttaatgagcaggggcagaagctgaacctgatgctggaaaatggtcttggcatatacgctgcatctctgaatgaggcggattatctggcggtgacgagtcagaaaaaaaatcaaaaaggctgcgttaccgtgtataacgccaatatggaaaaaatcttttcctttgattcctctacccgctttgtggtcaatgcttatgtgacggaagactgcaaatacatggtggccgaaactctggggcaggaaagcggtacatttgtgtcggaaatggtagtctatcggctggatcgggaggagcagtacgctacgttttctgtggaaaatgccatggtactggacatcggttctgtgggtgggcaaacggtctgcattgcggaggacagagtggtagtggctacaagcgggggacaggttagcgcctcctatccgtatgcgttgccatatctgcgggagtactctctggatggcgacggatttgctgttcttgcgctgaaccggcaccgtgccggtaccagcgggaagcttgtgacggtgaacagcagcggggaagctatagctgagttggatctgaacgacgagatcctggatttgactgcagcagggcggtatattgctgttctttacgctgatcggctgacggtatacaataaagatttaacggaatatgcaacatttacccagacagagacggcgcagttcgcctgtatgcgttcggatggttcggtctggctgatcacggcggatacgatttcgcttttgattccgtaaactttttgtgactggggtatcaatttatgcaaatggctgttataatagatttgtttctggctgtggtactggtgttgtgcactgtgctgggttttcgccggggcgcgtttaagagcgtcatcggtattgtaatcgtggtggcggcgctgatcggcgcgggctttgtatctgctcagggagcacctgcggccgcaaaagcgctgacgccccttctcactgagcagatcgaagcgcggtttgacaaagcggcgcaggagctgctgccttcggacacagaagcgggggaagaggatgctgccggtattttttccgccgcgggcttctatcgcaaaactgcggatgatctggcgcgcagcgcggcgagtcagatgatggaaagcggaaaaaccatggtagaagccgctgtggagagcacagtgcgttctgtggctgctgcagtgctgttttttgctgggtttcttgtgctcctgattgtgctgaagctcatctcaaatgtattgggcctgttgacagcagtgccgggactgcatctgatgaatgcgttgggtggcggtgtgctggggcttttgcaggggtatctgattttgtgcgctgtaatatgggcggcacagttttttggaaacggcatttccgaacaggtcgtggaacagacggtcctgtttcgtttcttcgtcgcgctgaacccgattgaatgggtatcgggcgtgtaaattcaaggaggtcaatatgcaaccaaccctttgttccaaatgtaagaagtatgtggcggtggtctacatctccaaaatgggagaaaatggcaagccggtcaacgaaggtctgtgcctgcgctgtgccaaagccctgggactgccccaggtggatgaaatgatgaagcgcatgggcatttccgacgatgaactggaaaaaatcaacgaggaaatgatgcaggcctttggcggggtggaaagcctcgaaaatctgcctatggacctgaacgacgcggacgatgatgaaagcgacgagggaaagacggctacgttcccctttctgaaccgtctgttcggcggcgagggcgtccgcggcgaaggggcgggaagcgaagctgaggcggaagagccgcggccccatgcaccgaaaaaaggcggcaagcgcaaatttctggagaactactgcatcaatctgactggccgggccaaggccggggagttggacgccatgatcggccgtgaaacggagatcgagcgcgtgattcagattttgaaccgccgtcagaaaaacaatccctgtctgatcggcgaacctggcgttggaaaaactgccattgcagaggggctggctcagcgcatcgtccatggagatgttccctacaaactgcgcgacagggaagtataccttctggatctaactgctctggtggctggaacgcagttccgcggccagtttgaaagccgtatgaaagggctgatcgaggagatcaagcgcacaggtaatattattctggtgatcgatgagatccataatatcgtcgctgccggcgacgccgagggcagcatgaacgctgccaatattctgaagcctgctctcagccggggcgagattcaggtgattggcgcgactacttttacggaataccgcaagcatattgaaaaagacacggcgctggaacgccgtttccagccggttacagtgaatgaaccctctgtggaggacaccatgaagatcctgaaaggaattgcccactactacgagcagtatcatggcgtgaaaatcccggatggcgtgctccgtcaggctgtgctgctctcggagcgctatatcacagaccggttccttccggacaaggccatcgacttgatcgatgaggcgtgctctgacatgaacttgaaggatgaaaagatcaaccgccgcatggagattgaaaaagagctggcggattatgaaaaagaaaaggaactccttgtggaggataccagcgaagagtcttatgcgcgtcaggcggagatcaagagccgtgagatccagctcggcggtgagcttgataccatcaaggccgccggtgaacctacgctctccatcgaaaatctggcccgtgtgatcgagctgtggacgaagattcccgccagcaagatcaaagaagaggagtttcgcagtctgtcggaattggagagtcgcttgaagcagcatattatcggacaggacgaagctgtttctgtggttgcagcggcgatccgccgcaaccgcgtggggatttcgcccaagcacaagccggtcagctttatttttgtcggttccaccggcgtgggcaagaccgagctggtcaagcgcttggcagaggatctgttccattcccaggatgcattgattcggctggatatgtccgaatttatggaaaagcacagcgtttcccgcctgattggttcgcctcccggctatgtgggctatgacgaagcgggccagcttacggaaaagatccgccggaagccctacgctgtggtgctgttcgatgagatcgaaaaggcgcacccggatgtgctgaacgtgctgctgcagattcttgatgacggacacattaccgacgcccatgggcgccgcgtcaatttcgagcatgcagttatcgtaatgacctccaatgccggctccaacacgaaggagggcactgtgggctttggacgcacggtcagcgagctggatcgagatcgtgccatgaaggccctcaaccagttcctgcggccggaattcatcaaccgcgtggacgagatcatttgcttcaaccatttgacggaggagaacttcaggggaattgcccgcattatgctgggcgagctgaccgacgctctgcaggagaagggattggagtttgtttgggatgacaagctggtggagtatgtcacagccaagtcctattcgctgacctacggcgcccgaaacctgcgccgcgtgctgcagaaagaaatcgaggacccgctggcgggccgcattatcggggagtatgatcatccctttaccaaaatcaacgccacggtggaggacggccaggtcgttctttacacaatgtgacaaaaagagaggcggaaaaagatgctgtttcgaaaagatatcgatccgcgctgtgcctattgtgcccgaggctgctgggtgaatcaaaaggagattttctgcaaaaagcggggcgtcgtgtcgccggaataccattgccgcgcctttcgctacgatccccttctgcgccagccgcacccgccggtaaagcttaacacagctaaactttcagaagaggattttaagctgtaatttcatagaatgaaatgctccccgtgccatgcggcacggggagcatttttgatggttatgctttttccttccggagttcccggatgaattcttcaatacggtcaaaagccacgcgcagatcgtcgagggaataagcgtaggagatgcgaaggaagccttcgccgcagcagccgaaggcactgccgggcactacggccacttttttcctctgcagcagctccagagcgaattcttcgctggtcataccgaactcctgaatattggggaaaatatagaacgcgccctttggctcaaagcaggggatgtccatatcggaaaatcggcgcatcagatacttacggcggcggtcgtaggcctggcgcatcatctgcgtttccgcatcgccgtcggtcatggcgtagacggcggcatactggctgatggtgggggaagacatgatgcagtactgatggattttgatcatttcgtgcatgatggcagccggggccatggcatagcccagacgccagccggtcatggcaaaggctttggaaaaaccgttgacgtaaatgcagcgctctttgatgccgggcagggcggcgatggagaaatggttttttccgccgtaagtcagttcggaatagatctcgtcggtgatcaccagcaggtcgtgttccaggatgatgggcaccagtttttccagatcctctttttccataatggcgccggtgggattgtttggataagaaatgaacagcgccttggtgcggggggtaatggcggcttccagttcctccggctgcagacggaaggcgttttcctctttcagggcgatggtgaccggaacgcccccggccattttgacgcacggctcgtaggatacaaagcagggctggggaatgataacctcatcgccctcttccagggtggcacggaaagccagatcgatggcttcgctaccgcccacagagatgaaacattccgttgcgggggcgtaggatacgccgatcttacgggcggtgtaatcgcacacggctttgcgcagttccgaaagtcccgcgttggcggtgtagaacgttttgccggccttgatggcccggatggcttcttcgcggatcggccagggcgtatcgaaatccggttcgcccacgcccagggagatggcatctggcatttctgttacaatgtcgaaaaatttgcgaatgccggaggaaggcatttcaacgatttttttagcaaggaaatctctcatggtgtgaccaccattcttctgtcttttttcggtgccatataggggaaaccctgctccttgtatttgatcagcgtaaaataggttgtagtgctctgtacttcgtccaacgcggccagtttttcggaaacaaacatggagatggccttgagattcttttcgcggagcatgaccagaaaatcataagcgccggacatgaggtacagggattccacctcagggtactggtagatgacttcggcaattttattgtagccatcgccgccctggggggtcacgcgcagttccaccagcgcggtcacggaatcgggatccactttgtcccagttgatcaatgtatgatagccgcaaatgacctgatcattttccaactccgtcagggctgcatgcaccgaggcggtgtcgcaggcgagcatctgtgccagttcggcttcggagagcttactgtcgcgctcgattagggagagcagcttcatttgaaattccttgttcataaggtacctcctcttgccgctgccgcggatgcgctgctgcgcgtccgccggcacgggaaaaatataaatcttattgtaatcacatcgtttttctttgtcaatgggcagccgaagcgcatagggtggaaatagagaattgcaacgagaggagcagagccatgacattgaaaacagagttctttttaggcgccaacagcgccgaagggttttacagtttatatgatcagctgcgcgaaggagagcgtatgcgcgacctgattgtactcaaaggcgggccgggcgtgggtaaatcgactttcatgcgctgcatcggtaaccaggccgaggaaaaagggcttcagattgaatacatacgctgcagtggcgatccggattcactggacgcggtatggctgccgcagctggggacggcagtagttgacggaacggcgcctcatgtggtcgagccggcttatcctgcagcggtgggccgctatgtcaatctggggcagttttacaatgtggaccgcctgaaggaacggcggcgggagattgttgcctgcacaaatggatatcaggcggaataccggaaagcttatgcctgcctgcatgcctgtggtgcagtgcgt

SEQ ID NO: 2002 - DNA, 13070 bp, Unknown
  16S sequences of unknown bacteria
tgccgttcagctcggggatgaccaggccgatggccttggcagcgccggtggagttggggacgatgtttacggcaccggcacgggagcggcgcaggtcgccctttctctgcgggccgtccagaatcatctgatcgccggtgtaggcgtgaatggtgcacataatgccggattcgatgggcgccagatcattcagggcctttgccatcggggccaggcagttcgtggtgcaggaggcggcggagatgatcttgtcgtccttcgtcagggtcttgtggttgacgttgtagacgatcgtcggcaggtcgttgccagcgggggcggagatgacgaccttctttgcgccggcgtcaatgtgcgcctgggcctttgccttgctggtatagaagccggtgcattccaggacgacgtcgacatccagcttgccccagggcaggtcagctgcgttgggcatcttgtagatgacaatcttcttgccgtcgacgacgatgtagttgtcctcgccttcgccttcatggtactcgaccgtatggccgtgggcgacccagttgccttgggtggagtcatactttaaaagatgcgccagcatcttggcagaggtcaggtcattgatggcgacgacctcataaccctcagcgccgaacatctgacggaacgccagacggccgatccggccaaaaccattgattgcaacttttacagacatagtaaatcctccatttccagccgcgcacaccgctcggccaaatcattcacagcggcaggcagcatttgctgcgcactgcatcttacttatttgcattataacgcatgcgattcggtttcgcaagcttattttgcccggattgttctcgggacgccgcaagtttgctatagaattcccttatttctagtattatgattggaatatccccaaagtatgcagttttatccggcattgcggcgatctaaattgtgcaaaatgctgcaatgtgctacggaaatacccgttattctaaatatagataacatttttgcgccgttttttccttggaaaacgttgcactttcgggagaaagcctgtataatgcattttagatataaggcatattaaaataatttatgtccaactatgtccaacaaacgcgagccttaaacgcgagtccctgtgtaatcaatatcattgcaaggaggccactatggcacaatttactgtaaacggaaagactgttacagtcgagaaaaaccaaaagctgatgcgctacctgcgcgacgaactgcggctgctgtctgtgaaggacggttgtgcggagggtgcttgcggcgcctgtacgatcatcatcgacggcaagacccagcgcgcctgcatccccatgacagataagatggaaggcaagtctgtcctgacggtcgagggcctgtctgactttgaaaagcaggtatttacatacgccttcggcgaggctggctctgtccagtgtggcttctgtatccccggtatggtcatgtgcgccaaggccctcatcgaccagaacccggaccccacccgggaagaggccgcgtttgccatccgcaacaatatctgccgctgcaccggctacgtcaagattattgacggcatcctgctggcagcgaagattctgcgggaaggcaagatcccggaatacacccgcaaatgggccgtcggcgagcggacccaccggcaggacatcgaaggcaaggtcctgggtaccggcaagtacacggatgactactatctagataatatgtgccacggctctgcggtacgcagtgcatatccccgggccaaggttctggctatccatacggaagaggccaaggcactgcccggcgtcgtcgccgtcttcacggcagacgatattcccggcaacaaggtcgtcggccacctgttcaaggactgggatacgatgatcggtgtcggcgagatcacccgcttcctgggcgatgctattgccctggtcgttgcggagacgccggagatcctggagcaggccaagaagctcgtcaaggtcgactacgaagttctgcccgccgtccataatcccaaggaagctgcggcggaaggcgcgccgctggtccacgaaaagggcaacctgctggcctacaagggcgtgcatcgcggcaatgcggaggaggccatcaagaattccaagtatgtcctctccggccacttcactacgccgtggaatgagcatgcgttcctggagccggagtgcgcagtcgcctttatgaagaacgaccatgtcttcgtttatacctccgaccagtccgtttacgataccctgcacgagacggcaccgatgctgggcctgccctatgaccaggtcgagatcgagaacacctatgtcggcggcggcttcggcggcaaggaagacgtcacagtgcagcatctggcggctcttatcacatatttgaccgggcgcgcggttaaggtgaagttgactcgtgccgaatcgttaattgtgcatccgaagcgtcacccgttcgaggtcgacatgaccatcggctgcgacgagaacggcatcattcaggggatgcaggcaaaatgtatctccgacaccggcgcatacgcctctctgggtgcccccgttctggagcgtgcctgcacccatgcttccggcccgtacaactatcagaactttgatatcgacggctgggcttactacacgaacaacccgcccgctggcgcattccgtggctttggcgtgacgcagacctgtttcgccaccgagacgctgctgaaccagatggcggagaagatcggcatctctccctgggagattcgtttccgcaacgccatccgcccgggccagaccctgccgaacgcccagattgtcggcgaggacaccggcctggtcgagaccctgctggcggtcaaggacgaatttgaaaacgccaagtacgctggcatcgcctgctgcatgaagaacgccggccttggccacggcatccccgactggggccgttgccgcttggtcgtcgaagacggcaaggttatcgtctgcgtcggcgcatccgatatgggccagggcgcgtccaatgtcttctgccagaacgtcggccaggttctgaatctgccggctgacaagattgtctaccgcgcttccaacagcttcgagtgccccgactccggtacgtcctccggctctcgccagacgacggtctccggcgacgcctgccgtgttgcagcgttgaacctgaaggctgcgctggaaggccacacgctggaagacctgaacggccaggaattctacggcgaatggaacgccatgacggacaagcccgacgacgcttccatcgagcacccgctgtcccatgtctgctatggctatgcgacgcaggtctgcatcctggacgataatggcaaggtcaagaagattatcgcggcgcatgacgtcggcaaggccatcaacccgatggcggtcgaaggtcagatcgaaggcggtgtcgtcatgtccctgggctacacgctgactgaagcgttccccattgatgacaactgcagacccaccgcgaaatacggtaccctgggcctgtggcgcgctcatcagatcccggagattgagtccatcatcgtcgagcgggaaggcttcgagcacagcttcggcgctaagggcgttggcgagatcgtctccatcccgacttccccggccattgccgcggcatatcacgcctacgacggtgaatggagatataatatcccgctgaccaataccccctatgcccgcaagaaaaagtaagaaattttccttgaatatgtaatacatccgccccgctttctacacatgttttgctgtaaaaagcggggcggaagtcctctttttgggttcggcttctttattcagcagtgcggcgcaattcggccaatgcttccggtgtatcgcagtcaaacagcgcgtccggcgcgacttcgacggtcaagagccggtctaaatgcgctttgattacgcattttccaccgacatcgccctgtaactggcataattccgggaaaaattcccggggaaagatacaggggttgcccgtcctgccgtcgtgggccggagcgacgatccggtcccggttttcttgccaggtttccaaaattttggcgatggctgcggcatccagcagcggctggtctgcaacaaggtacaagattgcgtcgcattgggccatggcttcggtccccaggcggatggtataggctgcgccccagtctgggtggtcatttttcagccacggaaagccgaattcctcggccattgtgcagatctccgggtactgggtcacgatggtgacctgggaaaaccgggcgggatcaatgcgctctagcgcccagaggaccagcggtttgccgcgaaattctgctagcagcttgttggattgaaatcggctggcatttccggcggccataagcaggcagccgattttgttgggtcgtgtcatggataatccctcgctttagacttgttttctatcagtataaccgtttgaagcaaagaaagtcaagattctgcaaagttctattggcaattttcactaaaatatgtgaagttctgcatagatttttcgcattattttatttatagaataactaaagtccttcaaaaatgaaaatctttatgctataatattacaaaacacagattgtgttttgtaatacaaatgatccgctgattctctgcacttcccaaatactttcgcaggaggctatctaatgaaacaagtcggtttaagtatgaagcgtgtggatgcttacgacaaggcgaccggccgcaccttgtacggtggagaccgggtcccgcaaaatgccttggttgccaagattgttcactcgaccattgcccatggtatggtaaagcacattgacaccaccgaggcggagcgtatccccggtgtggtcaagattgtcacctgttttgatgtcccggatattcagttccccacggcgggccacccctggtcgctggaccccagtcatcgtgacccggcggatcggaagctgctcaacgcccatgtccggtattatggtgacgatgttgccgtcgtcatcgcggaggacgaagtcgcggctgtgcagggcatgcgggctgtaaagatcgagtatgaggaatacccgtttgttctggatgtgcaggaagccatcggcaagacagagcatcccatccacgacgagcatccggataacgtcctggcccactctgggatccacaatgagcatttcgaggaagcaatccaggagccgggcctggtcaaggtcgacggctggtataactccccgatggtgcagcactgtcatatcgagccccatatctgctttgcctatatggaaaacggcagaatcaccatcgtctcctcgacgcagattccccacgtctgccgccggatttgcggccaggcgttgggtatcccctggggcaatatccatatgataaaagcctacgtcggcggcggcttcggcaacaagcaggacgccctgtatgagcccctgtgctgcttcctgacgacccaggtcggcggccgctgtgtcaagctggactgcacgcgcgaagagacattcatcaacaaccgcgtccgtcaccccatccgcagccatatcacctcttgggtgcggcccgacggcacgtttgcagcccgtcggctggaagcgtattccgaccagggcgcgtacggttcccacgggcactctattgtggccaagggcatgggctgcttcccgcagctgtatccgtgcgatatcgtggaagcggaatcctatacggtctataccaacaagcccaccggcggtgctatgcgtgggtacggcattccgcaggctatgtgggccgtcgagtgccatacggacgatgttgcccgggccatcgggatggagccggtggaattccgccgcaagaacctgatgaaaaagggcttctatcacgaattctccaagaatgagctgtatttcgatacatttaatgaatgtatggataaggccattgcgtatatcgactactacggcaagctgaagaagtaccagaaccaaaccggccctgtccgcagaggcatcggttgttccgtcttctggtataacacggcagtctaccccatctccctggagacctcctcctgccggatggtcctgcacccgggtggacggatcgtgttccagtgcggcgaaacggagatcgggcagggcgccgataccgcgcaggcgcagatggtggcggacgctgtcggcgtgctggccagcgatgtcaccgttgaatcctgccaggataccgatatcacccccttcggcaccggcgtttatgcctcccgcggcacttatgttgcaggcttctccatccgccagacgggcgagatcttccgcaagaagattttggatgtcgccagcaagatgacccggatgccggcctacaatctggacctggaagacggcaaaatcatccggaataccgacggccgctatatgctgtcgctggccgatgttgccgagtacgcccagtacacgacggatggctctcagcacatcacggcggagtccacgtaccaaatccgcagcaacgctttctccttcggctgcacgtttgccgaagtcgaagtcgatatcccgctgtgcaaggcgaagctcattgatattgtcaatgtccatgacgcaggcaagctgatcaacccggcgctggcggaagcgcaggtccacggcggcatgtccatggccattggcatgggtttgacagaggaaatgctctttgatcagcgcaccggtaagccgctgaatgacaacctgctagactacaaactctccacctttatggatcacccgcatttggaagcagagtttgtggaaaactatgaaccgacctctgcattcggtgccaaggcgctgggcgaaccgcctacctgctcgccggctcccgcgatccgtaatgcgattttgcaggcgacgggcgttgctgtcaatgatgcgccggtcaatccgcaccggatgtttgacgcctttaccgaagctggcctgatttaaggaggatacgccaaatgtatgatctgaatcaagtttacgaagcaaattctgtggaagaggccattgccctgcgccaggcgcatccggaagcccagatcatcgcgggcggcagtgacgtgctggtccaggtccgttcgggccgccgggcgggcaagtctctgatctccatctatgggattgacgcgatgcgcggcgtcagcattgacgacgaggagaatatccgcatcggctcactgacctccttctcccacatcacccatgacccgatcatccagaagtacatcaacgttctaggtgaggcggtcgatatggtcggcggtccccagattcgcaacatcgggacgatcggcggcaacacctgcaacggtgtcacctctgccgactctgcttcgactttgcaggcgtgggatgccattgtcgaactgacgggcgcaaacggtgtgcgccgggtgcccattcagaagttttatatcaaggccggccaggtcgacatcaagcccgatgagatccagacggccatcctgattcccaaggaaagttatgaaaattgcttcggcaactattacaaatatgccatgcgtaacgccatggatatcgcgacgaccggctgctccgtcaacgtccggctgtcggcggacaagaagacgatggagcgcgtgcgtattggtttcggcgtcgcgggcccggtaccgatgcgggcagtgaaggctgaggccggtgcggcgggcaagcctgttactatggctgcagtggaagaaatcgcggcttccgtcctggaggatatcaacccgcgtgatagctggcgtgcgtctaaggcgctgcggcagcatatcgccgtcgaactgaccaagcgttgtctgatgaaatccattgaactggcaggaggggttttgtaatggcggagagacagtataaactggtaaaatgcaacattaacggcaaagacgtcgccacgatggtcgatgtccgggcatccctgaccgacatgctccgcaacaattatcacctgacctccgtcaagaagggctgtgaggttggcgaatgcggcgcgtgcagcgtcctgattgacggagaggcatttaactcctgcatctatatggccatctgggctgagggcaagaagatcatcaccctggaaggcctgacgggccccaacggtgagctgagcgatatccagcaggcctttgtcgatgagacggccatccagtgcggcttctgcagcccgggctttatcatgacctcctacgagattctggagtcgggcaaggagtatacggatgatgagctgcgcaagctcctgtccggccacctgtgccgctgcaccgggtatgagaatatcctccgggctgtccgcaagacgatgtacaagcgtctgggcaagccggtcccggaaaactgatcatatcacaagtaaaatttaatgcaccgcggcgcagcagcgctgcagaaataccgcagccggacgtcttcccttctggaagatgtccggctgcagtgtattttttggaagatggctgagaggaatagttcgcgggggaagctcagtggtgaaacaggcggcggccggtgaagaccatgacgatgccatagcggtccgctgtctcgatgacctgcctgtcacgcaggctgccgccgggctggacgatatagcttgccccactcttgcgggcccgctcgacattatcgccgaaggggaagaaggcatcgctgccgcaggtcacgccgcagagcttctggagccacgcctgccggatcgcagggtccagcgggtccggccgctgccagaagacagtctgccaggcgccgtctcgcagaatgtcgtcatactccgaggagagatagacgtcgatggcgttatcccgcaccgggcgcttgagatcgggcaggaagggcagggagaggacctgcagctgctgccggagccaccagcggtcggctttatccgccgccagccgggtgcaatggatccggctctgctgcccggccccaatgccgatggcctggccgtttttgacaaagcagacggagttggactgggtgtatttcaggatgatttgggcgatgaccatatccagcgccgcgctttggggcagcgttttgttctgcgtcacgcagtcgttttgggtgggcattgcgatgggcgcgttgttgcgggcctgggtgaaggtgagaccgaagacatcccgctgctccgtcgggcccggggtatagtcggggtccatggcgaggatcgtatagcggccgcctttttttgttttcaaaagctccagtgcctctggcgtatagcccggcgcgatgatgccgtcggaaacctcgttcttcaaatactgggcagtggcttcgtcgcagggggccgacagcgcggcccagtcgccgtaggagctcagccggtctgcaccgcgagcgcggatataggcgcaggccagcggtgtcagcgctgcgtcggggcggacgaagtacagggcccgctccgtctcggtcagcggcagcccgatggcagccccggcaggggagacgtgcttgaacgacgccgcagcaggcaggccggtggccgcatgcagctcctgcacgagctgccagctatggagcgcgtcgagcagattgatatagcccgggcggccatttaggaccgtgaagggcagagggccgtctgcccggctcaggagcgccggggtctgattgggattgcagccgtattttaattcgaattgttccatgaggatgctccatgaaggttctccaggcagctgacaaactgcccggtggcaagatcggtgtaacggacgcagagggcgatgcggtagtcccggggcagggcgtcccagagggacctacaaagcgctgcggggtctgcggggatggcaaggggccggggcgcgccgataaatggcggcaacggcgtgccgttttgctgatacgtgtgcaggagatgcccctgaccagggactggggcaaagtgccagtaccggcgcaggcaactgccgtcgcatccggcccggcgcacgatgctaaggtcgatgccgtcgcgggccagcagcgcactgatgcggggggtgtaatgcggcgcgtccggttcaaagcggcgggtgtctagggcttggcggaacgaatgaccagcttggagggcttcgaaaatcgtctctgtctggtcgccgtttgtgacgatcaggcaatctgccagcgcccgcaccggggtgtagaacaccagcgacgggtcttcgaccttgctggggtctgcgaattcgatacgcaggctggcaccgtcctcccgtaggcggcgattgcggctattttcacttcgcccggtgagaaaataggcgaagacggcgcggccgtccggtgcggccccggccagaataccccggccggggtatgtattttgttgcagctgctgcagggtagattccataggggcctcctattcttggcgggtcaaaggttgatcttgcaaagcggcaccgggtaaaacgcctggccgttgaagaaccagagctcgcggaagcctacgaattctgcccgcgccaaggtgtcgcgatagccgcaggcgacggcgtcggcgctgtgggcgtcggcagtgatggtgatgcgtgcgccgcggcgctgcagctgctgcagcagccagagggcggggtacggcgtcgtgcggtagccgcggctgatggcaccggtattgatctcgaagatcttcccagcggcgatcaaggcatccatcgcttcgctggcggctttgtgataggccagggtgtccgtattgaccaggggtgcgatctcgttgaatttcgtcagctggtcaaaatggccgacgatatccagccgggggtcgtccgcgacccgcagcagctggcggtaataggcggcgctgtaggcgtcactatcgccatggaaaaggtcctggacattgtgccgggtgacctccacggcgtcatccacgctgacccaactaccgtccacgggaatatggtggacagagccgatgatatattcatagccatcgagcgggatctgcgagacaaggtcaaattccaacccgtaatacagggggatctcgtcccgataggcagccttcaggcgcagggcctcctgccggtagcggggcaggtcctccacctggactgtccagtcctggggcgtgggcatggggctgtggccagagaagccgagggcagagagcccttgagcgagcgcaccctggaccatctcttccatggtggatttgccgtcatcaaacagcgagtgagaatgcaggctttgcagtttcattttaccattttctcctgttttactttgtggtcgatgacatggcgggaggccagctcctggcgcaggtcagcaagggagatgccggcttcggccatcaggaccatcacgtgataggcaaggtcgccaatctcgtagattgtattggcccggtcgtgatccttggcggcgatgatgacctccgttgtctcctcaccgacttttttgaggatcttatccagacccttttcgaaaagatacgtcgtataagagccctcgggcagatcggccttgcggccctggagcagctgcatcaggccctcgtaggtgaaacctgccggggccgggccgtcaaagacgggattgtggaagcaggactccgcgccggtgtggcaggccgggccatccttttgtacctcgatgaccagggcgtcctggtcgcagtcagcggtgatggagacgatgtgctgccggttgccggaggtctcgcccttgcgccagagctcttggcggctgcggctccagaagcaggtgcagccctcgcgcatggagatctccaggctttcccggttcatataggccagggtcaggacctgcttggtgttcgtatcgacgacgatggcgggaataagccccctctcgtcaaatttcagcgtgtttaaatcaaacatggcgttctatcctcctgatattgatgccgtgatcggccagggtgtgcttcagtgcagggatggggacctctccaaagtggaaaatagaggcggcaagcccggcgtcgacccggggcagggcctggaaaagctcgacaaagtccgccgcgcagcctgccccgccggaggcgatgaccggtacgttgacggcctggcagacagcgtccagcatagcaaggtcaaagccctgcttgacgccgtcggtgtcgatggagttgaggacgatttcacctgcgcccaggtcgacgccccggcagatccagtcgatggcgtccagccccgtgtcctggcggccgccgtgggaaaagacgtggaaggacccgtccacccgctttgcgtctacagaaaggacgacgcactggttgccgtaacgctccgcgccctggcggatgaggtccgggtcccgcagcgcgccggagttgacgctgaccttgtctgcgccgcatttgaggacgcggtcaaagtccgctagggtctggatgccgccgccgacggtcaagggaatgaagatcgtctccgccacccgggtcaaaatatccgtaaacagagcgcgtccttcgaccgttgcggtgatatcataaaacaccagctcgtccgcgccgctttccgagtagtactgggccagcttgactgggtccgagacgtcccggacgccgagaaagttgacgcccttgacgacccggccgtcacggacgtccaggcagggaatgatgcgttttgtgatcattgtgctgcctcctgtgcttttttgaggtcgatcgcgccggtgtagtacgctttgccgatgatggcgccgtagaggcccatctgagaaagtgcgcggatatcgtccagcgtcgagacgccgccggaggcgatgaattggatggaaaactgttttgtcagcttctggtagaggactcgatttgcgccctgcattgcgccgtccttggagatatccgtgcagatgaccgtcccgacgcccaggtcctgcagttgctggcaaaagtcctcacaggtgacggcgctggtctgcgtccagccccggatggcgacgaggccgtcccggcagtccacaccgacggcgacccgctcgccgaaggaccgaagcgcctgggcgagaaattccggctgcgtcagcgctgcggtgccgagaatgatgc

SEQ ID NO: 2003 - DNA, 12632 bp, Unknown
  16S sequences of unknown bacteria
gaaggacgcctttgctccgatctcgatttcatcatatgttacaaaatccttggccatctcagctcctctccgcaatccagtctccgatgaccggtgcgatggtatttttgctctgcggactgatatagatgcccacatgacctacgtcgaacatatgaaaatccttatcctcacttcccaccagatccagaatcggctctgtggaagaaggcggcaccagatgatcgtactttgcgcagaccaccagcagagggcatttgatattttccatcttaacttcttttccgccgatgaccagctcacctttgaccagcttgttatccacatacagatcgtttacaaactggcgaagcgtcgctccctcctggtccggactgtcgaaaatccagttttccgtgcgcatgaagttctccagatatgcgggatcggacatacccgcgccgaatcccacgtacttgtcgatcagcagctcgaaaggcttcagcagaacaaaggtcgcattcatcagatctgccggaacattgccatatgcatctaccattttgtctacggaaaagtgacggctccatttaaagagcaggccgtcgtcgatgctgaaatcgatcggcgtcaccatagaaacgaagtttttgatcttttccggatggagcgctgtgtagatcgtactgaacgtacctccctggcagacgccaagaagtgtgatctgcggctttccggaagtcttgagaatataatccacacagtcgttcatataccattcgatatgatcctccagtgtcagatacatgtcttcctttgcaggatatccccagtcgatgatataggtatcgattcctttttcaagaaatgacttgattacggagcgatccggctgaagatccatcatatactgtttatttaccagcgcataagtgatcagcatcggcgtatcgagaagttcgctctcgtccaccagaggccggtaacgataaagcgtcatcttgccgatagtcagcaccggatctttctccagttctcctgtgcggattctgtctgccgtcatattgatcatgttttccattcccttgacgacaccctgcatatagtcggctacatattccgcggaacctttataatcaaatttcagcatcctacacctccgtatcctgcttcagactgccgagctcctgcctgagcgcttccatttccttcttcagatcccggacgtccttgcgcagatcatacactgtcttgtagagactcttcatctctgaattggtcggaatcggcaatatcgacagcacattttccataaattcatcggatttcatcttaaagtcgtacgcgttatttgcgtattcccccataaacgccgcgaattcatcggtaaaataaaaatcattgatcgcctctgaattcaccttgatccacatatcgtaataatctttaaatgtcatctgcctgtcgggatcggacatcacttctttgtattcgtcccagagttttgtatttgcatctctcaaaatgctctgaacattgacagcgagctcaaaggaactcagcatcatgcgcatataggaatccagcatctgaagattcagcgccgctttgtccttgacaattcccacaccgccggtacgcagcagtttgccgaaagaatcctgatacgcgtccgccatcagcgcagcgtattgaataaacccctctttatcgcccacggacgctttgcggatacattccataaacgcatctttcttttcaatccatgggttcataaaatcgccgaaagtaacgccagccgtcttgcccagttccgaataagacgtcagaagcgaatacatatcctctgacagaatcggcttcaaaatattctccgtcagatatttcatcagttcttccgatttttccgcatattctctcgccacccctacaggatcatcgatatggccttccgcttcttccgccaggtccgtccagaattcgtacagcttggagtatacagacatagagtcaaaaaaccttcccatcagcgggacggaatccttgaatgcctccgtacggtaaatttccgtagtcggccagacttcagaccatttcttccagatatccttataggattttgtcagaaattcattgatcgcttccgcattcttaaacatcatctcagcagtatttttcggcgtctgctttttttcttccttctgtgatcctccctgaaaataatccgtaaaattgtctaccgcatccatatattgatccatcatgtttttttgaagatcaagtcctttttcatacatttctttatcgaaaaaaaacataacacactcctttcctttaccattcagccgtaaatatccggacgctgcggccagataaaaacagcctatcccttatatatttattttatacgtattcccgttgttttgcaacgactttaagcgcatacaaataatttgtatatttcatattatcaattaaaaaatatataccgttaaaacgaattatcttccgcagatttttcactcttttgtgcccggtgcacaagaccgctgccagccaaaggatgtgctatccctcgtccgacgaaaagggacggatacggtgacggagatccccgcgtatcgagccgatttgacggacccggacatggacaaaagataaccggcgtctgccggctgcaaaaggaatttttcacgggaacagaaaaaagaaaagcgcttccgccgaaaccagaccataccgctttctgacggaagcactttgattttgtcttcattttgtacagcagatccgctacgatacctcgaaaatacgctcgatcatattcacaaaattctttgtgatataagagtcctttttgcacactacggggattccgctgttcatcgaaatatagatattttcatcttcctgtatcataccgcacaccggaaagcgcagggattccgcgatatccgaaatcgacggaaagatcgcgttgcttccgtgagccggacgaatgcggttgaccaccgccgacatttcccggatgccgcaggacagcagcttgcggccgacagagtccgcatcgcgaagagatacatactcctgtgtagtaacgattaccgcgcggtctgcaggagagatcgccgtctgccagtcctcgccgattccctgaggagcgtcgatgatgatatgatcgaatttttcgctcaatttttcgcacagcttctgcatatgtgcaggcttgatctgcgctttttcgggcatctgtgacgcagacagcagataaagagcccggaatcgccggtctctgatcagcgctttttttatagtgcagattccgtttacgacatcagagatatcataaacgatctgattttccagtcccagacagatatcgagatttcgaaatccgctgttcatatcgatgagcagcactttagaaccgcgcatcgccagacacgaagccagatttaccgcaaacatcgtcttaccggttccgccctttcccgctgtaatggctgttatcctgcacatattttattctctcccattttctatttaatcagtatacgctgttcctgcggaatgatccgcataaacttcctgaagttccatgtattttccgataatctctctggctaccggtcccgcatagccgccggaacctccctggaaaatcagaaccgctacggcgatctgcggatcttctaccggagcgaaggaaacgaaccaggaaaaattgtcgtacgtactcttataagcgtcgatccgctccgtggtcacttccccgtcggtgagattgatgacagcctgacggacggcgctgctttcggatttataaatattcgactcctccgacagcagtctgcgcatctctgtctccacctcttcaaaagacagacccggcgcgatgctgcccagatactgctgaatatattccacctcgtccggaggattgacttttcctgatttctgcgctgttccggtcttcgctcccacctcataagggaagccggcaaacagccttctcgcagatcccgcactgccgttggccaccaggcgcatgccctctctgactaccgcataagcgtctttattggtgttttccaccttcgttccgctgctctcctcctgctgcatctctccggataccgctttcgtcagcgtcagatcgtacaaagtgccgtcgtttgccacagtcgccacatacctcgccatctgcagcggcgtatacgcattttctccctgcccgatggagaggttcatcgcatcgccctgattccatttcgccacagagaaataattgcttctcacctcatcggtaagcgcgttcagctgatcctcctgcaccggcatctcgctcagacgcttgtacagatcgccgcggctgaggtcttcctccgcccagctgacgatttcatccacggtctcttccagtttggtgctgtcatcggtgagatctgacgtgaaatatttcgccgcggaagagaggagcatatttttcagactccatttggtggcagccagcttcgcctcctccgaagggacgcccactgccgactcagccagctcgatgccggtcttttctccgagtcccagcgccttggcgtaatccatcactttttcgatatccatatcgatgctgaggttcctcttgttataaaagtcgtaacccgcacagagatctgcaaaataataattgcaggaaacttccagcgcgtgtgtcagatccagccacccgtgtttacctctgctgtcattccagatccagcagccgaatgtccttccgccgccgatgtcgatgtatccgttgtcgtaaagacggttattcggattccagccggcgttcagagccgccagagcggtgactggcttaaacgtcgatcccggctgaatcgaagtcatcgtcgctacgttatacagagggaggggagacagaggatccctcggattttcgccctgcagcatcttccagtcttccgaagaaattcccgttgcaaacagattagggtcataacccggatagttcgccagagcgagaacatcgcctgtcttcacatctaccgcgaccgccgcgccgacattggcgtttcggtaagctttgctgtagctgtaatttccgtattcactgacaaacgtacctcccgaccggatcttctgcagcgcctgctgcagcgcttcctccgctgtcttctgcaattccagatcgatggtgagatagacgtcgtctcccggttccggatcggaatcgctgataacctccacctgctcacctttggcgttgacctgaatcagtttctctccgtcgctgcccttgagtacactctcataataactttcgatgccttccttgccgatcagatctgtggaagtatacccctttcgcagatattccgcctgctgagattcggatatttttcccagataccccagtacatgacatgcggtttctccgttcggataagttctcacgtactccctgccgatctctaccccgggatacagataagatttttcttcgagcgtgacgatcgtctgctcgctgaccccggtggcgatttccgcgggaagataactggaatagccgagactcttcagcgcatttcgtatgatcagaatcttccgcgcgtcttcgtccgaataagaatcatcgatttcatatttttccctgagcgcctggaaagcttcctctgctgtcagatcctcatcatcctcatcttctttcagcttaaagctctgaagaaaagacgtcagttccagcttctgtgtatattccattttcttgacggaaatcggtggataaatattataggtattctgaagaattgcctgcgcctcatatttatccagactgctgtccactccttctctctcgcagatggcctcaaaggcttcctccgccgtcagatcggtacgcagattctgcgtggtgagccagtcctcaatctcctggtcataagtgtaataaaaaccgccgtttccgtccatgacgatcggaaacgtatcgttatacttttctccgtttttttccagcagattcagcagattgagcgccactgtattgatctgtttttcgtctatttccgcggctacgagattaaccgtataactcacctcgttgcccgccagcagtctgccgtatcggtctcggatctctcccctcggcgcagacgtatacaccgtcttcgtactgagattttccgctctctccgcccacacctgtccctgtacgacagtcagatagaacagacgggcgccgagaagaatcatgagcacgaaaaaaaggagttttatctgattgtgtctgtcacccagccaagttctcatatcatgccccctgaattatcatgtcgtaaaaccgcgtctcttccttgcaaccggcagcagcaggagcaggacgatgtaattccatacgatggaaaccggtacgctcttcagccagtagatcaggctcatatccgcctgcagcatcatactgttcagcgcccagtaagccgcagtataaaacagagttgcagccgcggtaacgagaatcagcagcagtttgttatcccgaaagacgacgctccgcaccattttcaaaagcatacctaccgcgaaatagatcagcggagaaattcccacaacctgtccgaaaaacatatcctgaatcagaccgaagagaatgctgaagacgatcccgtccatcttctgaaagaaaaaagaatacacgatagtcagaaccagcaggatattcggtgtgattccaaacacagctatggtattcagtacggtacactgcagaagaaatgataccgtataaatgagaaatagtttcagtttatccattttcttcaccgctacgaaccgatcagaatcgtaactgtcctgaccgccttaaaattcacctgcgattccacgctgattttcttttccttactgctctcgtcatattctaccgaagctacttttccgatagtaatccccgcaggatagagactcattcccgacgtgatcagaatatctcctttattcagagatttttcttcatcgaagagatatccggtaagaccgccctcgccgtcgccggagaggaccccgataacttccggatcccgaagaagagtgaaacttaccgaatcgctggcatcgacaatgcccagaactttcgcccagttttttcctacggtgaccacttttcctaccaagccgtcttcatttaccacgatgctccccgcggtgacaccgtcgtctttgcctgcgtttacggtgaagacattgaaaagattcgagccgtctgtggcgatgacgtccgctgtcactctctcataattatcgtcatagtccgcataattgagactctgggacaattccctgagctgctgaagcttctgttcggtgagctgagcttcggtgagctggttctgcagatcttccactttctttttcagctcgtaattttctttctgaagactgcggaatccaaagatccctgtaatcccgtcttttatcccgctgctggcatcggtcagaggctcttccgccaccgccgcgccggactgaaccgccctgcccggcagagaaatccatcccagattgtaggatgatatgacaataatcgccaccaaacaaatgatgacgatcatcgtaattacaagctttatatgttcttttatccagttcatataaatactcctgtccctgtgctgaaaagacggtccggatcagtacgcgctgttattcgtgtttgcgttagcatacggattctttgctctcacatgagtcaggatattttccatattctggagactcagacccgttcccatggcaaccgcttccgccgcattttccgcgatagtggtggcgatgcccgtctctctttcgatcagaatatcgagacctctgagcagagaaccgccgccggcgagaaccatgcctttatttatgatatcagctgcgagttcgggcggcgcagtctccagcgtcgcctttaccccctctacgatctccatgatcgactcttcgagagctgcgcagatatcttttgaagatacttcaatggtcttcggaagaccggtcaccaggtctctgccgctgatatttgactttagaatccactccgggtcactttcatccacgtaagcgcagccgatagcgattttcactttttccgccatcttttcaccgatcagaagaccgtacattttgcggatataattgatgatcgcttcgttcatcttgtccccggccatcttcagagaggtgctggtaacgatgcctcccagggaaataatcgcgatatccgccgtaccgcccccgatgtcggttatcatacagccggtaggggaatccacgtccagccctacgccgatggcagcggccatcggttcctccataatataaacttccttcgcgcccatctgccgcgtcacttcttccaccgcgcgcttttccacttcggtgaccccggaaggcacaccgattaccacgcgtactgaggtgaagaaagaagaagtcggaacgactctgccgataaaagacttcagcatcatgctcgtcattccgaaatcggatatcacgccgtccttgagaggtctcactacgctgatgtgaggaggagccgcgccgatcatactcttggcttcgtttcccaccgcaatcactttttttgtatttttattgtaggcgatgacagaagcctcgtccagaatgatccctttgcctttgatatataccagtgtatttgcagtacccaggtcgataccgatatcctgtttgaaaatgcccagtcccataatgatttcttctcctttgtgcaccgcgccgattcgcgcttatattttttattccgtatgtgtttaaaatgatctgtccatcctgttagatcccgcccagctctttcatgctggcgtactcgccgtcacctatgatgacgtgatcgagtacgtgaattcccagaatgtctccggcttgtaccagtctttcggtaagcaggaaatcatctctgctgggagcgggatttccgctgggatgattgtgaacgagaattacgctggcggcgccccttcgcagggcgttggaaaaaacttccctcggatgcgccggcgcgctcatcagcgagccgaccgacacgtcgtccgtcatgataatctcattttttgcgttgagcagcagaactttaaaattttctttcttgaggccgcgcatatcgctcataaaaagcgatgcgatgctcccgggggaagaaatattgatccgcttctgcttcggttccgcatgaagtctccggcccagttccgcggcggccatcagacaggctgccctggcagggccgacgccgtcgatccggtagagttcctccggaacgcagtcgttcagaatgcggatacctccggcatccatggacagaatccgttccgcgagatttacggcggaagagcccgccgtacctccgcccagaaggacggcgatgagctccgcattggaaagagaagacgcgccccgtttcaaaagccgctccctcggtctctcctccgcgggcagatctttgatagaaatgtaatttttcacccatcgtcaaactgcgtatgtaaggaaacgatgcggcgtcatacgccgaatcgcgcaagctcgatttccagccgcttccacggcagacctacgacattgtcataatccccttcgatcttcctgacgaattttgaccatccgccctgaatcgcataagaacccgctttatccgccggctctcctgtagctatatatccgcgaatatcctcctccgtataatcgctgaaaaacacgcgtgtttcctcacagaatacactcgtgttttcgctttcggcatcgcagacggcgacgcctgtcatgacggaatgaacatcgtttttcagccttttcagagtatcagacgcatctttctcgtccgcaggctttcccagaatacagccgtcatataccacgatggtatccgcagctatgatcagaccgttctctgtctttttctttaccgcaagcgcttttttcagcgccaggtacatgcaggcggacgcaggatctgtatcgccgtcaaggcgttcgtcgacatcggcggtcatcacttcaaaagcgacgccgtgcgctgtcagtatatcgaaacgcctcggtgatccggaagccagaatgatgcgttttttcatatgtcttaacctctctcatttcggattgtctaaaatagtgattatccggtcagttattacaattttaacatcattcaatacacttcacaataaatgaaatcatatattataaaattttcagagtttcttcataattcattatttaccagtctgccgcttttcaatcgcccccgcagaatgaaaaatttattcgtaaagactgaaacattctctcagcttaccgatggcctttttttcgatacgcgacacgtacgaacggctgatgttcaattcgtccgcaacttcctgctgcgtcatactctcctgattgaaaagtccgtaacgtttgataagtacgattctctctctctcccgaagtttattctgaaccgcatcgtaaagttcctttttctgaacgctcttttcaatcccctccgagatttcgctgccatccgtaccgaggatatcgttaaaactgatctcatttccctctctgtcggaaccgataggttcgttgatcgaaatttccgcccgttctttctttgattttctcagccacatcagaatttcgttttccacgcagcgcgccgcgtaagtgcccagacgcacgctcttgcccgctttaaaagtctcgatggatttcatcagaccgatggtgccgatggaaatgatatcgtcggggtcgattcccgtattggagtatttcttggcgatgtgtgccaccagtctcagattatgctctaccagaacatttctggcgctcggatcaccgtcctccagtttctttatatactccgcctcctcttttgcactgagaggtttcggaaaagaatttccctcggagatatacgacggcataaaaatcagagggtagcccaggagaattgtggacagaagaagagacagactcatgaattaactcctttctgtattatgtgctttacttgaaagcagttataatggtaaactttaaaaagtctgcggaaaacgcgcagcctccttggcggccgcactggacgcagaatcagagaaatgggcagaatcgccgatttcaatttcagaagcagaacctttccgcagtccggcggaagctttttccggcccgcttcctctgcggcgcagataacattccctgtatcacagatgcagcggacagatacaaaaaggagaaacagcagaatgagcatcataaccgtagaacatctctcccacggtttcggcgaccgtgcgattttcaacgacgtgtctttccgtctcctcaaaggtgaacacatcggcctgatcggagccaacggcgaaggaaaatcgaccttcatgaacatcattaccggaaaactgcagcccgacgaaggcagaatcgagtgggcaaaaaacgtccgtatcggttacctggaccagcacaccgagctgaaaaaaggtatgacaatccgcgacgttctcacctccgccttcctctggctcttcgaaatggaagaaaaaatgacggcgatctgcgaccggatgtcagaagcggacgagacgcagatggaaacctatctggaggaactgggcgtcatacaggatatgctcacagtccacgatttctatctgatcgactccaaggtggaggaagtcgccagagccctgggactgaccgatatcggcatcgagcgggacgtcaccgaattgtcgggaggccagaggacaaaagttctcctcggcaaactgctcctggaaaaaccggacgttctgctgctggacgaaccgactaactaccttgatgaacagcacatcgaatggctcagacgttatctgaacgagtatgagaatgcgtttatcctgatttcccatgacatcccgttcctcaacagcgtcataaatatcatctatcatatggaaaatcaggaattcagccgctacgtaggcgattacgacgagttcatgaaagtaagggaagtcaagcgcgctcagctgaaagccgcttacgacaaacagcagaaagagatcgccggtctgaaagacttcgtagcccgcaacaaggcccgggtcgctacgcgaaatatggccatgtcccgtcagaaaaaactggataaaatggatctcatcgagctgacggcggaaaaaccgaagccggaattcaactttcagatttccagaacgccgggccggtatatcttcactacgaaagatctgatcatcggctatgacgaacctctgagcagacccctcagcatcgagatggaacgcggtcagaaaatcgtcctcaccggcgccaacggaatcggcaagacgacactccttcgaagcctgctgggacttatccctcctatttccggttccgtcgcgcagggggatttcctggaaataggctactttgaacaggaaacagaacagggaatcaccaccacatgtatcgaagagatatggaaagaattcccgtcttattcccagtacgaggtacggtccgctctggcaaaatgcggtctcactacaaaacacatcgaaagtcaggtccgagttctcagcggaggagaacaggcgaaagtgcgcctg

SEQ ID NO: 2004 - DNA, 10192 bp, Unknown
  16S sequences of unknown bacteria
cccgccgttgtttgtgctggatgaggccaccagctccatcgataccgagacagagcagctcattcagcaggccatcgaacgcacgtttgtcgggcgtacggcgtttgtcattgcccatcggctgagtaccatccgccacgcggacgtcattttggttttgcggcacggaacgctcattgaaaaggggacgcatgaagagctgatggcccagcacgggtattaccggcggctctacgaaaaccagttcattgccaatgaacaaaaagagctgctttccggtgaaaaaaaccaataaaaaagagcgggaaacccgctctttttcttttaatatttggattccatcacatagactttcgcccgtttcggaatggtgtatccatccaaacgcatcacagaatcatggtacatgctgatggcatattcgctttttttcatctcttccaaaaagtcctctaccggcgctagatcatagcggcaggcctctgtcttgtagtgcatcgggatcacgatctttacatccaacgcctcgacaaccttggccgcctgtttggcgtctatggtaaacaagccgcctaccggaatcatcaatacgtcgatctttcccagtacctttacctgttctttgcccagcacatggcccaaatctccgcaatgacaaaagcgcaagccgtccgtctcaacgatggaaacaaggtttttcccgcgctttgccccattttcattatcatgataagtaggcaccgtgtctatggcaaaccctttggtttcaaaatggcctgccttgtctatcttcatatagtcgggattttgaatgactgcggtattcgcgtggtccatatgcccatgagaacagatgacaacatccactttatccagctggggctccttataccccgtatcctcgcccttataagggtctatcagcaaccgatgcccctcttcattggccaaacaaaagcacgaatgtgccaaccattccaatgtcatgttttcacgccctttcctttctaggttattatatagtatagcatacaattccctaaaaatggaattcccgctttgttttgtttgtcgtcaatatacaaaggttccatcctccgcgtcgatgatttgtaaaatgtcctcttcctcgcccgtttcggcgttgatatgtacatagaacgaatcgccgccgttggtgccgacaaattcatagcacaatgcctctcccatatcgtcggtggggatcaaggccagcctacacgcctgaatatccaggcgctgcgccacgcgctgttccatggctgcctggtcgatggtggtcttgttttccatctgcctatccgtatggtacacgatataattgttggcatccatccccacgatacgtccggactccacctcgatccaaactttaaccagatccgggtacaaatacacctcgttttgcaccggcagcatatttaaaaccgccatgccgttgtaatattgcgcgtaagcgcctcgcatctccggataccctctttgttgaagatactgagccgccgtttcctccagcgcagacaactgctcctccgaagggcgcacggtctcgctgcctgcgctgtttggcaacgcctggtacagcaagccgtctcgcttggttacgctgacatctatcaccagcccgtcgtccatcgtacattgaaattcgtacgttggaatcaacccctcattctgttcaccggtttgctcgtaatcgccggggaaaaagctctctgccgtttccagcgcctgctctacgctgacttccgggccctgtgcatttttaggctgaatattctccgccttttctgaaaaggcgccatcgtaaatcagccttggacgctgctgcatgctctccatgactttgctggcgtttttgccgcttccgttgagcatttcaagctgtttagacggatcgtctatgtcccagtgaatgccctctgcacgcctctgatccagcagctttgacaattcgttgctctgctcttccatggttttgagcgtatcgtattcttcttgggaaatgtccgtcccctgctctatcttttgagtcagcagatagcaataatctcccaattcattgacaaaggtaagcagcggctcgctcacatcctccggcagcggcagtgtcgacagcgcgccctgtgtttccccggccagcctccaaaggccacccagcagcagggcttgctgcgcttgggaggtactgacgcgcagcttggccagctctgcccccatgttggaaacattgccggagatctctcccaatgcttggtcataggcattgttcagctgctgagcataggcatttttccggcctaggctctgtgtcagaaacatggccaaaaccacagcgatcaccagcatggccaccgcaatcaaacgccagatttttgtctgtgtccatgtatgctttgtctgcatggcatcctccctcatttacaaaatacgtgctggccaatggtcagcatgatcgggcgctgttttatccattcattggttgccgtcttaggattgtaataatataggcaaccctttgtcgggtcatatccgtttagcgcatccttggccgcgcgataagcctcgttgtccggtgtcaggttaaactgcccgtccgcgactgcgtcaaatgcgcccggctgatagataacgcctgaaatggaattggggaattccgcgctctttactctgtttaaaatcacagcggccactgccactttccctttatacggttctcccctggcctcgccatgaatggcccttgccaaaagcgtaacgtccgcttggttctgcgagggcgagctgctgccgctggtcccgctgctttcaagctgaatgcctagttttgcggctgtggcagggccgatgataccatcagacgtcaatccgttggtgctctggaaatatttaacagccttttccgtaccgctgccaaatatgccgtctacactgccgtcataatagccccaattttttagcttttgctgtacggtctttaccaacgggccctgcgaccctttttttaaatttaccgttgccgccaacgccgcctgttgattgggaaacatcagcgtcagcattgtgctcagcgcgatgaccaaccccagcagctttgccggtgcatgctttgtgtactccataccgcgttcctcctttattcaaacagccctgctaaaaatgattcatattccacaccgtcagaaggctgccaattttcttctgtttgcacgggctccaataaacacagtggcggaaacagcacacaccaccaattttgcccctctgcctgccctagcttgatgcgcagcgcccgatactcgcctgctggaaatagcacgtcgccgtatgtcttatccggaaattcaaaggtgccaatctctgccgttgcccggtaagggaatccctcttcttccaatacgccgtttgcagtttctatcaattcctccaaatgctgggccgcgtactgctccgcttcctggcttgtctgtgccccatccatatcgcccagctcttgaatgatggcgtctcgaaccgccagcttgatggcctgatccgcttcgctgttgctgtctgcaatgacgtgcaggcggaataccggcggtacgccttgcgcagttgctaagctgagcgcaatgagaaatgctatccatcgtttcatttgtaaacgcctcgttttcccttgatgttatgtatccaaagtttgtccaatctggaattttttaaccgcccttgccaaaaaaaatgggtctgatacaatgaaactacgaaaactaccggaaaaggagtcgttgtgttttgatctctgcgcgctctaccgctaaattgaatcttacgctgaaaatcaccggcactcgcccagatggataccatctcttggattccctgttttgcagcgtcgacctacacgacaagctcaccattacacccggccaagacgcatgttcgacggtatgtagcccggaacagcccatcgtaaacaaccttgccacgcggacagcgctgctcttttatcaacaggcagggatttccggcggatgccgaatacgcctagaaaagcgcatccctatggaagctggccttggcggaggcagcggcgatgccgccgccgtgctgaaggcattgaatgaccactttggccatcctttttctgaggaagcgctctttgcgcttgccctgcagctaggggcggatatcccctttgcgctcaagggagggctggcccgcgttacggggatcggagaaacgcatactcatctccatatgcgtcgctcgtttagctttgtcatcgcaaagcccgcccaaggcttgtccacccagcagatgtatgcctgttatgatgcatctccctccggccttcccatcgacaatgatgcgttttatcgggctcttttggcgctggatggtgcggccatgcgcgcctatggcggcaacgacttgcagccggcagcggaaaagtaccttcccattatcgctcagcttcaggataagctataccaaagcggggccttgtatgccgccatgacgggcagcggctctgctgtattcggcctttttccttcctatgagcaggctcatatagcccaagcatctttgcgttctatggttccttactgtgtgtgctgtcaatcgctcgtataggctgccaatataaaaaaagcggtaagctgtgcttaccgcttttttcttttatcggcaaatcaggatcagtttatcacccttttccaccggcttattttcttcttttcccttatagcgaatatcctccatccttacacggtaccgtttggccacatcccagagatcttcgcccatccccacaaaatagatgatgatgcccgccggcctcttttccgactcctcctccagctctataccgcacaccagcgtaatctcctgttcttgttcgccttctgcttcccaggccagcatcactctgatatccagcccatctccattggttaccgcttgaatctgctcgcagaccacatgggcaaatacctgcatgcacgctgtcatgcccggcgcttcctcttctaagtgtaccgggatctcgcagcggatgctttgcagctcttcattgcggtctaaaaacaaaacatcgcactgtaccacggtatcgatgcagatcttatcttgctctgctgttgcccttgcagcgcaggcattggcaaaacagctcaaaaccttggaaggctgttcctccagcggtacggaaacctgttctctaaccggtacctgtccttttgccttggcgctagcgacgcatacgctaacctgctcctcttccaacaccacatcatgacccagggcatatgcatccgttaccaccgtcatggtgcgctccgcggaagtatccgcctccagcgtacagacagcttcgatatggaggctatctccttcttcgttcaccctggcaaacagatctttccattgggctcttaccattgcttgctgatccatccttgcacccggcgctgcgatcatctggctaaacggcagctgcgggaagcactgcaaaatgggcgtctgctcatcctccgtgcccacaacgatattcagctttaaggcaccctctacaccgatagcatcctcttggcaaaaggcctgcaaaatctcggcatgcccttggcagcaaagcacctgcgtagcgagaggtgctccggtaggcagctcgatgtcccccaccacctccacggcagcggttccccgggcgcatctacggcgaagcggtagatttttggtctttgtcacaacgccctctggcacgtgctccttctctagcgcgcaaaggtccttttcctcttccatttcacattgcacatccaccaccgcagacacgttcagccttctggaatctatcatctcatagtttacttcacaaacatatgcctgcgccatgccccgcatgcccggctgtgcgcccggcagctcagccgtatgcttaaaggtagagacggactcaaacgcatgcaccttgccctctgcgcacacatagcatacgcacagcgtgactgtgccatctgtcattacgcggccttccaaaagctctacctgcgcggtttgcgcatggccgcgtaccatgaggacacgctccatttctggcttgccaaccggcagcgctacctccccttcaatcaacgcctgtgttaggctgccgttgttatgatgcaatacacgttccctgctgcattgttcttccattttatgcccccgttctatgcgttgcttcgcattgttgttttcttttctatgcttaatcggcacaaacgaggtttatgactttttatacgtatttttttgtgcttgtatcgcccaacaggcccttttgccctcttgcaaacatttttccccagcattgaaagacaaaaaaaggcgctctttgaaagagcgtctttctactggagtaggggggaaattactccaagtattccatttcaagctgcctggtaaacagttcattgtatccatagctgatgcgtttttcctgtccgtgctcctcgatcaagatcgtgaatacgctgggaaaactgcgttctaggatccctacgttttccacgcacttgcttctgcctctatgagatcgcatccaaacccgtctacccaggtttttctctatgccgcctcgtatctcttgccactgttccatgccatcgcctcctgtttgttctcacaaatagcatgtccagtatgcggcaatttatgcagattgttccatggaaagcttatccgcgaccaatgcgatgaattcgccgttggtcggcttatcgtttttggtatatacctggaagccaaacagctgattgatgttttcgatcctacctctggtccacgccacctctatggcatggcggatggcgcgttccacctttgtatcgctggtgtcaaaggcggccgccactttgggatatagctcttttgtaattttattgatgagcccgcgatcctccattaccattttaatcgctgcgcgcagatactgatatcccttgatatgggccgggatgccaacggttaaaaagatgctggtaatcttttcatccaaggatctctccgctggaatgggcgcaatgctctggttgagccggcgctcctgctttgcgcctacaatttccaatacccttctctttaggttgtccatcgaataaggtttgaccataaaatacttggctcctaaagaaagcgtatgctggatgatttctttgctggcaaaccaggatgtgatgatcacttccggcctaagctgcggcggcatctgcactacctgctccaatacgctgattccatcctgctgtggtacgatcagatccaataccaaaacgtctgccttgatgagctgttcttgggaaacgcaaccgtcctgtacggtatccatcagcgtaatcccatcgtccgccgcgaagtaatctgccacttgttggcaaatctcttcttcatcttcgatcatcaatagttgtctgttttccatgttacatcctcctcattcttcccactcatttgttgtcccttgttacaagtttcacccttacgctcggcatattaccatatttcttgggaaagatactagatgagtttagttgtttcgacgcaattcgtttcgattcgtcagaatttgctaaaaaaacactggttacctgtaccatgcgctataaaatcggaggttttcttaatggtatcgcctgcatctcgccgacaaatcaaatatttctgcgtattgattgcaatctgctttacagttctcattatttccctctttttgttacaaatcgtacatggatccgactatcgtcagcaggcccaagccttgcaggtacgcacactgacttcaaagggtgcgcgcggccggattaccgaccgctatgggacagagctggccggcaatcgcatttcctatcaggtgatgttctttccctccgaagcggaaaaagaacaatggaacaccagccttgccgctgctttgacgctgatgcgcagtgcgggcatcgaatgcgaatatcctctgcctattgaactacatgaatccgggtttgtctacaatcaatcatcagaagagattgctgcctttttatctcagcataaattgccagagaataccagcgcggccgacgccgtccaggcgctgatggacaaatgtgaggcaggcgctgtgccaggggagattgctttggaccttttggggctgcgcagccagcttagccttcagtcttatcgttcctatctgccaatctgccttggcgaaagcgaggatttttccctgtgcgcccgcatcatggaatacaaacagcctggtatccgcatccaaacccattatacccgttcctacccccaaggggaaaccttgtgtcatgttttgggcagtgtgggcaaaatccccgccgacgaggcggacgcttatcaagaacagggctatgatatttccagcgacatcgtaggcaagagcgggctggagcaaacgctggaacccttgctgcgcacaaaaaaaggacaaacccagctttccgtcaatagcctgggcctatctacttcttctaatgctatcaatttggcagaggacggagaaactgtggttcttaccatagacctaacccttcaacaggcagcggaaaaagcgttgcggcaaaccatggcggacattcgcgccggtaagctgggggaagcataccccaacgcggaaattggcgctgcggtatgcatcgatgtgcataccggcgaagtgttggccttggcttccgagccaggctatgatcccaatgtttttaccgaaacactgccggatgccgtgtggcaggcgctcagcccttcgtatgtgacggccagcggcaaggtaaacagtgaccctaccttgccgaggccactggtcaacaacgccgtatccgccgccttcccacccggcagcgtattcaagcccatcaccgctgccgctgcattgggcgcagataaggttaccgcagaggaaaccatcttggatcttgggcgttatacagccttttccgaaacagaggcccccggatgctggacctggaacgaaagccataccacccatgggtatgtagatcttcacgatgcgctggaaggttcctgcaactattatttttatgaagttggggtgcgcacaggttcagagcagcttgaagccaccgcagaaaagtttggcctggggcagcaaaccggcatcgggttgtccggcgaggccagcggtatgatggatggacaaaaaacagcgacacgccttgtcaaccagcgtgtcgccgctcaattaaaatctatgggatataccgtagacgaggaaacgctcagccaaacattggccccgatcctcagcgccccctccttacaaaaagcacgggagcagtttacgccgcttggcattcatccagatgatattcctgctttataccaaaccatcaacgacaaccgttggcgcgaatcacgcgtcctggcagccgccatcggccaaggcgcagacagcgttaccccgctacaaatggccaacgccatcgctgcgctgacccaagctggacgccgctatcagccccagctagtgctctcgctgccggacagccaaggccgccaatcctctaagatcgtctgcgaaccctttatggaaacacaggatgtgcaggatatcctaaacggcatgcgggcggtcacgcagccgggcggcacggccgccaaatatttttccgactgtaccgtgtctgtagctggcaaaacaggcaccgcccaaagtgagggccgagatgcgtatgcttggtttgtcgcggcagcgcccgccgaaaatcccagcattgccattgccgttgtcatcggccaaggcggccatggcagctatgccgcgcctgtggccaaggcgatcattgaagcttattttgcttccggtacaggcagcgatttggccaaggaaaaaagcatgcttcgttaaacggccaatgttcttcccgtttcgccatcctgtgccaagacccagtacccgtctcggtagatgctgaagccctgcaaataggccggcggctggggcgcatattctcccggcaccgccacagccatggcaacgctgatgcccttgcgctctacacagcccaacagatagtacccatatctgctaggagcctctactcgtttccatttccattggccggcatattccccgcccaaagctggcccttgtatctcctcttttacagggttttcc

SEQ ID NO: 2005 - DNA, 6713 bp, Unknown
  16S sequences of unknown bacteria
tcggtttgcagcttttccagcataccgtccagaatgcggaaaaattcctcttcgctgtttacctttcccggcgggatcttgctgacaaccttgaccttttcgcggtatccgccggccagcgcctcgcccaagagcttatcgcagtcgccatcaaaatacatcagggcggagtcaaaatagttgacgccatgatctgccgcatagcgaatcatcttgatggcctcttcacggtgaatggttttgttgcccttttcgtccacactgctgggcagacgcatacagcccatgccaaaggccgataccttgtaccccagcttgccgtattcacggtattgcatgattgattgtcccccttgtctaaaaaataccttttgccatacgcaccggccgcaagccgcggccgggcgatggaaaattcgttatttgccggcgctcacaatggcctcatgcgccttttgcagattttcaatgatatggatatgctgcgggcatttcttttcacaggctccacacttgacacactccagcggagaggcgttgtttttcagcacatggctgtaattgtcctgtactacattggcaaaatcgttgtacatattgccattgttatacaggtaaaaaatccgcggaatatccacgcctttgggacatgggatgcagtatccgcagccggtgcacggtaccttgatcaacgattgataggcttggcgaacctttgcaatcatgtccaattcatcctggctcatcacattggcctcagcttcttcaaagatacggatattatccttgagctgttccatggtagatacgccggacagtatgcaggaaacctctgggaaattgtagacaaaccgcagcgcccattccaccggactgcgtttgactggatatgcatcatagattttctgtacgggttcgggcgcattggccagccctccgccccgcagcggttccatgatgacgatggcaaggcccttagaggcggcgtatttcatcccctctaccgtagcctgatagttgacatccagaatattcatctggatctgcgccatggcccaaggataagcatccaccatttcgcggaatagatctacatcatcgtggaacgaaaagccaatggccttgatcttgccggcctgctttgccttttccatccactgatacatacccatctgctggaatctgtcccatgcctcgcgattcatatcatgcgccagcagaacgtctagataatcggtttgtaattttttcagcatgtcatccagcgtgttgttgaattcctcttcactgttgacaaaacgcggagggatcttgctgacgaccttcaccttttcgcggtacccgccggcgagcgcttctcctaaaagcgcatcacaatcgccattgaaatacatccgggcggagtcaaaatatgtaaccccgtggtcggcagcatagcggatcatcttaatagcttcctcgcgctgtatgatcttgttgccatgctcatccttgacgtgcgggacacgcatacagcccataccaaaggccgatactttgtatccctcattgccataatcgcgatactgcattaattttcctcctttaagataaaactttctatttatatattacagcatataaatgttttttactaccctttttgttttcactttcaaagaggttgtccgatggaaaaacgggcaaaaggcggcgcaatgccgcctttgccggtttaggaaggttaaaacaggatgcagatcagattgctccggccttcgttgatgatgcgctgaagcgtcatctgcatcttggcctgtgcttcttccggcatacgggtcagcttgtttgaaagcccttccttgaccagttcatgcaaggatttcccaaaaatgttggtactccagatctgggtcgggtcattttcaaactcgctgagcagataatgcagcagctcttcgctttgccgctcgctaccgacgataggcgatacctctgtctcgatatccacccgcatcaaatgcaggctgggcgcgctggccttaaggcgtacgccaaagcggttgccctggcggacaatctccggctcttccagcgtcaattcatccatagagggttgcacaacgccatagcccgtttcgcgcaccgcctgcatggcgtccgctacgcggtcgtattccttttttgcctctaccaattctttgagtagcgcgatcaggtggtattccccttcaatgggcgtgccgcattcatcgcccagcaccttgtaaaacagcttcggctgtgtggatgcttctatctctgccatgccctgccccagctgtagctgcaccaagcgcggcggcatcagcgattcgcatgcctccaggcactgcatcatcttaggataatcgcgcacgcactcgatctggtctgtggcctgctctacgctttccatgacgctctgcaccagccaatggtcctccgaaagcgcaaagatccattccggcatggcaatgcggatctctttcattgggaactcaaacaaaatgctgcgcagcagcgcctccatatcctgggccgacatctccaaaatgttacagaggattacgggcacatcgtatttttcctgcagggccttttgcagctgctgggtttcgggcaaggcggtgtttttacagtttacaatgacgacaaatggcttgcccagcgcctttagctcggaaaccaccctttcttcactggccacataattggcgcgcgggatatcggtgatgctgccgtcggtggtcacaaccacgccaatggtgctatgttcgctgatcacgcgcttggtaccgatttctgcggcctctgcaaagggaatgtcctcttccgaccagggtgtgcggaccatgcgcggcccatcgtcatccatttgcccggtggcgccgtctaccaggtagcccacgcaatccaccagccttaccttggcggaaacggaatcctccagggtaaattccaccgcttcgttgggtacgaaattcggctgcatggtcataatgccccgccctgcaccggactgcggcatctcatccatgatacgttcctttttatacgggttttccacattgggcagcaccatcatatccaaaaattttttgatgaacgtacttttgcctgtgcgtaccgggcctactacgccaatgtagatttcgcccccggtgcgctgtgcaatatcgttatagagatcaaactgttccatccgctgttgtcctcccatccacatatgtatcacaatatatgcacaaaaacggatcggcagaacatggctttccccgaaatggatcggaatttttgttttttccccatttgacgggcagccgcgacgaaaaacacccctgtacagcgatcaaaaagcggcccacgaaggggccgctgtgcgttttccatatattctatttttctttttctcccaatatcagcgattttggcacacctgccgccatggtatacagggggtttaccagctgccccaggtacatctgcccggcctgggtaattgcctgatatgcatccaaagcatcccagccgaaatcggctgccatccaatcgataagcgctcggtaagccatacgggccgcactttccaagggcttggcggcggccaccgttatcagatgcgttggggtttcgatgcgtgggccctcaatgcgcttttttggcaatacccggcaacgcagcgtcacctctgctgccatttccagtgccgtgccgcaaaattctccatccccttggcaggcatgggcgtcgcctacgtacagcttgccgccgtcggtatacaccggcagatagacagtatgccccgggcagacgtcctttacgtccatattgccgccatgcggcccgggaacgacggaggaaatgcgctcataccgcggcgcagtacccagcgtgcctaaaaaaggctggtaggcaaagcgcaggcgttcgtttccctggcaaacaaagtcttggccctgctgcacataatgatagacgcgttccataggcggcgcgcccaaaagcggggtatcctctgtgggtgacaacgcgcccacaccattatggatgcggctgatcgccgtgccgtcatgcgggcgaatttctaaaatgtcgacagccagcgtatcgcctgccttggcgccctccacagagatggggcctgtcagcgggttgaaatagccttcttcggcgtccaacgcattttctgtaaacagcgtaaacgcctccccttgggccacgctggcaaggggcgcatccatcggatccattgcataggtcttttggttcggcttgaagatgggcatcgtctctctcctttcaatcaaaaagcgcacaaaggcgctttgctttttatttcgatccaaatctattttccgtaccgtttttcagccgacggatgttggccctatgctgcacgaacgcaaccaaaaccagtaccgagcacagcactacaaggtaggtatctgcaaaatgcaagcaaatcaccagcacccacaccagccctaggcacaccagcgaacccagggaaaagtaccggctgaccgccagcaccaccagaaaacaggccatggcaatcagcgtgatatacggcacaaacgcaagcataacgcccacggtggttgcaacacccttaccgcccttaaattttaggtaaatcggccagttatggcctgctacggcgcacaaggccccaagatacgcgcccaagggccccatgatccactgccccaaatacaccgcgccaaagccctttgccatatcaaacagcagcaccagcagcccgtatttgatgccaaaggcacgcgtcatattgctggtgccagggttgccgctgccataccggcgcacatccttatgcagcatgccgcggctaaacagcacgctgaacggtacagcgcccagcagataacatacgatacatcccaatacatagttcatgcgtttttgtcctctctgcggcgaatatacaggcgaatcggggtgccctcaaacccaaaggtatgcctgagctggttttccaaataccgcttataggaaaaatgcatcagctccggatcgttgacaaagagcacgaacgtcggcggctgcacggccacctgcgtggcatacagaatattcagcctacggcccttgtctgtcggcggctgtacggtggcggtggcctggttgatggcctcgttcaataggccggtggagacgcgcagcgtgctctgctcatacacatggccgatgagctgaaagatcttatccacccgctgacccgttaccgcggaagtaaacagcgttggcgcataggaaacaaattgtagttcgcgcgcgatgtcctttttgaattggttcatagtatgggtatccttttcgaccaggtcccatttgttgacaacgacgatacaggccttgccttcctcatgcgcaaagccagcgatctttgtatcctgctccgttacgcccttggtggcgtcgatgacaagcagcaccacatccgcccggcggaccgctgccagggcgcgtaccacgccgtagcgctctatgctgttttcgccaatggcgcgcttgcgtctaagcccggccgtatcgatcaggatatacgcctgcccatcgcgggtaaagggcgtatcgatggcgtcgcgtgtggtgcccggcatatcctctacgatgacgcgtgtggtgcccagcatatagtttaccagcgagcttttgcctacgtttggtttgccgatgacggcgatttccagcggcttttcgccttcctcttcttccggctcttgtacgggcagatgggatacgatctcatccagcacatcgccgatgccaatgcccagcgtagcggaaatggggaacggatcccccatgcccaaagtatagaaattataggcgtcctcctggctgtggggattatccattttgttgaccgccagcacaaccggctttttggtatggcgcaacagtgtagccacgtcctcatcgtccggagaagggctgccatgcttgccgtccacgaaaaacacgatgacatccgccatgtctatggccacatctacttgctctttcatcttggcgtacaaagcatcctcacccgccgggtcgatgccgccggtatcgatgagggaaaaggaatgcctgccccattccacatcggcatagatgcggtcgcgggtcacgccgggggtatcctccacgatggcgaccctgcggcccaccacacggttgaaaaaggtggatttccctacatttgggcggcccacaatggccaccaacggtttgtttttcatcggtactcctttccctgacacagtgcctccacaaaagcttctccatcgttttccaacgtgcgcaccggcacgcccaacgcttgctgaagctctagaaggctcatatcatccaaaaacacatcctcatccgctcgctgtgtgctgcgggagatgtaaacgatttctccaagatcctctttttttagggcgcgatagagatcctgcccggtcaacaggcccgccacggtgatcctttcgccgaaaaagcggttctccacgcgcacaacgcgcaactctatgcctaaacgctggctgcatttttctgcaatgcggcaaagcagaggataggctgcctgccccgtggcaatggtgccgcggtacgggcgcgccggttttgcttttgccagcgccctgtccacggtatcctccagatagcgcattaggccgatgccgtcctctgtcagctcaaaatccttatag

SEQ ID NO: 2006 - DNA, 17218 bp, Unknown
  16S sequences of unknown bacteria
tcgtattctggaaccgcggacttcaactcagattcgacagagttattgtcggagacctcgatgagatttatccgtctgaacctcatgtacatgatttttcgggcagagaggaattgatcgattcggctacatgtacaaaggaaggctgcaaaaaagtttattgtaccggagatgggtgcgatgagtacacggttgtagccatacccaaagctgcgcatacggcgggcgaatgggagattattgacccggcgacctgcaagcaaagcgggactaatgtaaggaaatgtatcggctgcggcaaagttatggaaaccgcgaatgtggatatgctgaaacatacatatgtagatactgttactcctccgacaccgacatctcaaggatatacacttcacaagtgcgcggtttgcggttatcaatacatggacagttatacggactatgtggaggaaaatcctgcacaaattataattgaaacgaaaaagacgcgagccggaaaaacggttttggtaaatgtaaaattacaggacaatcccggaatatggggtatggacatcgcggttaattatgataagaagaaactgacattgaattccgtaataaacgggacggtgtttgcggataacgagtggactaagggtaatctttccggcgaggaatatatcctttcatatgaagcaggcgaatttgacaatataacggaaaacggtgtgattaccaccttggaatttactgtaagtgaggacgcgcaaacagatgatttctatgagatttccgtttcgtatatgagcggtgacattatcaatgccgatttcgaagaaatcaagccgattgttatgtcaggcggtataaaagtagtcaaagtgatttacggtgatttaaatggagacggtgttgtcaataaaaaggattcattgttaatgaagaagtaccttgcggacaatacaacagatatcgaccaagaagctgcggatgttttttcggatggagtaattaacaaaaaagattcgttgtatttgaaacaattcttggcaggtttagatgttgaattgggagcataaaggaaatataatgcgacaaagatttttgttattattgttagcagcaacacttttttcgatgagctttgctgtcacttcgacgcttgcggtatccgagtcagcggtttcgattgagaaaaaagatgcttattccggcgatgaaatttcaattgcagtgtttattgcaaataacccgggtatttggggtatggatttgcggatatcgtttgataaaaacgctatgacacttgtaagtgttgaaaacggcggtttttatcagaattccgaatggacagagggaaacttaagcgcggatatgtatacgctctcctatgaggcagacggtcttgaaaacatattgaccacttcgggcacacttgcgatactgaatttcaaaattaatgaaaatgcgatacccggtacatatgaaattaaagctgcgtacaatgatggggatattattaatgcttcatttgacgaaattgagtttaatattttcaacggaagtgtgacggtgaatgacagtaagtccacttacacccccggtgatcttaacggcgatgacaagatcaaccttgtagatgttgttcttcttattcgttaccaggcaggctgggagaatctcgaaattgttaaagaagcagctgacttcgacggcgacggcagcgtcggaatgaaggacatcatccttcttctcagatcgcttgcataacccgattaaattataacaaaagccctcggattttccgagggctttttgcgtatgaaagcgcaggatgccatgatcttctgacgcggtgtttgattgtgtttgatacggcagaaagcgtgagccgacgggcagatgctgacattcgccacgctaacattcgccgacgagaatatcctcggcttccctgagagttgcggcggaattgagcgctgaacgcattgcggcggctcctttcattcccgcgagaaaatgccccgcgcggcatcggctcatcgggattccgagatgctcgccgtgaattgcgacgatatcacgaatcagacgaagcgcgatcaggcgcttttcggcatcgtccggagggacgaaatcgggatcggtgatctcgcggaagatccacggtgcgccgagcgccccgcgcccgatcatcagcccgtcgcatccggaacgctgcagcagcgattcggcactttcgcgatccttcacatcgccgtttgcaatcacggggatgtcaggcggcagtgcctcgcgcacgcgggcgattccgtcagctgacgcgcttccggagtacatctgatttctggttcttccgtggacgaatacggcatgagctcccgcacggacgcaggcgagcgcgacctcgggtgcgtttatctcgttgaatccgagacgaatcttgacggttacggggattgaaaatctgtcggcactgcggcaaacggcttcggtgatttcggcgcatagctcgggcgatctcatcaatgccgatccgtccccggacgaaacgattttcttgacggggcagcccatgttgatatcgatcgcacatggcttttgcgcgtactcacagccgggataatccccggagagcagagaagatgatgcctccgccatgaactcgggcgagtgaccgaatatctgtaatgcggtcggcgtatctccgtcgggcaggcgcgcgagagaggcggttttgcgatctccgaaatgcattgctgcggcggatatcatttcacttacggtgtacgttgcgccgtagagacggcagagcgcgcggaagggtgcatcggtgaatccagccataggcgcgagaaaaagcccgtttcgcgcgacggcagagcctattattacatccttcatctcattcgggcgagcgaagaaattccctcggcgagcgcgtcgcagaggatgtcgatatcttccgtggtgttgttatgcgaaaagcttatgcggagtgttgaatccgcctctcgctcggtcagaccgaacgcggaaaggacgtgcgaaggcttgccggagcgcgcggagcaggcggaaccggcagacacgaagatccccttcgaggacagaaaattgagcgccgtttcgctccggattccggggagcgtgagactgacgacatatggaagatgaaccttcggcaggtttgcgcgcacgtcgggaagacgttcggagacgcgcgaaagaaggtaagcacaaagaccgtcgatgtgcgccgcgcgctcatccttggcggctcgcgcttcttcgacagcggcggcgaaagcgagaattcccggcatattttcggtgcccgatctcatcgtatcttcctgaccgcctccgatgaggtacggtatgagcttcttcgacttgagaatatcgtttcttacccacagcgcgccgacgcccttcagtgcgccgattttgtgcgcgcttgccgatatcatatcgacaccgagctttcgcggtgaggtgtccgctttcatgaatgcctgaacggcatccgtgtggatcagagcgccgggcgcggcttttcttaccgccgccgcggcgctttttacgtcgtaaagcgcaccggtctcgttgtttgcaagcatgaacgatgcaagaatgacatccggcgtcagcgcgtttttcagcgcttcggtgtcgattgcaccgccagcggtcggaatgcgtatcacggcgaatccgtcctcgccgagcctctttgcgcaaaggtcgacagacggatgttcgctgtccgtgatgagcacggtgccgcgcgttccgccgctcccgctcttcctctttttcgcgtatacggaaccaaagatcgcaaaattgtttgcctcagtgccggatccggtgaagatcacgcttccgtcggcgtatcccgcgccgaatccctcggcgacctcgcggcgggcttttgcaagcgcctttgcggtatcgttgccgatggaatatacggatgaaggattcgcccacagcaaggtcatgccctcggcagctgcctccactgctcgcgcggacggcgccgttgttgcggcattgtcaagatatacgtttctcatttgaattcaaagtactccagcacagactgcatttcctcggtgtgctcgtcgaatctgtccgcagtcgaggtatacgttatgacgtaaacaagtgacccctttatcgcggatgcctgaatgaatttgtatgatgtgccgccgattgccccggtgaaggtcattttctttgcggcgaccgagtttatgaggatgttttcgtcggagatgagcgaaaagtcggagtataccttctcaaaatcgggaagaaatgtgttccaccattcctcgagagtggaatcggtgtttgaaagcgaccacgtcattacggatatcgatgcgggatcggacgcggagacatacgccgcggaagcggtagtctttgtgtcgaccgtccatgtcgcgggaacgaagaaataataatccgcctcgtccgcggatgcgagctgatatccgtcgggaatatcgacgtcggatttctttgagcaggagcagaatacggacgcgatcagcgccagcgttaaaagcatgggaatgattcttgatttcgtcatttcgttatctccttttgagatcgtcatttaaaatatgatatcacattacgctcgtcacttcaagggttatttgtaaatatgaaggaatgtgaagacgcaaaaacaaaaataataataattcctaaaaacgcttgactttgataaaaggctgtgatatactgatactgttagaaggaaaccgtgagcggatgtactcggttttcagtgaaaggcggtgcaaacaatgcagaattttacttcaagcgacgcaagatttgtttttgagggaaacataaacagagtatatcaggatatgcttaagcgtcttaagccacacggttcccgtgaaggtacggataccggtcccgaaagtgacggaaagactccgttcctcgatatattcgaggcaaaccccgacacctcatatgagatcaaccttgcaaatgccatcgttaattcatggcttcagggattccctgtgatataccccggcgagcttcttgtcggagttccgcgcccccgtcgccttatgcaggagcatttttcctacggtatccagctcaacgagtggatcttgaatgccgatgtatataaggacagggcggacgagatacgcgcacgtctcgacaaagtgcgtgacaaacttgaccccggcgatatcggcgatatgtataagcgtcagtccgaaattttcggtattcccgcaaaccatgcggcttttaccggactctggtggaccggcggatatcagggacatacggttcccagctatgagaagctgctgcgctgcggcattcccggacttctcgaagagatcgacgagagcatcaagaagtacggcaatactcccgtgcttgcagcatgccgcataatcgtagaaggacttgcaaagtacagcctgctttatgccggcgaggctgatcgccttgcggcggagagcaccggcgaggataaggcgagatatgagaagatcgccgcaaactgccgcagcatcgcggtcaacaagcccgagactctttacgaggctgagcagcttgcatggttctactgcctctgggattgggtggactgcgtaggacgcttcgaccagtatatgtatcccttctatgagaaggcgaaggaagaggatgagaccgctgccgacgagcttatcgcatcgatgatgatgaagttcttcgagcacggtatccacaacatcacgatcggcggtgttctgcccgagaacggcgaggacgcaagcaacgatctttcctacatcactctccacattctccgcaacttccacaattctcacccgagaatgacgcttcgtataagcgataaaactccggatacgctcatcgcgcttgctgttgagctttggtccgagggaatgagcgatccgtcggtcgtttccgatactcttgtcatcgactcctttgcgaacaagtacaaggttccgatcgaggatgcaagagattactcctgcctcgggtgccaggagatcgagattcccgggaagagcaatttcggatgcgaggacggtgcgctcagccttatcaagattcttgagttcactatgaacaacggtgcaaaccgcttcgacgagtcgggataccagatcggacttgcaaccggacacctctacgactacaagacctacgaggagtttgaggctgcttacttcaaccagatcgcattcttcgtgaagtattgggcagagctttccaatatcggcgcggaggttcgtgcaaagaacttctccaagcttgtcaagaccgtcactacatacgactgtgttgcaaagggcaagagccttgacgcaggcggaagccgttacaacttcggatgcgttgagactgtcggctttgctgcggctgccgatgcactctacgctataaagaagctcgtatttgaggataaggtgcttgacgcaaaggttctcgatgccgctatggctgcaaacttcgaaggatacgacgcggttcaccgcatggtgcagaatctgcctaaattcggcaacgacgttgccgaggtggatcagctcgcaagccgtctgcttgatcatttctgggcagagtgcggcaagtatgtttccttccgcggcggtgtattcctcggagcatgctcgcttcttcagggtggtattcagtacggctacagtacatgggcaaacgcagacggacgtgtctgcggcgagcctctcggaaacacgatcggaccggtcagcggacgcgatgtcaacggacttaccgcaatgctcaacagcgttgcagcgctcgatctttcccgcggactcggcggaaccacctgcaacgtccgtatttccaaggatatcacgcagggtgaagagggacgtgcggctatcgttgcgctcatcaagacctaccttgcaacgggcggcatgatggcacagatcacaactgcgaatgttgatgagcttcgtgacgctcaggagcatcccgaaaagcatgaggatcttatcgttcgtgtcggcggcttcagtatccgcttcaacgagcttgacaggacttctcaaaacgagatcattctccgctacagtgactaatctgataaaaaacgggctgccgcttttcgcggcagcccgttgtacattttaaaatgccgaacggcagaccattacggagatgacggataattcgacggataaaatatagaagctcggcatcggacttatgcacattccgatgaatgacggtgggatcaatatagataagacacagggaacggtcgatttgtttgtgcagagctgaggtgcatattttgataccgcttatgtttacggagacgggcaacccgagctggcggcgggcgcaccgaggtattgacaaatccggcgtgtgggagtatgtttccgagatgaaggagtaggggctgtccgccatatgggattctcctttcactatacggcggataagcttgacaagatacttgccgcgcatccggaggcgaaatatgtaccgctcctttttgcgcttgtcctcactgtttttgccgcactgcgtcggaacagcgcgaaccgcgcggggcttaggcgcggtggatgtacatcctcgaaggatgagattcgccgtcgctctgaacatggcagagaaattcccagccgtagcgttcgtagaaggaaacgtgatcagtgacgagatacagcgtgtcgatcccgcgctttttcatatcgtcgcaggcgtagccgagcagcgtacccgcgattccgtagcagcgcttgtcctcctcggtgtatacggcgcagacgttaggtgaaaggtccttgcgatcgtgaaaatcgtttgctataatgccgagcccgcctatgatcctgccgtcctcgacggcggtgtaccattgcgggaacggtgtgcgtccgctcagacagtcgtccatgctgcggcggtatgcttcggtcgggataccccatttctcatgaaaccatcgggcagcacgctcctcgagctccggcatatccgaaagggaaattattctgtaatccatgaattttcatctctttttatattttttcttttaacggagtaaattatatcgtaaatttgtgaagaaatctaccttttcgaaaaagacgaaaagtgcacccggaaattttccgggcgcattttctctgtttgattcctcatccgggaagcgcgccgatcctgcggtgccgttttaccccccgccgagtccgaagctgatcgatatggcgctgtttaccgccgccatcgcgccgtcgtcgagatgtcccatgcgttccttgagcctcgatttgtcgatagtgcggatctgctcaagaagtacgacggaatcttttgtcagccctgtcacgtttgacatgacgtctatatgagtcggcagcggatttttcgatgtgcggctcgttatggcggctgcgatcaccgttggactgtatctgttgccgacgtcgttctgaacgatcagaacagggcgaagcccgccctgctcgctgcccacaacggggctgagatccgcataataaatgtctccgcgccgaatgttcacgagaaaaacttcctttctttaacgacatacgatatctttgatttccttttcgtgattattattgtcagaaggacattgttctaaacatcgcagagtaaaaaatcccccgacattatcagtatactcacggaaacattttttgcatattttgtctgagggcggcatatcaatgtacagaataaagacggcggcggtacgtcgcccgccgggtaaaagccaatgtgcaggggggattttgatgacaggcagaagcatatatgacgatatcgccgaccggacaaacggcgagtttatgataggtgtgacgggccccgtgcgtacgggtaagagcacgtttatcaaaagatttatcgaaagcgcggtgctcccgaggatggagggcgagtatgagcggactcagctccgcgacgagcttccgcaatccgcgggcgggcgtacggtcatgaccgcagagccgaagttcattccggatgaggcggcgtcggtggtgctgccgtcgggcggaacgctgaaaatgaagatgatagactgcgtggggtaccttgttccgtccgcgctcggcgcggaggagaacggcgaggtccgcatggtgcataccccgtgggacgagacgccgaagccgtttgaagaggcggcggaggagggaacgcgccgtgtgatacgcgatcactcgacgatcgggatacttgtcacctcggacggatcgttcggcgatattgcaagggatgatttcgtcgatgccgaggagcgggtcgcgcgcgagctcagggaatccggcaagccgttcgtggtcgtcgtaaacagcgcgcatcctgattcgcccgaagccgaagcgcttgcgcttgagcttgaagcaaaatacgatgtcccggcggcgcttgtagactgtacacggctcgacgaagaggacgtcctcggtatcctcgagcttgtgctctcggattttcccgtgcgtgagatatccgtgaattatcccgaatgggtgaacgcgctcgacgacgatcattggctgaagcgcctgatattcgattcgtgcgtgtcgtgcgcgtcaggaatacggagaatgggcgatgtgccgatgatctatgccgcatcgctcgccgacaggataagtgaagggctcggagaaaagtacggaagagcggaggtcagcgcgggcgaggcaaagctcggcagcggcgagagcgcggtcagcgtatccctcgggcgggagctgtattacgaaaccgtatctcatctcaccggacttgaaatagattccgaaaagtcacttctttccgcgcttatcgggcttgcggagacaaagcgggattacgagaagtacgccgaagcgcttgacatggtaaacgagaggggatacggaatcgtcatgccggaaatctccgatctgcgtctcgaggagcctgaaatcgtgaagcaggcgggcggctacggcgtcagactccgcgcaaaggctccgtcgatacatatgatccgcgcatcgatcgagacggagataaatccgatcgtcgggacggaggagcagtcggaggagatcgtgaattatatgcttcacgaattcgaggaagagccggcgaagatatgggaatcgaatctgttcgggaaaagtctttacgagcttgtaaacgaaggacttcacgcaaagcttgagcatatgcccgaggatgcgcgcgaaaagttcggggaaacgctgtcgcggataatcaacgagggcagcggcgggcttatctgcatcattttgtaatacaccggaacacatcaaaggcacacttcagacgaagtgtgcctttgatgtgttcggcggacagtggagaacgcagagctgctttgctctgccttcgttattataaagcgtttccggcgcagcgtccgttttttgatttctgtgcttcctgcgatacgcggagcatcatgcgcgggaaattcggcgccgtgccgaacgcgaatgaccgaacgcggacgactgaggacggacgagcgaatgcggaacgcgctccgtcggcatcccgcgctcatataatgccgatgatcgaccgtgccgcccgaccgtgccggagatgcgccgcggcacattcggcagccgagctatgccgtcggacagttcttgacagcagctcacgtctctgtcttgcagccgtccggaaaaaccgaaaaaatttttattttcctattgacaaacctttcgaaaaggtgtattattgtgttagtcgattaatacactaatacaataatacagaaaggagaagaaagaatggcatgggagtttgattccgcaacccctctttacgctcagcttgcatcgagagtaagagcggatatcgtttgcggagtctacaaaaaaggagataagcttccggcggtgcgcgagcttgcgcttgcggcatcggtcaatccgaataccatgcagagagcgtttgcgtgcctcgaagacgaagggcttgtgatcaccgcgggaacgcttggcagattcgtgaccgacgacgaccgtgtgatcgcggaagcgcgggagaggatcgcatcatttcttgttgcggatttcgcccgcaagataaccgggctcggttacactctgcacgacggagcgcagatggtagagaatttcaacatttcaaaggaggacaatacagatggcaattccggttcttgaatgccgtgcgctgagtaagaattacggatcgtttacggcactttcaaatttcaatctgtcacttcccgcggggaggataatcggtctgctcggaccgaacggcagcggaaagacgacacttataaagatggcggcgggacttcttacgcccacctacggcgagatactcattgacgggcgccccgtggggatcgacacaaagaagatagtttcatatctccccgagaggacgtatttcaacgagtctatgacggttcgtgaaacaatagactttttcgaagatttctacgaggatttctcacgggcgaaagcggaggatatgcttgcaaggcttcatgtcgatacgggacgcaggcttaaaactctctccaaaggaaacaaggagaaggtgcagcttgttctcgttatgtcgaggcatgcgcggctctatcttctcgatgaacctatcggaggagttgaccccgcaacgagagactatatactggatacgatcgtctcgaattacaatcaggattccacggttcttatatctacacatcttatcgcggatatcgaaaaggtcctcgacgaattcgtgttcattaatatgggaaatcttgttatgcacagcagtgccgatgaagtccgtgaggagcgcggaaagagcatcgacgagcttttcagggaggtattcagatgttaggaaagctttttaaatatgatatgaagcagatctcgaggatcatgcttccccttgtactccttacattcggtacgacgcttttcggcaccgcggcgctcaagacggtaaatgaggttgtggtaccgatggaaagcggcgttgcgcagaatgtgcttttgtcgtcgctatacatggtgttcgggatatcggtgttcgtgctttgcgcatttgccgttatggcgatactctttacggttgcaagattctataagaatcttttcaccgacgaaggttaccttacgttcacgcttccggtgaacacttcgacgatcatcatgtcgaaattctgggcgacggttctttggatggcaattgcctccgttgcgatagtcgtgtgcatattcatatatgtgagtttcgggaatgctccgcacggagaattctttaacaccgctttttataaggatttaggagagatgctgaaaatcgttatgagcaagcttgaactttccgatgcaatgttcctttccgaagcggtcgtgtgtgtcattcttcaggtggtgcacagcgtgttcatgctctttcttgccgttacgatcggctcaatcgttgcaaagaagcataagatacttgcgtccgtcggattctactatattataaattctatcgtgtctacgatcatgacggcgtttaccatgatctgcgtaacgaattcagtagaggtcgaggatccctacatagcgctgcaggtggtttttgtgtcgggcatcgtgttctttgcgatcctttcgatcgccgaattcctgataataaacgcattcctcaagaaaaagctgaatcttcaataagaaaagcggacggaataaaattccgtccgctttttcaattctgctttcttacggtgcggtactcgtcgtattcacggaaatacggacagtcacgaaccgtttttgtgatgaaggaatacatttcgtcctcgtcgaggtctttcgtgcatacataagcttcaagctcctcgtcgtagtcgtagttttcgcatgaagcgcacattgtgttatccgttttcaaacccttctttcgttacgcacggcgtacagcttatgcacggcgtgcggcgttgaattttcttttaagcgctttgaaagcgttccccgtcatcgaaatcaggcggtatatgcctatgtatgacggtattgacatcagtgcaaatacagcgaggatcagccctgtccggaaggtgaggggaacgagcgagaagaaatcgggcattataagcgcgagaataatgaagagcgcgcccatcgagatgaacaggatccggcggatcgtgttgaacggcatcgaggtcgtgaagagcatcagcattcccacgattcccattatcaccgcgcagatcgtagacatttcatccttcggaatgtcgaaggcgaggtagaacagaagtactccgataaccatgaacagattagtgaacgccgccggaagggagcggtaaagcacgttctgcatgaagtgcccgcggacgaggcttttgttcggctcgagcgccagaacgaatgaagggataccgatcgtaagtacgctgatcagactgagctgcgcgggctcgagcggatagggaagagtgaagaaaagcgttatcactgcgagaactatagagaagatgttcttcgtgagatagagcgaagcgcttcgctctatgttgttgatgacgcgcctgccctccattactacgctcggcatggacgcaaaatccgaatcgagaagcacgatgtgcgacgcctgcgccgcaatgtccgagccggatgccatcgctatcgagcagtccgcttccttgagagcgagcacatcgttcacgccgtctccggtcattgcgacggtgcgtcctttcttgcgaagtgcgtggatcagctttttcttctgctcgggagtgacgcgcccgaataccgtgtattcgcaggcggcgttgagtatcttttcgtcggtgtcaagtgtccgcgcgtcgatataccgctcggcgcccgagattccggcgcgaagcgcgacctgcgagaccgccagggcgttgtctccggagatgacctttatgtcaactccctgctcagcaaagaagcggaaggtctcgggggcgttttcgcggattttgtttgcaaggaggataagcgagatcggcacaatctgcccggtgagaggcattctttcgacatcgcccgagtattttgcgagaaggagcacgcggcatcccttttcggaataagcgtcgatcacctccgcatacttaccgtaaagcgatccgaggatcacatcgggcgcaccgaggacatatgtcagctcgggagagaatacggcggcaccgaatttcttcgatgaggtgaacggatagatacgctgtgcgtggtgggaagcctgtcccgtgaagtatttcttcagcgcgatcatggtgtcgttgtccgcctgcatcgcgtaaacgtaatccgccattatcgcttcgacggcgcgcgcgtcgatcctgtcgggcatcagaggcacgacgtcctcgacagtcatcttgttttccgtgacggttcccgtcttgtcaacgcaaagcgtgtcgacacgggcaagagtttctatacagtccatctcatgcacaagggtctttttctgcgcgagacggactatgctcgtgagaagcgcaaggcttgtgagaaggtagagcccctcgggaatcattccgacgagcgccccgactgtggagactatgccctcgcggtaatcctgaccaagccacgatatctccttgataagcattatcgcgccgatcggaatgagaagaattccgatccacttgacaagccgtgtaagagagagcatcatttcgcttttgccgcgctttttgctttgcttcgcttcaatcgtcaagcgggaggcaaagctgtcctcgccgactgcggtcagccgcgcaagacagcgcccgctcattataaagcttccggagatgagctcgtctcccggctttttgcgtatctcatcggcttcgcccgttataagcgcctcgtttgcgatacattcgccttccacaacgactgcatcggcgtagatctgcgagcctgccgagaaaacggcaatgtcgtcccgcacggttttgtgggtgtcgagctttatttccttcccgtcgcggatcacgatgcatttctgcgacgtcagaagagccatcttgtcgagagttttcttcgatttcagctcctgaaaaattccgatcagcgtgtttgcgatgactactcccatgaacgtcagattgcgccatgagcccgcaatgcagattccgagcgcaagcacggtgaaaacaaggttgaagtatgtcagtgtattcgataggattatctgcttgacggtcttggtcggcggctcgatctcacggttgtcgagaccgcatatcatgcgttcgtccgccatctttgaggtgagcccgacgtgagggtccggagcaaatatgcccgggcggtttacttcacgttcggcgatgccgtcctgctttttttctgccatgaaagtctgccctttcactgaaatttatataaattaattttatcagcaaaatcgagaatagtcaatacacaatatgttaaataaaagcgcagagtgtgtttcccgtaagacggaatgatgcggtttggcaagacgtgcgctttacagcgcgttttgctgcgaccggtcgccggcaaagtgcatcacgcaaataatccgatatatcggaagatgtgaaatccgcgcaaaaaaaggacgccggcaggcgtcctttttttgaaatcggaattatttttcgagttcgtccatgaggcggtaagcgatcgcttcgcgtgcggaggagagaacgtcgggatcctcggtgaattcgaggatttcggtcgttacttctttcacatattcgagaaccgcgtcgcgtccgatctcatcctcgagcatcttcatgtactggaaatcctcgatgccgtcgcggatgttttcaagctttatcgaaccgacggggccttcctcctcctgacggaaaagctgactgtagaacataaggattcccgcaccggattcgtatctcgttctcgagcaggaatcccactcgtttgccaaccaatagaggattccgtcggtgttgaacaggtactgctgccagagaacgtcgcgctgtataacgccctgatagttgccgaagaagttcgcatacggaaattccggagattcgcagatataccaccagatcttgtcgccgcgctcgcggaattttgcaatgcgtgtgtcgaagtttccgccgtaatacttatagcggcgtgtgtcgttgaagtaattgacgtgttctcccctgtgacggtcgccgttcatggtatacgcagtggactgcgggcaccagagaccgacgtaaggctcgatgaaatcaactatgtcgatctgttcaaactgcttgtagtaggtcagactcgagatgaccgcaatctgacggaaacctgttccgataagatttgtgagatgcgcgttcgtgtcgcgatagtatttctccatggcagcgggagtgtatacctcgtcgccgtagtagaagtatcccttgtcgctccactcttcctttgactgaagcttgttccaatatgcgacgatctgctcatcgtctcttgcgtgagcacctccgtaatggtcggcgtctcctgcaatgacaaacgaagtcacgcggggattcgacaggtattcgtccgcgcgttcgtccgtgatgtcataggggagaaggaacgaacacatacggttgtcgagaaagtaatcgtagtagggcttgtaagcctcggaatcgtagttcttggtgtagcttgaaaccatgccggggcttaagttgaaggatgttgcgcacgcggtctcatcggaaagggttagatcccacacacaggtgtaaaccgttgcggtctttacgacgattccggcactgtccttgaggttgacggtcgctttgtagagtcccgaaggagtttcggcaacggtctttacgcggataacaaacgctttggactgatttgccgtgagcttaaacggcttctcgagcttcgggagagcctcgccgtaataatcgtcgtgagttttgacgtagcccgtgttgacatcgtagaacatactcatatcatagtagtattcgtagcaaagctcggactcgagcgtgttgcccgcggcatcggtgaagggcgtgacctcgagcatcatattctctttgtccgcaacggtggatatgtacacctgagcggactcgcgctcgttcttcgccatttttacggtgtaggagtaatttccggttgacgcggtgtcgcttcttccgatc

SEQ ID NO: 2007 - DNA, 8923 bp, Unknown
  16S sequences of unknown bacteria
gcttattgtttgcagtaggctttttatggttggaatacaagttttttccgctttccatgtttatcttcccttttatcggattgacgctaccgctgtttattattacgtttaacgcatatcccgtagtaaagaaatatgcgattgacccttactatgaaacgcaaggggataagccggaagatgaaagcgtttttgaagactgattaaaaattcaaaattaaaaataaaggccgtggattctccacggcctttatttttaacgaagctttaattccaaagaatgagattggaaaaaacggttgatttggttactgagaaaaagaagcggaaaggtcaaaacaaaccagaaaaaagagaacaacggacatacctgccctaaaaaattcatccactgactgctgtaatcccatacgtgccaatgcatccataaattaacaatgatgccggtaaaaagttcgacaatcgtaatcagcgtggagcccagaaagcattttttccaaatagataaggctctggcgtaaatgttggctaaatggattccaacaaagcatatacctcctgccagcgtcatcgtccagtgcgtgttgcccctccataaaatttccaacagactgtatcccgctgcaccgatggaaaaaaccgaaagcaattcccctctttttaccacaaaaagacctcttttctgccgtttataggtatatttttaggaggaaaagcacattttatcacagtgaatttttggatatgcttttgttgacaaaggcaggggaatcttctatcataaaaacaaatgacggcaaagaaggtgcagatatgcggcagatcgaaatactggattcttccctgcgggatggtgctcaggcggagggaattttttattcgctggaggataagctgcgaattgcctatgctctggaccgcatcggaatcgggtttattgaggcgggtaatccggcgtctaacccgaaagatatggagctgttttgtcgaattgcggagcatccattacaacaggcaaagatggtagcgtttggtgcgacccgcaggcctggtatccgggtagaggaggatgcaggctgttctgcgttaatagcggccggaaccgattatgtgtcgatttttggaaaaagctgggatttgcatgtttctcaagtgttgaaaacttctttgtctgagaatttaaagatgattcaggaaacggtatcttatttttccaaggcagggaaaatggttttttttgatgcggagcatttttttgatggataccgtaacaatccttcttacgctatgcagacaattttggcagcagagcaggcaggtgcagaaagaattgttttatgtgataccaatggaggaagctttccgcaggaaattgctgccgtggtagaagcagttaaaaaagttcgccatgtgccactgggaattcactgccacaatgatatggattgtgcagtagcggcgagcatgatggcggttgaggccggctgcgaacaggtgcagggaacctttttgggatatggagaacgctgcggcaacgcaaatttatccgcaattatccctactctgcaattaaaaaagaaatatcggtgtattcccggctcccttttgccggaactgactcatacggcccggtatattgcggaagttgccaactatttgatttcgccatcctctccttacgtggggaaaagtgctttttcccataagggggggatgcatgtagacggcgtacagaagctgcagcgctcttttgaacatattgacccggaaacagttggaaaccgtcgaaatttgcttgtttctgaaatggcgggtaggactgctatcttgaaccgaattatgcgtattgatccgtctgtgacgaagttttcaccgattaccgagcagattatctctcaaattaagcagatggaatatcatggatatcaatttgaaacagcgcttgccagcgtagatgttctgattcaaaaagcgctgggccggatgaaagagtactttacactgcgccatttcaaaattatcggggaacagaatgaggatggcgaggagcgtctggcatccgctttggtcaaaatacgagtgggtgatcgagaagaaatgaccgcagcagagggagcgggtcctgttcatgctttggaccgggcactgcgcaaagctctggaagtattttatccgtctttggcaaaagtacgtctaatcgattataaagttcgggtgatgacaccggaggatgcaacagcggcaacggtccgcgttttaattgaaagtacagatggggaaaatgtttggacaacagttggggcatcgccggatattattgaggcgagctggaaggcactggtagactcaatggagtacaagctgttgaaagatgaacaaaaaggatgtgatttataggtttttgtcagcagttggaagccggatcaataaaaacaaatgcgtggttttaaaatttatccaggcagcgaagaggcttagggtcaccgtttgcaaaagaaaaaattaaaaaatagttatttcacaaaagctaaaggttctcctttggctttttttctaatcataaaatgatataagacgacccttttttcgtaaggtgcctaatgagattgacaaagattggaaagcgttgtaaaataggtatgaataattaggtgcctaataaaaaggaggggtacagtgacagaggtttccggcgaggagctgatgcatttattccgatattgctttaatctgatgcgccgaaggtatcatcagacggtacacggtaaggtaggcacccggcagggacaggggaaaattttatctgtcttacgtcgggaagacggcatcggtcaaaaagaattggccgaacggctgcaaatccgtccggcttctttgagcgaactattggacaaaatgcagaaaagcggttggattcagcgcagggtcaacgagaaagacagacgaaaaatcaatatttttctgacagaagatgggaaaggcatatctcagcagatgatcgaagcacggcgggatatggcgagtactgtttttggcgtattgaacgaggaggaacaagagcagttggagatgcttttatcgaagttaatctcagaactggaaaaaaaccagggagaagagttttcaggttaaaattcgtgattttatcagtaaggaggtgaaatgcctattttgggtgtttaaaatattttgagggaggtaaaaggaaaattatgctgacacgttttttaaaaaaacatggatggcgatatattccgggttttttatttttattggtcagctcatatattacaacactggcaccgattgcattggggcatgcgatcgattatatggacatggatgtagcgttaattgaccaaagtaaggtgtacagacaagccttttatattattctgatcgcggtaggcgtttttatcacccgttatatttggcggtactttattatcggaaattcacgttttttagagaattttttacgagaagaattatttgttaaattggaaaatctaccggtatcctatctttccaagcagcgttccggagatctgatggcatacgcggttaacgatgtaggcgcagtgcggatgacctttggacaagtagtttccatgtcagtgagcgggctttccacggcggtgatggccatttacagcatggtgactgaagtggatcctaagttaaccgtattggcccttttgccagttccggcagcggtttttatcatcattaagctggggggaattgtccggcgaaaattccgttatgtgcagtcgttgttttcggagttatccggtgaagtcaatgaaacgattatgggcgtacaggtaatcaaaagctttgccaaagaagaagagcgcctggatgaattttcggacatcagcaagacgatgtatgacgctaatgttaatcttgcggacacatcttctatgatctggccttctatttccgtgatatttggattgtgctatgccataggcttgattatcggcgggcacatggtgctggccggcaatctgtcgctgggcgccttggtcacctttaatggctctttgttgttggtacagcagccggttatgtctttgggccgtattattaatatgctgcaaagaggtcttgcctcttataagcggctgcagattattctggagcatcccggcataccggaggcggaaatgaaggatgcaaaagagccggttggcggcgatgtggaaatcacaaatttgactttccgctatccggaaacggaaagcaacgctttgagcaatatttctctgcgtcttcccaaaggggctacgttgggtgtggttggaccaacgggtagcggtaaaacgacgttgatgcaccttttgctcaaaatgtaccctgtgccggagcaaagcatctatattggcggaaaggatatcaccgaaattccggcaaaggcggtacgcgaacaggcaggatttgtaccgcaggacggctttttgttttctgcttccatccgtgacaacatcaaattttatcaaccgggagcaacagatgaagacatggtgcgggcggcgaagctggccagtgtgcatgatgatattgcagcatttccggatggatatgatacacaggtgggcgaacggggaacgcacctatccggtggtcaaaagcagagaatcgcattggcaagagcactgatccgcaatccgcagctgttgattttggatgatactctcagtgcggtagataaccatacggaacagcagattctggcgaggctttcggactattacgatggaaagacaaccgtaatcgtttctcatcggctcagtgcggtgaagcatgcatgggagatcatttttattaaagatgggcagattgaagaaagagggacccacgagcagttgatggctttggatggtttgtatgcgcatatgtaccgtcagcaggaggaagggggagattgtgatgaaaaaaaataatccttccagcctgattcgtttggccaaaatgatgaagccatatatgaaatacctctactttgtctttttctgcgttttggtttctaatcttggcgtattggtgaaaccgtatctagttaagattattattgacgattttttgaccaaaggtttgccacagaatggtatctattcgattacgggattgggaatcagctattttctggtagtgcttatcagcgctggattcactatggcgcagcgtcgcacactggctcggtttgggcaagcgattctgcataagcttcgaaccgatgtgatggatcatattctgcatatgccaattaaaacgttggataaatacggaagtggccggctgattaccagatcaacaaacgatgtagaaacattggacgaattctattctgatattctggttacgctgtttcaggatattcttttgctaatcagcttggtgtttatgatgatccaaatggattggcagctggcattggtggcatttattggtattccgattattgcgctgattaccatatcgatacgaaaagtactcaagcggaatttcgagcggatgaaagcaattattgggcgaatcaacggattttttgcagaaaatatcgcaggcatgcgaattgtgcaggcatttaaccggcagaaaaataaacttcaggaatttcaagaattgaacgaatcgtatttgacgacaactttgattcagctgaaactgcacagtatgttgcggcctgccatggaggtagtgaactccatgattattgcgctgctgatttggtttggatataaccggattgtgggcaatttgggtggcagcgcagtattgaagttgggtgttttatacgcgtttaccgactatgtaaagcagttttttgagcctattaatgaattagccgaaacctacacgaccattcagtcagcgttggtatctgcagaccgcattttttctttgttggatgaaaagaatcaggaggacccgtttgaaggagattggagtcagccaatcattggaaaagtggaatttagagacgtatggtttgcttatgatgcggataactggattttaaaaggtgttagctttacagtagaaccaggagaaaaagtagcttttgtcggcagtactggggctggtaaaaccaccattatcaatctgattgggcgctattatattccacaaaaaggtacggttctgattgatgatataccactagaacgttggcaactgaaaacattgcgcagtggaatttcagtagtattgcaggatgtgtttttatttgtaggatcgatcgcagataatatcagtatccacagtgaattaagtgaggagcggattcaacaggcgttggaagtatcctgtgccagcgaatttgttgcagaatgcggcggattgaaaggagaagttacggaagccgggatgaatttttcgacagggcaaaggcagcttctttcttttgcaagagctattgcacgggatccggcaattttggtactggatgaagcaaccgctcatatcgacaccgataccgaacagatgattcaggactctatcggaaaaatttcaaaagaccggacttctatttttattgcacaccgcttgtccacgattcaatcttgcgactgtatttttgtattggaaaaaggtcagattatagagcagggaaatcatgagacactgatgcgaaaaaatggaaaatacgctgctttggtccattccggacaaaaggatagttaattgtcttgaaaaaagaccggttggaagttccaaccggtcttttggcttttactggcacatagtataacgatagaaatacagcgcggcgaaaatcagaacaatccagatcagccactgctgtgcggtattattcgaataaggacagctattgtaatcagagcagcacgccatagtagcacctcctttcccttaggctcttttcattttatgcgcaaagaaagggttcggcgcatgtcccttaaaattggagcagatatacgagtttttcgtagatttggttgacataaccattttagaatgatataatatcatccgtgaccgagtggtagtaccacggcttttccctcaaggagcgttttgttccattaaatgcggcagtgctggaatcggcagacaggcacgtttgaggggcgtgtgcgcgagcgtgtgggttcaagtcccatctgccgcaccaagtttaagaccctataaactggcatataaagctggtttatggggtctttcttgtttcgtcataacacactaaataacacacttttattttgatataatttcatcgaatactttttcaatacctgctgcaatagatgctttgcgtccatccacactatgtgcatatacaccaaaagtatccatgctgcggctatcaaggcaaattttatacatggggcagtcaggggggcacgtttacggacggtgacggcaagagacatacataccggcctatttcttctacgtcctacggaaagcctgccggaatttttggtatcaactgcggccattatccgattccgcagattccgggtgtgacgatcccgcaggacaggacgattcaagggaagaaagagaatgaaaaagagtaccgggagagccagcggcagcgagcattagagcgagaggttcgggaagctaagcgaaaagcggccgcatacaatgctgcggggctggatgaggcgtttgcagagcagtcgtttagggtaaagcaaaaacaggcggcatacaacgccttctgcaaacagacgggccgcaccaaacgccttgatcgaacgcaggtttatgggtataataaaagtataagtggaaaagtagcggtgacaaaccggaagcgagataaaaacgtttttgatgccaaaaatggaagctaccaaaaaatgtttcttcatctgggcttccgaaggtgaaaaaactaccaaacgagaacttaaagcagactgcaaatgtaaatttgccaaatatgcacgctgtggcgcctaaaggggccgatctatcatcggttgtagtaatcgccggagcaggtacaagcacgccaattaaagatattcaaaggttagtaagcaagtacccaagctttggagacgcgaacggatggcaaaagaaatctggtgttactgttaccgataattttcgttatgaaatgcactggtatgaaaacgcaggaggagttccagccggcgaagtcaaagtaaagggagtgaaacgggtatgaaagtaagatacaaaggccccagttttggcattgatgggttgacagacggtagcgtatatgaagtgttggaagtagatgaattgactggggcgtttcgccttatagacgatagcggagaagattacttgtattctccaacggaacccgggcctgtttgcgatccaagcataaagggaaaatttgaagtcatagaagatgatgagcaaggaacattggacaaagcaataaataaataggccacccagacagggtggtttttctatgctcacttttaagaaaggggttgaaataatggcagaatgcaaccatgtatttatcggaaaatcggacggcgtacattgtacaaggtgtggtttgcatatgcactgggtgcagttctcgaccctcttgcggggtctgcccagcggcacccgcctggcggacgtgattgaaattcgccaaatggatgttcctgcgcccaccaaggataacgggaaataccgggccaaaatcgcgcagatgaaaaccaaatatgccattcgcaagcgctccacatccctgcaagacgggattgtggggctttgtattaaaggagtgtctaaagaaaggaattcggaaagtgcatatctgtccaaataacaaagaaaatatatctgccatatatactattttgaataccggtgggtatttattagaagaatttattgatgatgagcgtataattgaacgttatgagataattcttgtttcgtattcgataac

SEQ ID NO: 2008 - DNA, 9971 bp, Unknown
  16S sequences of unknown bacteria
gcactcagggcattgagcagcgttttgcggcgcaatgcaaatgcagcgcggacgacctggaaaaagaaaggtacgtccgccacatccactggaggagctttgcgtactgtacagcgcaatacggcagaggtcactttgggctgcggcgtgaagcagtccggcggtacatcaaacagcagttccggctgtgtataaaactgcatgtaaagagaaaaagcgccgtaatctgcagtgccagggagggcgcaaatgcgttgggccacttctttttggatcatcacagtcaatcgctggaaacggccgctgtcgatcagcgcagagaggaccggagtggtaatgttgtaaggcagatttgcgcataccaatggcgtcaagccggaaaaatgcgtatccaccaaggcggcaatgtcaagcttcatgatatcgccgctgacaatagatacattttcatactttgacagtgtttcttccagtacggggagaagacggcggtccagctccacggatacaacctgtccggcgcggcgagcgagctgctcagtcaggcagccaatgccggggccaatttccagcacgccgcagttttcatccgcgccgcagtgctcggcaatggcttggggaatcgaagcgtcaatcagaaaattctggcccatagccttagaaaagtggaagccatgtcgtcccaacagagtacggatattattcagatcacacagattcatagtgttctcctttgtatgcataaagtaaaaacagtataccatatattttgccgagaagcaaaaaaagatgaaaacagggccaacgcaattgcgttggccctgttgcgttcagttcagcacatatactgtcacattgcggcgaccgaactggatgcattcgttgtaggtattgtaatacaaatccactttattgcccttgatggcgccgccggtatcagcggctacggcggtgccgtaaacgatttttccgttgggggtggtgatatagagtttgctgcccatagggattaccttgggatctacggcaacgcagcccacgctggccacgcggcctgaagctgtgcgggcgccggccttggcggtatatgccgtggcattggcagtgattacgcgggaataggtgagtgtgtcaccggagcggaaggtcagcacgccgctgccgtcgctgttgcgcgcatcggaggcgatgcggtcattggaagagatggaggcagatttggtgccgtattccacaatttcggcggtgggcgctgtgatgatttcagaggaaactggttcgcggcggatctcctcgccatttttgtaggtaatggagtaggtgaccagagccgaaccgtttttgcctgcctgcttcacggtttcttttcccttggtcattgagttgttggcaacccgctcggtggtataggtgatcggctccacggcttcggcggtgccgtacgtgtacttcaccacgtcaatgaccatgccgtcttccgtatagtcggacaggtcgatggagacttcgtcttcatcattcaaagtaatattcatacgttcgagcagttcgctgacggtttcctgatatgcgcgggtgtgcagcgtggcgcccatgtaatggatagacacttcttggctgcggatgatggtaatctccactgcgccgtcttctccggcagaggaaacgatctgatcggcgggggacacttcaatgccggctttttccaccacggcggaggggagcgtatggctgctctctacagtggtgcgggtattgccgtcatcaacgatgtagacggctttcgcactgacgatgctggatgcggctccaacggtcagaaacagcatcaggacaaacgcaacgatccgacggaccgggcgtgtcgtatgatgatcgccggttccatgattcaacataaaaaacctcctgaaagttccacacggcaaagccgggtggagtactgaaatccgaaatcccagtttctggaaagtacagacagctgggaaaatcaaatggtaacaaaagatgtaacttttgttacccggctcaaatacaagccatagtatacaatcaatctccacatttgtcaagtttttgcgtggattgatggggcactcgccccacttttacaaaaatcgccgtagacttatatgaaaaatatggtaaaagtatatgcaatagttacaaaataattacaaaatagtgtgaaagaataaaattatggtcaaccgttctgaaaaggaaaaaagaagagggtcaatcaggaatcaaagagaaaaaaaggaaaaataaaatggataaaaatagaaaaatggctgtttctgttaccagaaacagccatcaaaaagatgtgcaaaggatggttcgggacaccacttcagtcagaggcggctccatcttcctgctgcagttcttccagggctgcagcataaatgatccgaccttttttatctaatacagacggatcaaaagaggccatcatgtccgggcggcggcggagtgtgcgtttgtatgattcttttttgcgccactcggccaccttttggtggttgccggaaagaaggatggccggtacatgccgcccgtgccaattttccgggcgggagtactgggggtactccagcaggccggcccagtgggattcttcctcatagcattctgcatccgggagcacgccgggcaccaggcggcacacggcgtcggccaaggccatggcaggaatttcgccgccggtcagcacaaagtcgcccatggaaatttcttcgtccacgcattcctcaataaaccgctcatcgacaccctcgtagtgaccgcataccagcaccagacggtcatagtctgcggccaggcgcttggctgtggcctgacggaaggtttcgccgcagggggaaaaatagatggtatggagccgctcgccggcttcgtcgcagatgtgcttccagcactggtacaggggatcggcctgcattaccgcgccccgcccgccgccataaggataatcgtccacctgcttttgcttatttaaggtatagtcccggatctggtggcattcgatgcggatatagccccgttcctcggcacgacccaaaatagattcgcacagcatgtcccccacagattcgggaaacagcgtcataatgtcaattctcatcggaggccattcctttcaaaagatgaacagtcattacgcctgcgtccaggtcggtattctcgatcatagccggtacggcggggatcatgtattctttttcccctttgaccaccagcacgttattggcagggtagagaaggatgtctgtaattttgccgatttcctgtccgttttcggcgtcgcgcacagccagtccgatcagttcggcattgagatagcgtccttccggcagatggatatcctcccgtcgcacggagagaattttatttttcaggtgcagggctgtatccatgtcctctacgccgggcagcgtcaaaagtacgttgttcttgtgaatgcgcactgctgtgggatgcacgctgtttccgtccaggtagagggtttgaaaatccaggaactgttcggcgctgtcgcaccagggctgtacttttagttctccccggacgccgtgagtgtttacaatctgtcctacttccacatatgcaagcttcataacaggctccttttggtcaaaacagaccggtgatgaaaaaataaggtttccgttattataacgggaaattgttcattcggcaaggggcgttctggaccagtacatctgaagtccatttggaagcggggcctttccgtgcccaccggatcgaaaaagctggagccatgtgttgacaaataaaaaagagtatgctacactttcggtctgaaatcgtactattgggggcttttatggaggatattcacgggcagttaatggaatacaatgaactctgtaaggagacagatgcgctgtataggcaggtggcagaatgcagtgagttgtcagatgccatgttttgggttttgtacaccgtgtgcgccagaaaggggagctgcagccctaaggatgtgtgcgatgcgtggacgatgcacaagcaaacggtacattcggccctgaaaaagctggaaagccagggctacattgccctggaaactgcgccggaggatcggcgcagtaagcatattttgctgacggaaaagggagagcgctgccgaagcacttattttgaaccgttgtttcgggcggaggaaaccgcttttgcgcagatggatcgggaacaccgggctgggttgctgcgtgggtgccgggcctatttgaacgaactgcggcctgcggtggagcgtctgcttgcgccggcagagacggcggacaggctggaagagagtgagaggaaagtattttgatgatgcaaatatgcaaagaaaggacgcacatatgaacattcaattatccgatcattttacgatgggccggctgctgcgctttacgctgccatctattgtgatgatggtgtgcacgtcgatctacagcgtggtggacggcttgtttgtggccaatattgtaggcagtgatgcgttggcctccatcaatattgtcatgcctctgtttttggtactgggtgcattcggtttcatgctgggcaccggcggcagcgccgaggtggccaagaccatgggggaagggagggatgaggacgccaaaagctattttaccaatttgaccctggcggtggcggtgctgggcgtggcgctgacgttgggaaccgtcttttttatccgcccgatcagctatttgctgggcgccagcgaccggctgatcgattattgcgtggtgtatggcatcatttgcctgatcggcaatattccctacatgctgcaggcctttttccaggcgtttttcatcacggcggaaaagccgcgcctgggcatgctgctgaccattgccagcggtctgaccaatatggtgctggactggctttttatcgcggtgctgggatggggcattgccggcgccgctgcggcgacgtccatcggctgcgccgtgggcggctttttgccgctgatctattttgcacgtaagaacagcagtcgcctgcagttcgtccggcccaaactgcactggcggatgctgggtcacagcgcggtgaacggttcttcggaaatggtgtccaatgcttcgcgcgccctgacgacattcctcttcaatatccagctgatgcgtttggtgggtgaggacggcgtcagtgccattactgtgatgcagtatgtgaactttgtgttcattgctgtgatgatcgggttttccgtgggcgttgctccggtagttggtttccactatggggcgaagaataccgatgagttgaaggggttgttccgccgctgcatgacgtttatcgtcgcctcctgtgtcggtgtgtttgtgctttccgaggcggtagcctatccgctgatcaatattttcaccgatcatgcgtccctgtttgagatgactttgtatggattccggatttttgcgctgtcatttttggtggtgggtgtgaatatctttgcttcggccttttttacggcgctgtgtaatggtttggtgtctgcgggcatttcgtttgcgcgcaccattgtctttgaagccggggccgtactgctgctgcctattgcctttgatttgaacggtgtatggatggcactgcctgtggctgaagggctggcgctgctggtgtcggtgggctgtctgatctttttccggaagcgctatcaatacgcataagcgcggtgtgaaaagaaacctttcccagagggaggaaaacgcccctccggtatgctgtcagcataccggaggggcgttttttaggaatggaaacggatgatttgcgttcaagcggtcagggagcaggatagaatccggttggttcttcgctcaaattgatcatgatatttttcatctgggtatagtgctccaacatgactttatgcgtttcgcggccaatgccggactccttatagccgccgaaaggcgcgccttcgggaatggcattataggtgttgatccacatgcggccggtttcgatagcccgggccacccggatagcgcggttgatgtcacgggtccatacggcgccgcccaagccatacacgctgtcattggccatggcgatcacatcggcttcgtctttgaacttaatgataaccgccaccggcccgaagatctcttcctgagccacgcgcatatcgttggtcacattggtcagcagcgtggggcgcatgaagcagcctttggccagcgcgccttcgtcagcacgtacaccgccgcaagccacggtagcgccctcttgtttgccgatctctacataatcgaggatttttttgagctgcccctcgtcgatctgggcgcccatctgggtttcaggatcccaggaggggccaaccttgaccgcgttgaagcgtttaacggcttcttccacaaacttatcataaatgctgtcctgaacgaatacgcgggagccggcacagcatacctggccctggttgaacaggatgcccatctgcaagccgtccatggccatgtcccacttgcagtcctcgaaaaagatgttggcggatttgccgcccagctccaacgtggcgggaatcagcttttgagctgctgccaaggccacatcacggcccacttcagtggagccggtgaatgccagtttgcggaaaccggggtgctccagcatgtactggccggatttgccgccgctgccggtgattacgttgaatacgcccgcagggatgacatcctgaatcagacgggccagctccagaacgctcagggaagtagtgctggagggcttaaaaacggtgcagcagccgctggccagaacgggggccagtttccaggcggccatcaggaaggggaagttccagggaacgatctggcccacaacgccgatgggttcgcgcagaatcaggctcatggtgtcggtgccgagcatattggcactgccttcttcagccatgatgcagccggcaaaatagcggaaatgctgagccgacagtggaatatccactgccatggtttcgcggatgggcttgccgttgtccagggattctacaatggcaaggaattctttgttttcgtcgatgatatcggcgatcttgttcaaaatagcggcgcgttcgttgactgaaacatttttccaggtttcaaaagctttccaggccgcctgaacggctgcgtccacatcttcgcgggtggcctgggcgcattcggccaggatttcgccgtcggcggggcattttgttttgaaaacggcgccgtcggaggcatcacgccactgtccgccgataaaaagctgatatgtatcctgcaaagttacgccgtgaatgtttttcataggtagcagctcctttcacagtaaaaacgatgtgataaaacatattgggattctatgttttgctctgtaatcaacataccacatactctatggtcaggacaagaggaagttgccgccttttcgaagaatctttggaagttcgtgaaaaggttatcagagtgagctgcaaacaccaggaattggtaattttgtacaatattaaatcgaaagatagagtaaaaatgctgggcggcatttataaaagttttttggcgaaagcttattgatatttgcgaagataaagaacaggatatgttttcgaagataaaaaaggaagcggcttggcaaatgccaaaccgcttccttttcgattcagtctacaatatcgacggaaaccttggttccggtgcgctgggcataggaacgtaccacagtgcggatctccttggcaatgcggccctggcggccgatcaccttgcccatgtcctcaggggccacgcgcagttccagcgtgatttcctcttggcctggaacctccgttaccgtgacggcttccgggtggtccaccaagttttgagcgatatagagcagcaagtccttcatgccaactcctccaggttaagccttggcctttttcagcaggcttctgaccgtctcggtgggctgagcgccagtcttgatccaagcctcagcgcgctccaggtcgatcttgatctctgccgggtcggtgcagggattataggtgccaatctcttcgatgaagcggccatcgcggggatagcgggaatcggcgaccacaactctgtagaagggagcgctcttggcgcccattctgcgcagtctgattttaaccatgttgattcacctccaaaatattgatccacaagtggggtatataaatgcgttgatcagggtgaccaaagctacatttatccggtttctgtgcgccctcagcgcaggcgttttttacggccgaagccgcgcaggccgccgccgaagttgccgcccatgctgccgccgccgaggccagccagcgcgcccagcttgccgcggcccttgtacatctgcttggcgatctggttcatcatgtcgtactgcttgagcaggcggttcacgtcggagacttccagcccgcagcctgcggcgatgcgccgcttgcggctagcgtccagcacattgggattttcgcgctcatagggcgtcatggaaaggatgatggcctcgctgcggctgagcaccttggggtccagttccgcgccttccagctggcggcccatgccgccggggagcatggaggcgatctgagatacatcgcccatttttttcatctctcgcatctcgtcgaggaagtcggcgaggctcaagcggctctttttcaacttccggtccagctccgccgcctttttctggtcgaaggtctgctcggccttttcgatcagggagagtacgtcgcccatgccgaggatgcgggaggccatgcggtcgggatggaacggttcaatcatgtccagcttttcgccggtaccggcaaacttgatgggcttaccagtggtggctttaatggataaggccgcgccgccgcgggcgtcgccgtccagtttggtcagcagcacgccatcaataccgagggcttcgtcaaaagcggtggcggcatttacggcgtcctgaccggtcatggcgtccactaccagaagaatttcgttggggtgaaccgcggctttgatgtttttcagctcgtccatcaatgtctcatcgatgtgcagccggccggcggtgtcaaggaataccatgtcgttcccgtgatcctgcgcgtggcggacggcggcttcggcgatcttcaccggatcgccttgacccatttcaaagacgggaagttctaactgtgcgccaaccaccttgagctgttcgatggcggcaggacggtacacgtcgcaggcggccagcaggggacgcttgccgtaattcttgcgcatcagccctgccagtttagcgcagttagtggttttaccggcaccctgcagacccaccatcatcacgattgtgggcgttcgggaggccatagtcagcttggcggtgctaccgcccatcagggccgtcagttcgtcgttaacgatcttgatgacctgctgagcaggggtcaggctgtcgagcacgtcgcggccgacgcacttttcggtgactgtggagacgaaattcttgacgaccttgtaacttacgtcagcttccagaagagccagccggacttcgcgcatggcttccttgacgtcgttttccgacaggcggcccttgccgcgcagctttttgaatgcggcgttcagtttttcgctcagaccctcaaatgccattgtcctgctccttcagcgtgtgcacggatgcacgaatgatatcgatgttttccgaaatctgccggttgtcatattgccggcggttgatcttttcgatggcctccgcagcctgctcggcgttggaaactgcttcgcggcagcgcagaaagcggcggataatgccggtgcgatcttcaatttcgctcatggcggcctcggcacggacgatcacgtcccgcacgccctggcgggaaatgccgtagttttcggcgatttcggccagggagaggtcttcgttgtagtaaaggtcgaagaactccttctgccgctcagtcagcagttctc

SEQ ID NO: 2009 - DNA, 32759 bp, Unknown
  16S sequences of unknown bacteria
gcggtccgcatttcccatcgtaagaagcagccccggaaggccgctgatatgatctccatgataatgggtaaaacagatcgtatcaatcggcttaaagctccagcccttctcctttactgcgatctgcgtcccttctccacagtcaattaacagcgagcttccattgtatcgcatcatcagcgcagtcagccagcgatacggcagcggcatcataccgccacagccaagcaagcaaatatccagcattcctcttcctcatctttctatatcttccggcagatcgctacaggtattcctgtgccgtttctatctccaccggtatctgaaatcctgcccgtatccggtcatagcatgactcacagatgcagaagcgatgtatttctccatccttttcagaaaaatatccccacctctgctcgactgtaaccacatcctgctccatccgggacagtatcctttttccacaacagttacaatacagcagttttttcgtctccacaggattttcctccgtactataaagtcaccccgcctgttttgtctgcagatctctgcctctgcccatccggtgctgaaccatcatttcccggccacaacctgcggaagtgtttcttcattatatcccgagacctccggcctgcctaccggaaatgtctgtcaaatcaaattctccgtccacataatcatggcgtcttctttgggactgtcataaaaatttttccggattccaacagagtggaagcccagcttttcatacaaatggatcgcggatgcattactcacccgaacctccaacgtgtaacgcaaaatcccgcgcgcttttccaagctccatcagccgctcaagcatccgtgaagcaatcccgcacccgcggtatgtctcctccaccgcaacattcgtgatatctgcttcatcaaaagactgtaaaagcccgcagtacccgatcagctgtcctcttttacggaccgcaagatacagcgtatcttttgactgaagcgatgagagaaacccggcttcactccacggaacagaaaaaatctttgcctccagtgccgccacttcgcggacatcctcaggctgcatccgctcgatctcatactccacgatcaatactctcctttttgagccttcgcttcccgttccacacgttcccgctccgcctgggatagacgcagataatcggggcaatgttccgtcgcagtctcaaatttgccatctgccgcatacaaaagtccgagtgctgccactgcagctgcacgctgacggtttacatgtgccggtgcaaatcgatatggcaccttcagcagctctttcaaagcctcccgatagactggcactccatcaccgagaaacaccaccgcttcgccccggtcattgagcagctcagccagcgcttcgattgccatcggctcctgttcctttaccgtgcagaatttatccccttcaaaccggtatacaccggtatagacctgattgcggcgcgcatccataatcggacagatcagtgtctccacgccgtaaagattgtatgccagcgcatcaaccgtcggaatatgcaaaagcggcttatcaagtgccagtccaaggcctttcgctgtagccgatccgatccgaagtccggtaaaagaccccggtcctcctgcgactgcgatcgcatcaatgctgtttaaatccagctcaatcatttttgccatctgatccagcatcggaagcaatgtctgggaatgtgtctttttatagtcaatcgtaaactctgccagtagtgtctcatcctccacaactgccacggatgctaccagtcctgaactgtctattgcaagtattttcatcgtcttctcctcttctatgaccgccgacggccctcttcgatcgtaatccttcgataatcaaaccctttttccagatccttttcaatcgtcagccagatcgtctgctccggcatcagctcctcaatcagattcgcccactccaccaggcacacgccttctccgtagaaataatcttcgtaaccgatttcgtccatttcctcaatatccccgatccgataaacatcaaaatgataaaatggcatccttccttcttcgtatacctgtacaatggtaaaggtcgggctgttcaccggctctgaaattccaagtccggctgccataccctttgtaaatattgtctttccgacaccaagatctccgatcagcgcaaaaatctgccccggctttgcctgcgcggcaagctttttcccgacctcccaggtctcctgctctgaatgtgtctctattatcatcgtcttttctccttttcaccggtcagctctttgtaaagtggacattcactttgcacatctgacgcggggaatgtttattttgccttcagctttcgcctgctctccggcacttgtgcggtgagcagatttctcactgccttttcattattgccgagctgcgattttacccatataaatgcattccgttttccggtatagacaaaaatgctctgagatgtctcgcacacgcgtgtcacagcactccagggaatttcattttccgtgtcatcctgccgcaccgtaatcccggcttcatttacttcataaacaagtggctttttaaataccggattagatgtcacctgcttcgctgaatgtatgaacagtgtccatggctgataaaccgcaaatagcacgccaaacagtgcataaagccatgtattttcacctccgtgtgtcccggaccagaccgccagtccgagcagcgccgcagccgccacaatgctgaaaatcccgctcacgccatgataggcataatacatcataaaattatacatgtttctctgtgtgacttttatagaaaattttgctttcatggggcctcctctcaggaattagccttcgatgtgtaaaaatgcaaacggcgcctcatcatacaagaagtgcatcagcatgtaagagcatacgatagagacacgctcctcctgcaaaatccgctccacctctgtgcggtcagcaagcaccacttcaatctcctccgtatcttccaggccgtctgccgatatttcaccggtagcatatccataaaccgtaccgcagcactcatccgtcataccaatcgtcgtataatacggcttctggtataaatttttcaccggaagcggatgcagatccagtccggtctcctccttcatctcccggaccgcggaggtgtgataatcttcacctggctctaccagacctgccggaagctcataaatatagccgttgatcgcatatcggtactggcgaaccaaaacaaccttatcatgattttccccgtaaaggctgtaaataatcactccatctgaatgctggctgcccgttgtaagctccagcgtctgtatgctctttgctctggaagcgacataatattttcccggattgccttttcggttcagcgtatccagctcatacaaattgacatatggattttctgtctttttcgtaacctttttaatttctgccataagtactttttctcctttattctggatgcatgcagtagttttggctgctccgcaacagaaaaaacgtgctgctccagcaacggataacagcacgtctttcccgattcaggtctctttagttctcggtccggctctccggcacccggtgtccctgtgcggcattctgcaaaatcttgctgattcgcttatataataacatagtcggcacagaaatcaatacaccttttagcagattcaacggcgcaacagaaaacagcgccagcgtccagacacttgtgatcgccggattgattgcggttcccatcccgacaatcacgtcaagcgggataccgtacagagtggcaaatgccgggatgaggtaaatagcattaaatgcacttccaaatactgccatgcataaggttccggctacaagtgacatcttcgccgtctttttgctcttattcatgtgatatacgatcgctgccggtacagcaaaggaacatccgaccacaaaatttgccagctctccgacaaacgcagtacttgttccgcggattgcaagcttcagaagtgtttttaccagctctacaaccacaccgccgacaggtcctaaatagaacgcgcctaccattaccggtacttcgctgaaatccagcttataaaaacccggtgccaaaaatgctactgaaaaatcaaagagatagagcactgccgcgatcgcgccgagcattccgcagaccgtcacatactgcgccctgcacacccgcaccatgctttttgcaagcaccgtgcgttcaaacagctccgaaactccgataatcaccgcaataacgactgcgcataccagcagaaactgcaagttttcactgattgactgtaagataccatttcccataattctgttctccttttctgaatgaatgtcctccgcgatgcatcgtggcttcgcagaagtggttccttattcaagaaaagtccttcagatgcagttttctttttggcaataaaaaaccgctgcaagcagatatccacggggaactctctttgcagcggctgatacgccgaaactctaactgctctcttctaccatccagactatactgtcggttctggaattcgcctttgcgtcaccagatcagccgcttgcgcgggtcgcggactataccgccggtggggaatcacaccccgccccgaagaatttttcttaaattcgtgtctattatagcgttgtttctggcagattgcaagtgttaaatcacataatcgtttgccttcgccgcctgccactcaagcaaatctgccagcgtcacgtgatcgacgacgccgttgatcgcatcgtttagctttttccagagaatcagcgtcacacagtcatcctcacgctcgcaggcaccggactctttttccgcacactctaccggagcaagactgccttcggtcaggcgcaggatcatacctacggtgtattcctccggccgcttgctcaggacataaccgccctgcgggccgcggatactgcgcacgaatccggccttgttcagaaccgagataatctgctccaaatatttttcagaaatcccctgacgtctggccacatccttcaaccggatcggatcaccggagcaattggtcccgagatccagcatcagacgcaatgcatatcttcccttggtcgatattctcatattgactcgcataatccaaatatccttttctaaagatatggattattctcctttcttccaataacttctccatcttcctccattataaatcatttttcctattatttcaatatgaattatatgaagtcagtctgtaaaaagtggcctgtaccatttctgatacaggccacttccaatccactgcttattgccccgcgcacttgaagcaaagcccaggtgaacgcttactctgcaattgcgcggaacgcctcgtcgagatcctcgatgatgtcatccacattttccgtaccgatggacagacggatcgtgttcggacggatgccctgatctgccagctcctcctcggtgcactggctgtgggtcgtggtcgccgggtggatgaccagagacttcacatctgccacatttgccagcagtgagaacagctccagattgtcgatgaacttcttcgcggtctctgcgtcgcccttgatctcaaaggtgaagatcgagccgccgccgttcgggaagtatttcttatacagctcctgctgagacggatccgtggatacagacggatgatgtaccttctctacctgcggatgctggttcagatactgtacaaccttcagtgcattctccacatggcgctccacgcgcagggagagtgtctcaagtccctggaggaagaagaatgcatggaacggagaaagggtcgcacccatatctcttaagagaatcgcacggatctttgtcacaaaagctgccggtcctactgcttttgcaaagctgataccgtgatagctcggattcggatctacgagagacgggaatttgcccgatgcctcccagtcaaatttaccgccgtctacgataacgccgccgagcgttgtgccatggccgccgatgaatttcgtcgcagaatgtacaacgatgtctgctccgtattcgatcggtcttacaaggtacggagtcgcaaaggtattatcgaccacgagcggaatcttatgcgcatgtgcaagctttgcaactgcctcaatgtcaacgacatcggaattcggattgccaagcgtctcgataaagatcgcttttgtattttcctgaatagctgcctctacttcttccagattgaaaatatctacaaaggtcgtattgacaccgaaatccgtgaaggtatgtgcgaggaaattgaaggtgccgccataaatattttttgcagatacgatgtggtctccgacctgtgccagattctcaaaggtataagctaccgccgctgctccggatgcgactgccagcgctgccacaccgccctcaagcgctgcgatacgctgctcgaacacatcctcggtcgggtttgtcagtctgccgtaaatgtttcctgcatcggaaagttcaaagcgcgccgctgcatgatcgcagttgtcaaatacataggatgaggtctgataaatcggaaccgctctcgctccggtcaccggatccggcttttcctgtcctacgtgaagctgtaaggtctcaaatttaaaattgcgctctgctcttgtcttcttgctcatatcgtttactccttttctattcgctttcgtaatgtgccttggctgccgcatgttcttttgtttgatcaggcagatatttgaatcatctaatcgaatatcctgcattacaatatttcctatcggtttacagtggttattataacgaaccatctgctatctgtccaatatagaaaagcatatattcgttatcggtttttcttatatcaaatgatgatgccagggtcaaaaggtcaaaaagccgttcatgcttgcatgataaggcttttgaacttgggacccgccaaacatgagaaagtagcgatttacgtagtaaatcagcggatttcgaatgtttgcagaattgcgggagctgcttcgcagcggagcaattcgtaggcatcagttgggggcaaaataccttttgacctcaacatcatgatgatacaaggggcaaaagaaacaccgaaaagaaaaaaactgcaccccttacagaatgcagtcctcatattttttcagttcgtccagatagcgcacggccagcggactaagcatcataccgattcgcttgatgtagccgatcaccatgctttcatcctctgcgagcggcactgcacagtagtcgcttccattgagctcctcacaaatgatcccagagcagagcgtatagccattcagcccgaccatcaggttcagcatcgtagcgcggtcattggcccggatgacccgtttgtaatcgtaggtgctcatcacctcttccgccagaaagaatgaaggattgtcaccctggtcaaatgccaggcacggatactcctccagttcttccatgcggatcgttttatttttagcaagtggatgatttttccacaggtatgcataggttccgcacgtaaagagcggatgaaattccagattgttttccttcagaatcttgttgagcgcctgactgttgaattcattttcatagagcacgccgatctcgctgcggaaattccggacattggagatgacctctccggtcttggtctcatagaccgcaaactcatattcatccatcccgtactgcttcacgagctctacaaatgcctttactgcaaaggaataatgctgcatggacacgctgaactttttgcgcacctttgtccggcggataaagcgatcctctaaaagctcgtactgattgagcagctgacgggcatagcctaagaactcctcgccctccggcgtcgggagcacccctttgttcgtccgtttaaaaatctcaatgccggtctcctcctccagctccttaatcgcaccggaaagtcccggctgagagacaaataaagtctttgctgcttcgttcattgagccgcagtctgcgaccgctgtgacataccttagctgttgcagcgtcattctgtctatcctccgtgctatgttgatgatgttggggtcaaaaggtcaaaaagccgttcattcttatctacttatttgctctggaacagcggtgtagaatagtaacggtctccgctatccggaagcagtgccacgatcgtcttacccttattctccggacgctttgcaagctgcagtgctgcggaaagtgccgcaccggaggaaataccggtcaggatgccttccttcttcgtaagcagcttggatgtctcaaatgcatcgtcatttgcgatcttgatgatctcatcgtaaaccttggtattcagggtatccggtacaaagcctgcgccgattccctggatcttgtgcgggcctgccttaccctcagaaagtaccggagaagtctccggctctactgctactacctttacctccggcttcttggacttcagatactcaccggtgccgctcagtgttccgcccgtacctactcctgcgacaaagatatctacctgtccgtcggtatcattccagatctccggtccggtcgtctctctgtgagccttcggattcgccgggttcacaaactgtcccgggatgaagctgtccggaatctcctttgccagctcctcagcctttgcaatcgcgcccttcatgccctgtgcaccgtcagtcaatacgacctctgcaccataagccttcagaatgtttcttctctctacgctcatcgtctccggcattgtcaggatgatgcgatagcccttggaggctgcgatcgctgccagaccaattccggtatttccggatgtcggctcaataatggtagacccttccttcagaatgcctcttgcctctgcatcctcgatcataccttttgcgatacggtccttcacgcttcctgccggattaaaatattcaagctttacaagaacggttgcttccagcccctctgacttctcaatattcttcacctctacaagcggggtatttccaatcagctccaatgtgcttccataaatcttagccatttttatagtcctccttgttctgcttttcatatattccctactggtttactagattatatatcttgttcccgtatttgtaaagtgttttttgaagaattttttacaccggtaaaatctttttcacttcttttcgataaataaggtaggcaaatgcagccgtcatcgcctctgtaatgcaaaatgcagtccatactccatctgctcccatcatccggctgaggataaatgccaccggaatcatcacaacgacatagcgggccagggaaattgcaagtgacggggttcctttaccaagtccttccagcacaccggagcaggtgaccgaaacagcagatatgataaatccaagactgatgcggtgcagtgctgtcacgccgatccgcaccgtctccttgttcgtcgtaaagaggccgatcagctgattcggaatcgtccaggacaataccgtaccaatgagcatgacaccggcacacagtaccagcgttgtctggaaaatgcggtgtacccgcttcgtctcccctgccccgtagttgtagccgaccagggggcggatcccctgcacaatgccatttgccgtcagataaataaatgtctgcagcttataatatacgccaagcacaagtacatatttctccgaaaaatctgccagaattccgttcagcgcagatacgagcagcgacggcagcgcggtatttaaggccgccgggataccgatcagatacagtctccttgcgatcgccgcctccggcttcatgacatccgcccggaattttaccgggatcggtgagagcttataaataacaagatacagtatcagcgtcagacactgtccgataccggtcgcataggctgctccggcaattcccatttccggaaaaatcccaatgccgaaaatcatcagcgggtcgagaataatgttcgcgataaagcccgccatcatgcagatcatactgacctccattcttcctaccgcctgaaaaatcttctcgatcgcaatgccaagtgtgatcacgatcgcaaaggcaaatgcgcgattcgaatacgtcagggcaagcgcgatgatcttctcatccgaggaaaacatccgaaggaaggtcggcatgtcaccgatgcacacaaccgtcagaatgattccatgcagtaggctgaataccatcccctgcgtcgctgccgcatccgcacgcttctgctcctttgccccaagaaaaaaagcgaccgtcgcattgattccgactccaaatccgactgcaaccgcagtaatcagattctgaaccggatagacgagtgccagcgcagtcaatgcatcttcgctcattttcgcgataaaataactgtctacgatattgtagagggaattgactgccatcgaaatgaccattggcaaagccatggacaatacaagcggcaaaatctttcgctttttcataaattcctgatccatatacctcttatctctccttttcttttttctccagggctttgatttttagcaagaaaacgccacacaactaccggcagtaattgtgtggcgaaaaaagatctctcttgaaaaatccacgccctgaagggttttatatttataatctacgaaattccataatatttgtcaagtcctaccaccagatcagataaaacagtgtcagcaaaaacccgatgcaaagcagcagcagggcaaaggaaagacttcggccgatgaccatattgttctcctttaattcctcataccggacggcaagtacatgcacataatcacgttccaccggatgctttctgcgccatgtatggttgcccagccatccaaacatattcacagtctttccggctgcgaccgtgaggacattgccctccggaagctcatgcggcagcgggctgtcccggtagatactccggcgcaggagaacgacaaggaaatccacaaggcaatccagcacccggcagcaaatcgcagcaaggagaatcagcagcctcagtaccggacggtaaatcagattctccagatccagccataccggccagacattgatatagcgcccggcctgatccatcagagcctttcggatcacaagtaagtacacggctgtcccgatcccgatcgaaatcagcgcgcctgacagatttgtaaggctgaaatagctgacacgatgtcccgtctcctcaagtcccatgaatgcctgtcccatcgctgccgcccggtccatcagaccatgcgggagcagtccccatacaagaagcacaagtgcgctgccggccagtgcaaaggtacttcccgcattcatgtaatgcttctgcgcatcaaactgcccctgtacgtctttctgatcattcttttctatgaaaatggcaacaaacagctttgtcatatatgccacggtcaggccgccggaaagcagaaaaatccactcgaccgccttcatctgccagccgcctccgtattcgacgatactctcgtgcagcagtgtcttgctgatatatccgccaaacagcggtactccggcaatcgccagtgccccggttccaaaaatcacctttagcagaggcttgttccttccatagccccggatcgcgttcagatcgagtgcatgggtattcataaaaatgacaccggccgccataaacagtacgagcttgatcatcgaatggttcaccatatgcagcagcgtaccgtgcaccgccagctcacgtccttccacaagcaagccctgcataccaatgccgatcaggataaatccgatctgagacattgaggagcaggccagcgtccgcttcaggtcgatcgagcacacggcgagcagcgccccgccgaacatcgtcaggacaccgatgccaaggagcagagctccccaggccggatcgtcaaaaaacagctgtgcacttaaaataagcacaccataaataccggctttcgtcagaataccggagagcagcgcggatgccggagccggagcgaccggatgtgcctttggcagccagatgtgaagcggaaatgcgcctgccttcgcgccaaagccgaccagcagacacccgcctgcggtatacagcagacgggcgtccgcatccgccgcatgtgcacgcagctctgaaatctccagtgttccaaacatatgatacagcaaaaacagccccatcagcatgaccataccgccaagcaccgcaatcgccagatacgtctgccccgctcgcagagccggggcagtctcctcctgcgccacccatacataggaagtaaacgacatcagctcaaagaaaatgaacgtcgtaaacagatctgcagataagaagactcccatcgtcgccccaagcgtcagcagtaaaaacaagtaaaaccggttcgtatttgcatgtccccggcagtattcccgtgacagaagcgtcgtcatcagccacataaacgccgccaccagcgcataaatcagccggaagccgtctgcctgaaaatgcagccccatgccacagatcccgtcaatcgcaaacgttgcttcgccggcaaacgactggatggaaaacagcccgaaggccgtaaggaattcgaacaccacgacgatatccgcaagaaaatcccggtaatccgcatgttttttccctgccacggccgccagcagccctccgaggaacggaaaaaatacgagcacgcctaaaaatacacctgtcatcgccatctcctcctctctacaccgctgcagccgcaagcttcgataacatcgatacgaccggagccgagtgcaggccgaacagaatcatcagtaccacaaaaatgccgagcggaagcagcatcctccaggtcggatctgtgatcccgtccagggtacggtagtcaaaatcctttcccggaaaaaacgcccgcaccactatcgtcagcatataaatcgcggtcagcagtgcggaaataagcagtgctgccaccccgggaatcgcaagcggatgcggattatctactgccgcctttgccagattccatttgctgatgaatccgcacagccccggaacgcccatcagcgcaaatgctgaaaccgtaaacgcaccgaatacccctggcatcttccgccccatgccatccagctcatggatataattgcgtccgcttttgtaaatcaccgcacctgcgcagaagaacgagcagatcttcatcaccgcatggaaaatcatatggcacagcgccccggtcaggccgagcggcgacatgagtacaacaccgaataaaatataagaaaggttgctcatcgtagaataggccagccgcctttttaaatgtgtctccttcagcgcccggctgcagccatagacaatcgtaatcagcacaaataccatcacaacagtctgcgcccatgtcccacgcagaaaggatgccccaaagctgtaatacgtgatccgcatcagggtaaatgcgcccgctttgacgaccgccaccgcatggagcagtgcagtcaccggagtcggcgccacacctgccttcggaagccatccgccaaacggaaacatcgccgccttgacagaaaatccaaaaaagcagagtacatagatcaaaagcagcagattccggctgtcgccgaccctggccagcatcagtacgccgcccggactaaaattcgcggtcgatccgtaattcaatataaaaatcattccgataaatgcgaatgccgccccgcccagggaatagtacagataggttcttcctgccagaatcgcctcacgcgagagcgtatgaagaatcagaggcagtgtgacgagcgtcagtatctcatagaagcagtacatcgtcacgatatcctctgcaaatgcaatgccaagcgtaatcccatatgtaatcgtataaaacataaaaaagtatttctcatgcccctcatgcgtcatatattcaaatgcgtataaggtcgcaagcggccacagcagcgacacaatcgccgcaaagaccgttccaagaccgtccagctgaaaactgatgctcagctttccgttcagatgaaacagaacaaagccatccgccgggcggttcagcagtgcagtcagcaccagcgccgtgttaatcagcacaactgtctcaatataaatcagcatctgtcgtcggctgcgaaatggaagcagcggaatcagtgcacccccaagaaccgggagcagcacagtcacagtcagaatgatcggattcatctctctccccccttataaaagcgtcgccgcaagatctgtgacataggaaatgaccggattcggaaacagaccgagcagtaccgcaagcgctgccagcacaagcagcggcacgagcataccgaccggctctttttccggagctgtctgtgcactgtgtaccgcctgccagtctcttcccggcagaaatccatgaaccgtcaccggaagcagatagcctgccgtcagaagtgcggagacaagcagcacgatcgggccgagataccggaatacaccgaccggagcggcaagcgcgccttctgccagatgccatttactgataaaaccgctcgtcggcggaataccgatcaatgccagagctgcaaacgtgtagcaccaaagtgtcttcggcagctgttttcctattccgtccagctcttccacccttgttttcccatatttgaaaatgaaaactccggctgttagaaacaatgcgcacttgatgaacgcatgaaatacgacatgcatcagcgcaccgctcatcgcttccggctgcagcacagaaagaccgaacaggatgtacgaaacctggctgaccgtcgaataggcaagccttttttttaacaccggctcccggaaagcgagcaacgagcccataaatacggtaagcaaggtcagggtcatccagatattctgcacccatgtgccccggagtagatccgggcctgcgatgtaaaacaccacacggatcaccgccagcacgccggactttacgatgattccggacagagcggcagatgccggggacggagccaccggatgtgccgccggcagccatgcatgcagcgggaacatgcccgcttttgcgccaaagccgatcagcatcgcaagcaccgccacaagcagaagtcccgtatgtccggaagccgctgccccatccagcgtacctcctgctgtaaatgccagcgtatcgcagtagtgatacaggcagaaaataccgaacaggccgagatatgcgccgcacatcgaataaaacagatatttcaaagccgccataatcgcctcgcgcgagccattgtgtaatacgagcggcatcgagcacagggtcatcagctcataaaacagatacatcgtgacaagattaccggaaaaatccagcgcaatgagcacggcataaacgagcaggaaaaatccgaaaaaccgtttttcctctccctcatgctccatatacgtaaacgaataaaatccgacgcacagccacacaatgctcacgactgtcacaaacagccggcctaccgcatcaatgtgaaaatagaccggaatatcctccatcaaatagaatagtgtcacctcgtgctcaccactccatgcaacaagaagcgcgagcaccgtcgtgagcacgagcaccaccgcagtgatggtatgcagttttttgcccatctgtgtgctcagctctccgtctgttttcccggacctgcccatagccagatgctcccagaaggaggcggcaagcagcgcaattccggcgactgccggcagcagtaccggaagcaaaatccacgtattcataacgtctccctcctatgcaaacatccgcagaccgttttccagccagttgacgatcggctgtgaaaacagtcccagaatcagattcaatacaataaagcaaatcagggccgccgccttcaccggctgctgccgcatcgtgaccgtccgatactgcttctccttcgcctcctgccgttttaccggcgtatagagccggatcaccgtcttcagaaaatatacggtattcagaatcgtactgattgccagtgcaatgagcgtcggcagcattttatgtgcatgcccgaccgccgcctgcgcaaacataattttcgagataaacccggaaaacatcggaaatccgaccatggaaagcgcacctgccgtaaaagccacaccggcaaccttgttccgatagccggcgcctgtcagatcaaagaaatccgtactgtccccggatgcatccgtaatgccggacgctgaaacaaacagcagggactttgccgccgcatgggaaatgatatggaacacgctcgcgagcacgcctgccgtcgtcccaaggccaaagcccatgtaaatgtaaccgatctgtgccacggaggaataggcgatcatccgacggatgctgttcgcgcggatcgcgtccaccgatccgatgatcatgccgaggatgccaaacacaaagagcacatggatgaccttgctctcctgcacaataccaaagcccaccacacggtaaaaaatcttcaacagcagaaaaatatagcccttcgatacaagagaagaaagaatcgctgctgaggataccgtagaatatccatatgcatccggcagccagccatgaaacggaaacaaggcactcttgaccgccagcccgaccgacatcagtccaagggcgacgatcagcggtgtatcatacacgccgcttaaatgaattttgctgacactctcctgaatattgctcatgagcagctgaccggtaataccgtacaggaagcagatgccgagcagcagcataccggagccgagcaggctcataatcatataccgtgtcgccgccacgatcgtccggccattctgcctgatcatgatcagtccacaggcggaaatcgtattgatctccacaaatacataagcggtgaacaggtcattcgtatagatcagcgccagaagggaagacagcagaagattcaccataatatagtagagattctgcttggactcctcgatttcctgctcccgctcccgcatgccgccgagcatggagagcagcataatcagacagaaaaagactgccatgaccgcttcgagcacaccgacccgtatctcgttgccccacggagccggaaaatgccccatcttatagacgtaatacgtgccgtttttcaggacaaatgcaaacaccgccgtattcatcgcaccgacaagtgtgatcactgccagattcagacgccgcgctgcctttccgccaaggatcgaggagagcgggccggagaacagcgtcataatgatgcaaaagaaggagaaattctgaacaaacgccatcacagaccctccttttccagctgcgtcgtaatctcatcgagattcagagtatgataccttcggtacagccggatcgtcagggaaagcataagtgcagtcaccgatacggatacgacgatgcccgtcagtacaagtcctgccgggatcggattgatataagccgtcaccttctgaacaccattcaccacgatcggcgctttcctcccggaaatatagcccttcaacgccagaaacagatacatggcggtatccatgatgttcaatccgatgattttcttaatcagattctgctgcagaagcagattggaaaatccgatcccgaacaggatcatcgcaatcgcttcttcataattattctgtatcagattcataacattcatatcagtagcctccctttcggaacatgacataaaacgtatacatcgtaccggccaccacgatgccgacacagatgttcagaagcaggatcagcccgctcgataagatcgcccccggcgtcccaagcggaatgatgctgtggatatcattcgctccggtatagaaggaatagcttttcgccagcgcatagcaggccagcgcgccaaagctcatccatttatacgtctttgccgtaaagaaccgttccgtcttcgcaaaaccgaacgcattcaggtacaggatcaggcctgcaccgatgaccgcaccgccggaaaagcctccgcccggccccagatgaccgcaaaggatcacatagataccaaaaatcatgatcggcgggacgagcagcttcgcgaccgtctgaagaatgatatcgttcttcggctcatagatccggtcgttggcctcccactcctcaatgctgttcctgcccttctttttgtcgatgcgcagcaaaatgagtaccgtacaggtcgcaacaaagagcacgtgagattcgcctaacgtatcaaacgcacggtaatccaggatcatgcccgtcacaatattgaccgctccggtctcctgcaggccattctcgatataacgtctggggacttcattgttcaccgggttgtccgcggcaccaaacggcggcagatgagagactccggtcagcagcacaaacacaagaccgatacagaacaggacactgaacagccggtacaacttccggaacatgcgcagctccgcattgtgctcggtatcaaagacacgtgcaaaaatttctttcttttcttcttttcgtttttccaccgcggtatcatcctcgtggaattccttctgcggcttcatttccaccgtcccgagaaacggatccttcgtcccgtccagccactgccggaaccggtaagagatcgtcttctcatattgctgttcaggaatttttcggctcatccgacggctcctcctctcctgcttcttccttcatcatcgcgtgaattttcttcagcgtgacaaaaaagagtacactcgtaataccggctcctactgcggcctctgtaatcgccagatccggagattccagaagaatccagatcaccgacgccacaaggctgtaggacatataaatcagaatcgaattcagcaggttcttcgaaaggctgaccgagatggcacagactacgagaaacccaagcagaatcagttgaaacacttccatactcacgcctccttctgtcccgcttcttccggctcttttttaccggagagctcctgctccagttcgccaagctccagtttccggaaatgcggctcctcatcctcgttcgtcgtcacctccagacgcgcgatcagatgtgaggataccggagatgcaaaccacaaaaaaacaatcacgagcagcagctttaccgatgtaaacgtaaagccgctcataagaatcagcccggctaatgcaaagccaatgccaagcgtatcgcccatcgccgccgcatgcatacggttcagcacatatttaaaccggaataccccgatcatttctacaagaaaaatgccaaggccacaaagcagacagacggcgcctgccagaaaccggatccattcaatgaccgccatgttctctctcctccctctgttttttctcctgataaacgcccatatacaccttggtcagaacaatcacggcaaggaagctgatcatcgcataaatgatacagatatccacaagatacccctcctccagcatgaccgcaaggattgcgatgatgaccatgatcatcgtccccatcatattaactgatacaatgcggtctgcaatcttcgggccgataatcgcccggatcaggcagagcattaccatcactgccagaaaaatcaaggctgccacaaacaacatatgatacgcctgcgacagtcccgctacgttactgttcatgcttttttcctccttccttccccggtcgctccagatcctccagcagctccacaaaaatggaatgatccattcccaccgccagactctcatcgagacaatgtacgacgtaatccgcatcctgaagcgtcacggtaatcgtcccgggcgtcagcgtaatcgcatttgccagaagcgccctcccggtccgggtctgcatatccgccgtaaaatgcacgagtgccggctccggctcctccttttccgagagaatcatatggatgaccgcaaaatttgccttgatgatctcctttacaagtacaaaaatataatggatcaacggaaaaaaccgccggagcacctgtctttcgcggacgatgctgtagtccatgaatttacaggtaaatgcaaacatgactgccgctactccgatcccgaacaggcagatttccagtgtgatcgcaccgttaaaaatgatccacagtgcaaagtacaataaaaacataaaaaaagctcctccatttccggcattttgtatcattctatcgcattcctgtccaatagtccagagcagaagtgaaaaaggccggaataaaagcgccagaacactggcgctttcattaaccggctgtatttttcacatatccccatccaaaaaccgtatcatagcccggagggcccgcatcgactgcgatactttttaaatattcctctgcatagctctgtgtatgcttctcctctgacgttctatccagatatccggccagtataccactgattctgggcgccgcaaacgatgagcctttttcgccctgataatttccgtcggcagacacaaatactgcatcactttgcagataccagagggagctgaccggctccccctgcgcatttagatccacgcctgacacgccaatgacttcttcccaggaagcagggtaaacctgacttcccagtggtgtggacagcgacaagtttccggctgccgctacgagcaggacattttgtttcgctgcatagcaaatcgcctcatgcagttcctcgctgtcctgattcagagtccagctcatattgatgatgtcggcatcatatacatccactgcatcataaacagcctgaataatggcagtgccgatatctgtggcttctgatgcatcaccggccttctgtgtattctgaggcagggacgtgctgctgtcaaagcattttaacatataaagctctgcttccggtgccgtttctttcaggagctcatatacatacgtcccatggccttccggatcggtcagatcctgtgtaccatccaggtaattccttccctgtatatccggcagattgcagccggaatccagaatgcagacggtcaccggatcagagattgctttcgatggctccatctccgccgctgcccccgctgtaaggggcagcgtcagaaggatggcagtcagaacatttgcataaaagcaggttcttctcatgggttaccactatcctgttccgcttccgcatgctctgccgcctgtgtatctgcagtctgtggctcgaccggctgcggcggtgcggatgtctctttctgcggagctgatgtttccggtgcggatgtttctgcctgtggtgccggtgtttccggctgcggggccgctgtttccgatgccggctgctccgtctgtggcaccggggctgtcgtttccggttcagaagtctctggcggattggtttctggtgcctgtgtctgtggcaactccgtttcaggggtctgagtctcagtcgcaggtgtttctgtggtcggactctctgtcatcgttgtctctggtacagaaggattagatgttgtactttccggttcagaagattcggtatcctgtgatgaagtctgcgattccgtaatggtttctgttgaaagttctgtttcaggctccattatccgggctttcaatttggcatttttagtggtttttaaagacgtaaaatactgtttgctacaaaccagaattgtaattcttatattacttgtcggcacttcattaaaccaaatagcgaactccgtcccactcataccacgcaatacaccaatatctccattaaatatttgttgttcatcagcttctgcctcaatctttttaccattaaattcagctacaatttttcttatgtatactgaatcattattcgtaccgccattccagttctttacagatattcctatactcagatcatttgtactaatagtctgtgtaattatttgatcttctgtcatacccgcattttgtccatcatatttctgtaatcctttgaccactcctgttactttaatagtggtcgtaaattttaccagacacgttccgcttccattcttatagttctgatcatctgatttaaatgtcaccccatatttttcttgatcttctggctccctttcaggatcatcccattcccagcttccagttatcggttttcccgtatatgggtttgtaacctcacctgttgatgaaataaatgcatacgataatgtattttttatcgtttcagtctgatattgctctgaggttaatgtcacatttccggtatatggtgtagctttctgtaccgtaaccgggatatatgcttcagaagacttcaaatttccatcactattatttggtataaactgagcctttacctgataagttccagctgccaacggttgtgataccattgtttcttttccatcgtcagatttaatttgtacctttccatccgttgttgttatccatgcccaggttccgtttacacttgtatcttcaccggaagcatttttaaatgtagcactatatcctctgacttttcctttcgcggttaattctgtcttcacattttgtacaccattcacagttgctgtctgatctttgctttcagccgttaacttttgtccatattggatcggttctgtagaagctttacttgtgtcaaccgttatttccgccggcagaatctgataggaaattgttgttactttttcactgctgctgtcttcccattcataattagccgaatcggtcaattccagttttaccgtgtaggttcctgcatttgtattggaaggattttcttttacgttgtagtaactggatactggtacacttgctgtctgcccagcaccgttataagtcagatccgctattgtcggaaccgatacttttgctttttgtatggtgacagatacttctgcctcaaaagctccatatccgccatggtacttctcatccggtgtaaaggctgctgtaactgtgtttgttcctgctgccggtttcctttctttatcagacgtatttttccaatcccaggttccgtcaactgacagccagttttcgtcatccttttgatattgtacagcaccatctgttaattttacatctccaagctcaataccatattcataattcttactctccgttgtcggttcagtgattttaattttcacattgccctgctgcacctgacgaattgttgcgtgagaaatcacggtgctgtttaccagtacatatgcgttttctccgtaatctgaactggtgttcttatcctgattcagtccatatccagagtaagtaacctctttgttctcttccgccttatcatctttaaatgaccaggtgccttcctttaacaatccagttacatcgcacattctgtctatcggattgccagcctcatctgcatagacaagagttgctgttcctgtcgcagttgtttctcccgggatatagtctctgtcatccaccattcccacgaccgttaatctcgtctgagtgagaattccgactgttccttctacggttgcatagcattctgtctgatctggcgtaaaggtcacttgataggaggatgccgcggttccgttatttcctccaaacggaactttgtctttttcgtctgtattccagtcaaagtttccccaaacagataattccagattttcaaacatgtactgtgcacttccacccgtcaactcactgagtctaacctcctgattatactgaagattggaagcttttggccatgcaacaatgttcggtatcattttattcaatgttgcagcataatcaaatgtcaccggttcttccgatgccggtttgccatcatcgtctacatacattgcctcaatctggaagccatatttctgtacagccggatctctgtcccgatctgtagattctttatccagactcagtgttaactgaatatgatcactgtaagcgccaatggatgcatctgctttgatcagctccattaatttcttctctatgttctgtgccagctttccttcaagttcctcataatcaatatgaataatatctgtcataaagctttcctgactcaggtatgctgccagttcttccttatatggataatctcccgcaatgacagctactctgtccagaatacttaaaacctcatcttctgtggaccaggtagctgtatatattctgtcaccaatagaacctttcggaatatgaacctctttggttggctggtcaagtcccgttcccgtccagcccgcaaattcatacttttctctggttggctgtttcagaataatctcgtcgctttctatattgtaagataccggattattcggattgtcgaaagctctcctgtattctatcgaatactcaatcggcgaccatactgcggtatagctgcgatcaccgccagttcccggctcgatcgtaacctctacggtagcctctttcagaccggttcccgtccagccagcgaatgtatagccttctctgattggcgcggtcagtgtgatcgtatcttctgtggtatagcctgtcggattttccgccacttctgtcccacctgcaagatcgtaggtgatcgcataagcggttgccttccagcccgcataaagggttgtatgaccggtaatcgtatcgttttgcacatcaaaggctacggttgctgccttatttttgtaccatccggtaaaggtatagtactgtctttccggcgcatccggaatgatcgtgattggatatcccacaaatcccgttgtttccgcatagagcggtgcatccgttccatcattgcggtcaaagcttacggtaaccatcttcgcccagcgcgcatagagatccatacctcctgacagacggtatgtttccagattgaccggttcacctgagaattcctcattggtgtaccatcccatgaactgatatccgtcatattccgggatctgaatattcagcagcttctctcccggtcttaatgtcgaataggtaaatgcaaaatactcctgtgtgtcattttcaaaaatcagatgttcttccggcgcatcctctgaccctgtcagatatgctgcctttccttttgcaggtgtaaaatgcacggttacatcacaggtccagatggcatataaggtcacatctgtcagcagcttttcgccgaactgatatgcttccccactgccatctgcagatgtgtaccagccccggaacgtcagtccgtcaagcttcggatcttccgccttctttgtcacttcattttctgcgaaatagactttttcataggttccatagccgccatactggtacagatacgtaatgctgtgcagccgataagcacgcagtacaatggacagatcgctgtttggcatgataaagcttactttattgtcatcgatctggaatgtcacatccgcattttctgaggttacctccagtcctccatagccttcttccagttctacctgaagctccactttacttcccggtttgatgccatcttccccattcagcttctcatctgtaaactgatatcccttcacaccttcaccggactgaatacccagcatcggcttgccaatggtaatgtcaaaatagacatcctgctgatattcccgtcctgtcatggtaaatccggtctttgccgccgcttcctcatttactgacatcatcagaggctgcttactgccatcgaactgtgtacgtcttgtttccagaagatagctgtgctctgattcttttgtaaaggtcagtgctttgccgtatgcactcggcgctacctggaaggtataagtatcctctgcatcgtcccctttcagattgatatgataacgaatcgaatcctcatatccctcaaatctgcggacatacagataataggtcacatcatacgcatctgtctgcggacgcacatcatagcgcacgactccattggcaggtgtcatgtagcagaagctgctgatctgcggcacactatactgtatcacaccattttgggaaggagatggttccatccattcgcaggtgtactgactgatttccggatattcactctgtacctttgcaacaatttctccgagattcaatgttcccgtcgcagttggctcataagctcttccgagattatgggtggaggtaaaggacgtctcatacaccactttgttatcccagtcagccgcactcagtccccagtttcttgcacaccagtcattcaatacaatcttcacattctgtgtcgttgttgccagcgcacatttctttttcaaatggaacgtcttggtctgtttcttcaccagtgcggaggaactgttattttcataagtaacctccagatccagctccgcctcttcgcacagctgctcttctgcaaccttttcatccatgtagataaatcccggattctgtcccttcgaggaatcgcccacggtaaataatgcagttctggcatctccttccgggatcgcctctccatttatcatgagattcttcaccgttaaagtgatcttcgcacctttaccggatgattttgcgcagagaagattgttcttctggcattttccgctcatcaggttccacgtcttcatcggaatggtttcaaatccgaatactgttttatgatctgcattcgcactggatttttcccagagatttgtcagtccctcttcatccatatagctcatgctgctcgatacggatgtggaccacaatggccagcgtccggtatagaccgtccagttcttgcgtatcgtcttgaaaatcagtcttaccttcagaccaagggatactacgacatcaatacctacctcaaattttaatgctccaagattcgtattggctccgctcaaaagattcgtggtattgaagaacaggcctgtcagctccgcataggcatacaggcttccggttatataggccgtggcaattccgcacatggttacggacagcgtcagccgcagtcccacgcgggctcctacctttccgatcagataaatattgttggttacagagctctccagcttctccgtataggagcttcctttgaatttcaggaagttgtatttgaagccgatgcgttccccgcttctggctacaatctctacgccaaaggttgcgaggactcccacttggcctaccagatgaacctcaaagcctacggtaataattccatagaaagagaatctcagattcagaagcaggatatcaaaaagatcattatatttcaaagaggttgccacgatggagttcatcgtatccatcagatcggatacagactgatcataggattcataatcaccctcctggattccttccggcttgacaatctcacttaaggtatcctttgcttttgagaatacggttgtttttccgcctgtggtagcggtaaccgtcagttcaatcttcgacatggaccggatcgtcacagacatatcgatccagaccttgccaccgtttacatttgtctgcacagacaaagactgggtaaaggacagcttcggctgaaccgtcagcatattcttaccgtcttttttaatgttggcagtcgcagaaatactgatgtttgccgtcacttcactgcctgatgccttcagcttcaccactggcctgccgggtgtcagagttgccgtcatacctgccagtgcatacgtgccttccccgtacaggtcatccagcatatcctgtgtctcaggcgcactcatgacggataccagcatctgagccttcagctcttcattctcctctacctggctggaaagtctggacgtcagcacttccagatcttcctctgacagctgctgatccatctccacatcgtctgtcacatgcacatcgaagtctgccagataatcctccgggctggcatatccgtaagtcagacgtaccccatctgcggtatcttccacgctcagaatctgcgcaaacagtacatatccgtcaaaagagccttctgtatacgcatcgatatttttttcatctctgccgatctcaccatcatagaaggctactatatcgccttcctgataggtaacatcactgctttttaccagaagttcgccaggaatgtacgctgcttcttccacttcctcggaatctgcaccgtccggatctgccaccgcctgactgatttccgtttctgattctgcctcttcgactgtctctgtctctgaatctgtctcttcttcggatgcttcctccacagatactaccggctgatactccatgacctcattccagagcacataagtcatgtcatcagaaaatccgactacttccacctgttccttgtagaccgatacgattgctgtatcggtatcatccggatagtctgcaaaatggactcctccggatacgataatgctgaatgtcgctcccggttcaaatcccctctcaccgtctttttcatagtaagatccggaaacagcgaacccgtcttctgtctctgtaatatccagctccggctccagggatcctgaaccagtctccacacggacattcttttttacttcatccagcgtcatttccggctctgtacgaagaggaatcgttccctgccagtcaaaatccgccaggtctgcggatgttccgtccttttctgtttcctgtacttcttctgatacaaagaacgcatacagcgtcacagacgcttccagcggttctgtataggaaaaggcggtcgtacattccggatctgtgcaccatccgccgaaggtatagccatccttctcggtatagatctcgttaatcggacggcttaacagcgtttcgccttttgcaaagagctgcggctgcagttcacgcccgcccatagtgtcaaaggtcacttcgatggcttccgatgcatccacaaatctggcatacagggtcgtcgctccttctgccactgcaaactgagagcagctctctgtaaacgcttcatcctgataccagctggtgaaaatgaatccgtccttttccggattctgttccgggaaaggaatcgtttctcccggcttcaccagcttgctgtcataaacctgtccgtctgccagaaaggtcacctgataggatgacagtaccagttcctcctgctgaccagctgccagtgtcatctgatttccgtccggcgtttcaaacggaaccgcctgtccggattcatttttcacagagcaggtggctctgaccgtcacagcctccagtgcacccgttacacgaaccatacccagtgcgccgttgccttccagcaggacactcccttctccttccagaaagatttccggaatcttcgtcttggcatctatatgcagcgtcacactctggccttttgcagtctgaacatacagctgctccagctctgttccgcttagccgcagttcactgacctgatccgctgtgagcacgtttgctttcacatctgacagctccagcttatctgccgcagccgctgcaatttcgccatagctcagtccggacagcgtacactcttttgcggcaatcagcagattcttcgattcatcctgcgtccgaagcgcatctgcctcttcctgtgtcgtaaccgtctcatattctccggtccatgcttttacccgctcaggcagcagcgacggatccagctgtctttccttctcctgcactgcaccggattcctgtacggtgccacgttccgtctccggagtctgtgccagcccggcactccctatagtgccagacagcataaccaccgccatcagcatagctatccatcgttggctttgttttctcttcatactttttcctcccgtttcacgctcatccatgtaagcattcttacgcgatcagctgcaatgaaatcactttacttaaataaatacataaaaaagtaaatcctctcacccattttccatattttttcaaaaaaaaatcatttacagatttttctgcaaatgatttttgttttcctctttatttatgcctctacgagtgcatggtacagcgcccggatcgctttctcgaaatcctcatttttcacaccgatcgtacagttgatctcgttcgatcccatatcaatcattttaatatttacatgtgccacgccaaggcaggtaaagaaggtcgccgcgataccgctgacggagcgcatccctctgccgaccacggtcacaagtgcaagatctgtgtccacctcgatcttgtccggatcgagcaggcgccgcagggacgccatgatcgcatcctttttctcctcatattccacgcgcggcagaatcacactgaccgtatcgatcccggatggcagatgctcaaaggaaattttgttctcctcaaatgcttcgagcagcttcttgatgaacccgatctcggaattcatacagttctttgcaatgctgatcgccgcaaactcctttttcccggcaataccggtgatcggcacctcttcttcagcacttaattgcctgcgtatgatcgtccccggatccgccgggtcatttgtattgcggatctggatcggaatcccttcccggcgcaccgggaacaccgcctcctcgtgcagcacactcgctccgcggtaggacagctcccgcagctctccgaaggtcatcgcgtgtattttcttcggatcatggatgatcgacggatctgcgagcagaaaaccgctcacatctgtccagttctcatacagatctgccgacactgcgcgcgccacaagtgcgccgctcacatccgagccacctctggaaaacgtatggatattgcccgcgtcatccgccccgtaaaagcccggaatgaccgcgcagcgcgtattctttaagcgctcgctcaggaaaaaattcgtccgctctgactggaaatttccatatttgtcaaatcggatcacctctgccgcatcgacaaattcatagccgagaaaagcggcaagcaggatcgcattcagatactctccccgcgaagctgcatattcctctccggcacagccaagaaaggcctgtttgattttttcaaattgtgcatccagagacacgttaagcgaaagctcatcaataatatcctgatatcgcttccggatcttttccatagaattgtggtaatctgctcctgaggatgcttcctgatagcagcggtacagaagatccgtcaccttctcatcctcctggctgcgtctgcccggcgcggacggcacgatatatctccttgccggatccgcctccacgatctcctttaccttccggaaatgtgccgcatccgccagcgagctgcctccgaattttgctgtctttatctgttctttcttcatactatctcctgtttgtatattactttctgtatagctgccacgcgcaaaagatgccgcagcctttactgctgttctgattctttgcggatcttcccgcgggaatcctcgcgcacggtctcccgcagatgctccatatatgtacaaaagctgcactccttgctgccgtaggtcatctgcagatcgtactccagaggcagccaggtcgaaagcttcgcctcgttgtgctgaatcagtgcctcaagcttatcgagtgccttgtacagcttcgcttccggcgtttttcgctcctccatctccgcaaagagctgcgtcagctccgcatgatacggctccggcagcgcatcaaacagtccggcgactgccttttcttcgacctgctcatccgcctttgtcttttcaaatgccggtatgtcccccgtcacagcttccccgagatcatggactgcacacatcagcatcacctttgcgatgtcggtatccgggaattcatccttcatcagatatgccatcagaacgagccgccagctgtgctccgcaacactctcatgccggtctgatgaagtccaggaatggcgcgtattacattttaatttttctgcctgtgccagaaaatccagcaaggttctgtcttccatcgtcgtcctcctaccgatttcttttttctcagcgctctccatcatagcattcctgccggaaaaaagccacccctttcccccaattccctgtaacgtaaaaatccgcccgtctgcatttccgtatacggatacagaacgggcggccgcttaccgcaaaaataattccagcagtgtccgcttccagctggtatagggctgatagcggatcggaaggtcaatccagttgtacttctttacaatactgcgtcggtgggaaaaaaggtcaaagctcgcctttccatggtagcctcccatcccgcttgcccccacgccgccgaacggcatccggctcgtcgccagatggataatcgtgtcattgatgcagcctccgccaaagctgcaggtgccaagcaccttccacccggtggcacggctgcgtgtgaacagatacaaagccagaggcttgtcatggccattcacgtaggtgatcacctccgagatatcccggaacgtcagcaccggaagcaatggtccgaaaatttcctcctgcatgacgggatccgacggacggatatcggtgaggaccgtaggcgcaatccgcagatgctctgtatccacagcaccgccagtccggatagctccggactccatcaaccgacagacccgctgaaaatgcttttcattaatcatcttcccgtagtccggattcttcaggggatctgcaccgaactgccggtaaatacagcgctctatctccctaagcaaaggctcctttaccgactcctgcacgaacagataatccggcgccacacacgtctgcccgaggttcagatattttccgaacacaatccggcgtgccgccagacgcaggttcgccgtctcatccacaatgcaggggctctttccgcccagctccaggcagaccggcgtgagattatgagctgccttttccattacaagctgccctaccgccttacttccggtaaaaaagataaaatcaaacttctgctccagcagcttcgtattctccgctcgtccgccct

SEQ ID NO: 2010 - DNA, 1724 bp, Unknown
  16S sequences of unknown bacteria
gtgtacgggctgcaaagaaattaggaataagatccgttcccgctattattaaggagaacatctcagatgatgaagccgccttaataatgcttgacagcaatctgcggcagcgacagagccttaaatacagcgaaaaggcatatgcttaccgaatgcagacagaaattcttaacagacagggcaaaagaactgatcttgaacaaacctcgtgcaatagtcgcacaaaggtggatactttaagggaagcgggagagaagaataaggaaagtcggcggacagtagcctatcttatacgccttacatatttgttacccgccttgcttgaaaaggttgacgacggaacgattaagcttatgccggcggtgtcgatgtcttacttatctgtaagcacacaaagctatatccttaaaaacattataggtaagcataaaatcagcaaacagcaagttgaagaactgcgtaagcttgaaaaaaaaggcagcattaacgggaatcagattgagagcgtttttaaaaaagacaaagctacggaacaatacactttcagtcttgaccgcaagtattttaaagaataccccgaactgtttaaggataaagcaaagctgcaaaaattgtttgcagactttttaaaaggttattcggaaaggcaggctatataaatgaaaagagcattattactttcacttgccggtttattggtcttatcatcaggttgcaggaaacacggcacggattatacttcatcggaaaataccggagatgtaagctctgttgtttccgaaacgacagcagagagcgaaatgatttcttcggcggagaatgtgtcctcgacgcttagtgcaactgttgcacaaggttcatcagctgaaagctatgtagggaaaccggataaaacggtatcgcagaatagagaacaacctaaaatttcttcggctgcaccgtctaaaacagataccgtacaaacgccgccggaaacgaaacccgaaacaccggcaaacgcaaccgcggcagacaccaaagctgttgccgacagggttatatatcatctaaaccgcgcaagagtgaatataggcagcggggaactaaaacggctgccgcgcctgacggtgtacgcagagtacaggagcagtcagctgccgtcaaactttgcccatgatatatccgactggttcgccgcggcgaaggctacgggctacggaagatatacagaaatgccggacggcagcgggtcttacgacataggcgcgcaggaagcaatagcaatggcgggcatagtcggcagcgcggacaaaataggtcagtgcttagcgcagataataatagacagccgccgccattggcagtatgtaggttcagacgaaatgaaatataccggcgtgggtgtgacctgcgttgacgacttgtggtatacttgcattatggtaacggcgacagacgaatacgaaaagtaacagttaaatatttttaaatccaagcctcggtttttccaaacggaaaagccggggctttttgcatttccataaaaattaaatacggggaggtgagtccgatgtatcagtaaggccggtgggaccggcaaagcggaacgccaagccgtccgcagaaaacaacaaatcattttaataaaacctgccaataaaagtcaagagtaaatttcaagaaaaataatttttgttggcagagaaatttaggcatgacgaaaaaagcggagagcgagagttttt

SEQ ID NO: 2011 - DNA, 3301 bp, Unknown
  16S sequences of unknown bacteria
ctacttgctcatgaacgcagtcgcttcgcgatctgtcagtgggagctttcaactcccactggcataagcatccccctcacccgccgcttagtgctccgcgcacttgaagcgggggaatgcttatctgcgttcaagtttttgctggccactatctgaatgagtcacggcatattcggaggcagagctggagcagaagctgcgagtgcctccatcaccgcatatgccccacactcccatatgcgtgacagatcctgacatacagcctgctcaaagccgggcagggctaagagatcctcaccccagaaatcgtcgcgggagcagacagcgtgtacgagcgcatcggcagaatccatgcgatgctcataaaagaagtccagcacctttgggtcatccttgatcgtatagtcattgccggagcgggaggcgagcagtccgtcctctgtacgggtatgaccatgataaaaggcaatataaaaggcgaacgaggcggtcagacattccggaagcctgtcttttcgtgcaatgtattccttcagggacggcagcacacgcgctttccatttggcagtagaattcagggctatcgagagcagggcatggtcgatgaatggattgcagaatcggtccgagacagcggaggcaaatgccagaagatcatcttctggaagatccagggtcggaatgatttcgtcataaacggttcgatggagaaattcgcgaatcaccggatcgtgcatgcagtctcgtacgatattctggccggatagataagcgccgagtacgaaggaggtatgcgaaccattcagaatgcgaacctttcgctgcttataaggtttgtggttgtctgtgatcagaactggaagatctgtcttgtggaccgggaattcctccaggatcgattgtggtccctcaatgacccagaagccgaacggttctccggtatcgagcagctgatcctcatagccaagctgccggcagattgcgtccgcttcctcgcgtgggtatccggtcacgatacggtcgaccagcgtagaacagaacagattttccgctctgacccagtccgtaaatgcagtgccgagcttccactggtcggcatagcgcaggacgcagttctccagttcttttccattattatcaatcagctcacaggaaaaaatcaggaagccttttcccttttgcattccgaatttctgaaacctgcggtaaagaaactgcgtcagctttccgggaaaggagctggccggagtgtcagtaaactgacaggcaggatcgtatatgattccggcttcagtcgtgttggagacgagaaaacgcagctccgggttggcagcacagtccatcagctgttcataatcgcgctgggcattcaggcagcggctgatgcaggatacgacgcgcgtttgtgtctgtgcctgaccatcctgacagccacgaagcagaagggtatagagtccgtcctgtgtgttgatccggtcagaggctgccgggtttggagaggatggctggcaaacgacgacctttgcgtcaaaccctgccttctcatttaatatgtcgataaaatgatccacaaaagcccggagaaaatttccttccccgaattgcagaacacgttccggcgcgtgctcaaggagatagcccggataattctgttcttttaatgtttgataagataaacgattcattgtattccaatcctttctctgaatatttaaccgaaagtagtttctatatcagctatagcgtcactccctgcttgaaaattgccatatcgtgaaaacctgcctgctcggattttgtctgcctgccggaggcaacgtcgagcacgaaggaaaaaagctcttcagacagctcttctaaagagcgtccttcagtgagtacgccgcagtcaaaatcgatccagttttgcttcctttgggcaagctgtgagttgcttgagagcttgactgtgggcacaggacaggcaaaaggagtccctcggccggtcgtaaagagaacaatctgtgcaccggaggccgcgagtgcagtcgaggccacgagatcgttgcccggggcacttaagaggtgaagccctttctgacagatacgtttgccgtaggcgagtacgccgcggatcggggcctgcccagatttctgtgtgcagccaagcgatttgtcttccagagaggagataccgccctttttattgccgggtgacggattttcgtaaatcgtctgcccgtgtcgctgaaaatattctttgaaatcattgatcagatggacggtctgatgaaatacttcctctgactcacagcggttcatcagaagcgtttccgcgccgaacatttccgggacttccgtcagaatggtagagccgccggtggagatgaggcgatcggaaaaggcgccgacgcatggattggcagtgataccggagagcccgtcagagccgccgcatttcatgccgatgatcagctcagaggatggcagcgtttcccggtgaaactgcgccgcgtagtcgcaaagctcttcgatgagtgtgattccgttggtgatttcatcttcgcagtcctgtgcattcagaaaccggatccggtcagggtcatatgcaccgagataggttttcagtacatcaatgttgctgttttcgcagccaagaccgagcacgagcacgccacccgcattcggatgccggatcagatcagcgagaattgtacgcgtcatctcctggtcgtcgcccatctgagagcagccgtatggatgcgggaaggcgcagatcgcatcaatgcccgggcgcagaaagcgctgtgcggcgcgttcaatggcagtagcggtattattgacacagccaacggtcgggatgatccagatctcgttgcgcacgccgacggttccatcgcctcttcgatatccgtaaaaatagcgtgggggtgtggcggaagatgctgctgcctgtggggtataagtataatccagaagctcgccgaggccggtcttcatattgtgtgtatgtacccatgcaccggcaggaatgttctgtgtggcggtgccgatcggattgccgtattttatcaccggatcgcccttggtgtgtgccttcagggcaaatttgtgtccctgaggaatgtcctcttttaaaagaagtgtcagaccggggagcgtgatcgatgtagcttttgccagtggcgtaagtgcgacagccacggtgtcagacgggtgaatttgtatgtatgttttcaatttggatatgtcctttcattttatataatgatgatgccagggtcaaaaggtcaaaaagccgttcatgcttgcatgataaggc

SEQ ID NO: 2012 - DNA, 4288 bp, Unknown
  16S sequences of unknown bacteria
aagcatgattcacacttttgcatgaaaatctgcttggctctgaacagttacaaataccggttttgagtgaatgcgctacaggagcagatcgtgcggtatccacatattctgcttgcggttacagcgaaaaccgttataatagaaagtgataatttatcggggtgatagtcaaagcggatattcgcgatacgctttgctgcctgcttacaaccaggcccgaaaaagaatgaatgaaaaataacaaaactgagaaggagaagtaactatgaaaataccggagattaccgtattaaaagcgctgtatggggatgcggcagaagaggggaaagcacgttacgaatcactggcaaagcattatcaggagctttaccataacgataaaatggaattcttttcttcaccgggacgtaccgagatcgtcggcaaccacacggaccacaacggcggcaaaattcttgcggcgagcatcgaccttgacacaatcggagcagcatatccgaatggtacggacacgattgtgatcgtcagcgaggggtatgacaaaaaagtaatcgtcaacacagcggctttggaaaaagcaccgaaaaactgcggtacggtatcacttgtcgcaggtatggcggaagctgcaaagaaaaagggatttcaggtaagcggatttaacgcatatatttcgacaaaagtgatcagtgctgcaggcatcagttcctctgcttcctttgagatgctgatctgctcaatgatgaactatttctttaacgatggaaaaatgacctgcgcggactatgcaaagatcggtcagtatgcggaaaatcatttctgggacaaggcatccggactgatggatcagatggcatgtgcagtcggcggaccgatccagctggatttctccgatgatgtaaaatacgagaaagtagattttgatttcgcacgttttggatacgatcttgtaattgtcaataccggaaagggtcatgcggacctcagccgcgtatacagtgagatcccggaggagatgaaggcagttgcaaaagtgctcggcggagagtggctggcagactgcagctatgagcagctgctggatcattacgcagaagtgcagaaaacagttggaaatgatcgcgcaatcctgcgtgcactccactattttgaggagaatgcgagagtggaagcagcggcgcaggcagtgaaggaaaacaacggaaagaaactgctgcagattctcgatgagtcaggtcgttcttcctttgagttcctgcagaactgctacccgatcggagattataaagagcagcagattccgctcgcacttgccttgacaggccattatctgaaagagatcggcgatggctgctgcagagtgcatggaggcggattcgcaggcgtgatcatgagcattattccgaaggcgcacacaaaagaatatgtggaatatatcgcacattttgttggaaaatctaatgtatatccgatgcagatccgtgcagcgggcgcgatccatgtggaggcgtagtcctgcagcagttttacagagatgacagaaaggaaaaatatgagagcggcaggatttgacattggaacgacgacggtctgcggtgtcctgatcgaccttgaaagcggaagaacagtaaaaacacagacgagaaaaaatgattcctggataaaaggagaatcatatgagagactgcaggattcggcgagaatctggcagctggtgcaggcaatttatcaggattttcttgcagaggatgagatcgcagcaatcggtctgaccgggcagatgcatggcctggtgtatgtggatgcggagggaagtgcggtcagtccactgtatacctgggaggatgaacgcgggaatcgcttcgtcacagatacggataaagaaaatgggacggatttcggcagaaaagctgtggatcaggagactgctgccgcgacggcctgtgatacagcagccatggaagcgcagtcggaaaaagctgttccccggacctatgcgcagcaactctcaaatttgaccggataccagatggcaacggggtttggcctgacaacgcactattataatctgaaaaataatttggtgccaaagcaggcggtgacattctgtacgattcatgattatattgcgatgaaacttatcggccggaaaaagccgctgatgacggcaggcgacgcagcaagctttggctgttttgatgtggagacgatgtgctttgatgctgcggcattgaagcgggcaggaatcgacgcatcagtattgccggaatgtacagcaaatttttcacttgtcggaactacagcggagaagataccggtagctgcggcgattggagataatcaggccagtgtgatcggagcactgcgcagcatggaaaaaagtctcctgatcaatattggaacgagcagtcaggtttcgatgtgcctgacgcttccagaagccaaaatgcgaaaagaaatgcagagaaaattgcagcaggcaggaattgagctccgtccggtgtgcggcgatctgtttttgctggtcggagccggtctgtgtgggggaagagcctatgcacttctggaacatttttttgcaagaacagtagaactgatgaccggaaaagcaccggaaaaccagctttatgagcggatgaatgcgctgctagcagagcgggggctggaagatggcgatctgaagatagatacgcgattttgtggtacgcgcgtgaatccggagcgaagagggggaatcagtgggctcggtgaaacaaatttcaaaccggaagagtttacgttcggcgtattgcgcggaatggcagaagagctggatacattttatcaggaaatgcgaaaagatggagcagggacaccagagtatctgattggcagcggaaatgccattcgcagcaacccatatctgcagagaatttttgaaaaactgtttggaatggagcttcagattccatgtcaccgcgaggaggctgcctccggagccgcaatggcagcgatgacggcagctggatgtgtggattccctagagaaggcgcagagtctgatcgcctatgaaaagacacaaaaataaagaaaacagtgatggaagccggaagggcaaaatggattgtgaaaggctgttttgactgagcggcggaagatacaaaagccgcatggcatcaaaagatgtacatgcggcttttttcattgcaaagaaatcaattttcttttgcaatgttatcccccgacaataagttctcaaaaaatctaacggccgttgccgtctgagagcccctgcatgtatgcaagtgcacattttcgctgatctgctgacagcgatgtaaaaagtgtaagacactctgactgctcaggtgtcagtcccgtaagactgcgatccggctcaaaaaaatcggttactgaaataccgaaaccttcgcacagttttaaaagtgtgggaagagtaggcatattctgtttgttcagcatagtgctgagcgttgaatatgcaataccggatgcttttgcgagctggtaacaggaccagccgcgttcttcacaaagttcctgaattcgttttaatggatcaaagttgttcatattctgcctcgttattttctgccaaattaatacttctatgttccataatatctcaatttgccaaaaacgccagatagtaatggacaaagtaaatataacggattaacaatgcccaaaaacaggcatcttttgcgggtgaagaagtttattgtcatgggatttgcagtagcattttcctattataagatggaacgcgaaaaaggtcaaatgcaggtgaacattagtcgtataatgtggattcgtgggtcgaaatggcagcgatctgaaagttggaaaagaaaatactttttatatatggtatcaggaatagtgaatacgtaaaaacattgatttttgcaggctttcgatgaaacagtttcttaaataagtaacagtaaaatgagaaccagataccgaaaagaaagaaagcgacaggagagaaagacagaaatgtccgaaaaaaccatacggatttatacagaaacttagcggacaaaagcacatagaagcacatagaagcacatagaagaaagagaatctacctattatataaaacatttcaaccggtcaaacaggaatgcatataaaatagtctgaaatgtataaaaaatagatataaaacataaaatacaaaaaaattgaaaaatttcaaaaataagtgttgacatctgaggaaggtggtggtattatgtaacacgtcgctgcggaagacaccacagagacacagaaaaagccg

SEQ ID NO: 2013 - DNA, 4800 bp, Unknown
  16S sequences of unknown bacteria
ctgagctatacccccatatttggttgtgcggacgttccgttcaaggaacgtgagtattatagcacagcctcttttcaattgcaagcctttttttaaaaaacgaggggattttttgaactgggggtgttggccggtgctgctggggcggtgacggaggcagcagggacagcaaaagtggtacaagcgtgggaatgttccgaatcgtgaatcggcagattttgcatacgaggggccgcagccaggcaggcgggggcgagaataggaggctgcaaagcaaacgatgaaaatggaagatcctagggaaacgggagcgttcatagaaaatttacagcagggtaatttttccttcattgcaagcgggaagaaagtgtggtatgatggtaacaatagagaatagcggctgcatttgcgccgctgtaatttggcaggaggagtcgagatggaccaaaagccgaaccagacgccgaagcggtttgaccaaaatcaaaaccggtccgacgggccgaaccggaaccagaaccaaaacggcggtcagaacaacaataacaaccgttcccagtttcagcgctacctgccgctgctgattatcgcggtgctcttcacgctgctgctcaactccatcgcgacccgcctgcagggcagcctctacgaggaaatcacctacgatgcctttttgcagatggtggacgacggtgatgtctccaaggtcatcttcgaatccgaccggatcgacgtcctccccaaggaccaggcgtccgtcgctgagaaccggcagcagtggaaatacacaggcctgatccccaatgtggagctcaacgacctggtgtccctgctggatgagaaaaaaatcacttataataatgagatcgtcgagcccgtctcgccgattgtcacttttgttgtcagctggctgctgccgtttgcaatcatctatctgctcttcgggcttttgctgcgctccttgagcaagaagatgggcgccggcggcctgggcggcatgggcggcatgggccagagcaaggcgaaggtctatatggaaaaggagaccggcgtcacctttgccgatgtcgccgggcaggatgaggcgaaggaatccctcgtcgagatcatcgactttttgcactatccgaaaaaatatgccgagatcggcgcgaagctgccgaagggtgcgctgctggtcggctcccccggtaccggcaagacgctgctggccaaggcggtggcaggggaggccaaggtgccgttcttctccatctccgggtcggactttgtcgagatgttcgtcggcgtcggcgccagccgggtgcgggatctgttccagcaggcggcgaaggtcgcccccgccatcatcttcatcgacgagatcgacgccatcggccggacccgcgattcccgcttcggcggcaacgacgagcgggagcagaccctgaaccagctcctggcggagatcgacgggttcgattccagcaagggcgtcgtcatcctggcggcgacgaaccggcccgaaattctggataaggcgctgctgcgtgccggtcgatttgaccgcctcatcgtcgtcgaccggcccaatctcaatggccggtaccagaccctccgggtccacacccggaatatcaagctggctgaggatgtcgacctcaacaagatcgcccaggcaacagcgggcgcagtcggcgcggacctggcgaaccttgtcaacgaggcggcgctgcgggctgtccgcaagggccgcaaggccgtgacgcaggaggacctgcttgtctccttcgagacggtcatcgccgggacggagaagaaggggacagttttgacggatatcgaaaagcgcatcgtctcctatcacgaggtcggccacgcgctggtggcggcgctgcagaagcacacccagcccgtctctaagatcaccatcgtcccccacacctccggcgcgctggggtacacgatgcagatgccagaggaggagaaattcctcagctccaaggcggagctcctcgtcgaattgcagaccttgctgggcggccgcgccgccgaacaggtcgtcttctcgacggagacgaccggggctgccaacgatatccagcgggcgacggagcttgcccgcaagatggttatgcagtacggcatgagcgaccgcttcggcctgatggccctgtccgagacaggtaacgagtatctcgacggccgcagctatctcaactgcgccgatacgacggccgctgccgccgatgacgaggtccagaagctgctgcaggatgcttttgaaggcgccaagcagctgctgcgggagcatcgcagcctgctggacgaggtcgccctgtatctgctgcagaaggagaccatcactggcgacgagctgatggtttacgtcaatgccgacgccaagagcatcccggatcacaccggcgacgaacccgtcgacccggcttgattcgctgcggcggcgattgcattgcaatataggatcctaccccaaccaggcctgcacccggttggggtgtgatgttatctttcccgggaaataggccaggaggtttgcatggactggagtaaatggaagaagctgttttcgcatatctccgtggaggagattgttccggcgctgcttgtgctggtcgtcggcctgatcgtcatcaagctgctgctgaagctgctggatacggcgctgcgccggtcgaatttggaaaagactgcctatacgctgctgcggtcgtttctgaaaatcctgctgctggtcgtcctggtgctgattctgtgcagcatgatgggcgtcaatgtgacgagcttggtggcgctgctgagcgtcgtcaccctggccatttcgctctcggtgcagaaccttttgacaaatgtcatcagcggcatcatcctgttggggtcgaagccctttaaagtcggcgattttgtcgagattggcaccaacagcgggacggtccaggcgttggggatgctctatacgaagatcgtcaccgccgactaccgcgtcgtctccatccccaacagcaatatcacggccaacgagatcgtcaaccagacggccggcggcaagcggcggatcgacatctccatcagtgcgtcctatgacgcagctccggagcaggtccgggcggcgttgctggaggtcgcggggcaggagccccgggcgctgtttacgccggagcccgccgttcgggtcatccagtacggcgacaatgccattgaatacagcctgcaggtctgggccagcgcagaggattattggcccgcccgctttgcaatgacggaggcgatctacgccgccttccgggaggccgggatcgagatgacctatccgcatctcaatgtccacctgcaggatgccaaatagaacacccgcgcaccggtgattttttaccggcggcgagcagaccaatcgaggaggaagaaattatgacaaagacattgatccagtccggcccctgccggtttgagacacgcgtcacagcggagcgtgtcgccaagcgaaaggtgaaggtcacggtcgagacccagtgccccaatatgcagaagatgttcgccggttgggtcgccgaaaacggcgacgagctggacccttataaattctgcatgagccgccccggccaggacgcgctgcatacctacgccgccgcccatctgcccccccacgccgcctgtcccgtcctggcgggcctgctgcgcaccgtcgaagccgaagccggtttgtgcgttaaggcggatatgtccgtaaaattcctcgacgaggaataagcgtttttgggatttgcacttacatattataaaagtataaaacgcacaccaaagcccgcagggaccacccccccgcgggctttttgcctcgtgcgacgcgcacgaccaaaggctcccctgaaaggggagctggcacggcgctaccgtgactgaggggttgctcctgcaagtttgcactgcaccccaagcggcgctgggcaccaaaggctcccttgtgtatgggtgagactccaagagcgcgcagcgcgattggtcaagtcgaacccatgcagcgcaaagggagctggcacggcgaagccgtgacttgggtgagactccaagagcgcaaagcgcgattggctaagtcgaacccatacagcgtagagggattgcttgtcctttcccgcgtccagctccagcggcagcgtaaatgccagcgtcggcgtgctgccgcgccggatcgcaaattttggtgtcatgccttgcatcgctccacctcctctttgcgcctagtgtatcatatttccccccggcaatgtcacacccccggcaggcggttcctgccgggggtgtccgtttaccacggtgttcctttgagattatagctactgctggccacgtgcaccaggctgtccttctgctccggcgtaagcggaagctgcgcaatgtaggcgtagaccttcggctttcgcgtgtttcttttgtacccgccctctccgtccgggtcgccttcgatcccgtccagatcctgcttgtacttggcaaactgtgccgccggaatgcccgcgccgtacttcgcgtagctgcttgcgatctttttcagcgcctcgtcaccgtacctgtccgccagctccggatgcttcccggcgaagacccaggctgccgcctgcagccgcgcttcctcctcgtccttgccgccgtactggtgcagccacttggcgacgttcttttccgtcacctcgccgtcctgcagtgcctcgcgcagctcgccgtaggcatagccggtctccttctcgcaggtccatttcttcacggtcgactgcgcggcctccttttccttgccgccgtacttct

SEQ ID NO: 2014 - DNA, 20763 bp, Unknown
  16S sequences of unknown bacteria
ctgttccgcaacctcaatcgtcgtctttggcactgccgtgccaaatcctcgtttcggttgacggctgtcagtcgctaactgccttcggcagttgcatccactggatgcccgctccttctcgccgccctaaaaccccggcaggcaccgcagggaaggcgcaaggcgggttgcccttgggcaacccggtctgcctttggcagactgaacttttcaaatagaatttgaaaagttcaccgtcgcccggtgggcacaaccgccgtaggtggttagcgacccgcaggtgtgacacgaaacgagcaggaactacggcagtagtccctgcgacgattgagtggcagcagtgcctcctgtacctccgcttttgttttaccatcaaacgccaagggaagaaagggatgttctgatgaagagctattccactgtgatctttgatctggacggaacactgctgaatacgctggaggatctgaccaacgccaccaatcaggcgctgcgggagtgcggatacccggagcacaccatggaggacgtgaagggcttcgtgggcaacggcatcgggatgctgatccgccgggcgctgccgccggaatgcgacgcggatccggaggcctacgaaatgacactgcaggccttcaagcggtactactttctccacaataacgataccaccgcgccctatccgggcattcccgagctgatcgacgcgctgcaggaaaagggcctcaagctggcggtagtctccaacaagaacgaccccaacgtcaaagccctgtgccagtattatttccccagcattccgctggccgtgggcgagcgggagggcatccgccgcaagccggagccggacacggtgctgcatgtgatgaaggaatttggcagcgccaagtgtcacactctctatgtgggcgacagcgacgtggacgtgcagacggcccgcaacgcgggcgtggactgcgccgccgtgctgtggggtttccgctcggaggaacacttgaagaacgccggggccaggcatctgttccgcagccccaaggagctgtgcgactggatcctgtcccatcaggcggaatgagcataccataaggggatgtggggcgaatgaaattttcgcctgatgtaatggggtgtgataaaaaagaaattaccaacgccgctgacgaatggtgcggagtggtcctacgcccgctgcaccagcacacggtaaagctcgccgttccggccccgaaccggctgatagggccgggagtcatcccggggcggtgcgccccgcatggcgtaggctactcgacagacccggctgtctttgatctgacgaccgatccacagcccgtccccctgccgggacacccgcatgaaccgccagcccggccagtcgaagggcgcgtccggcgggcatttgacaaaatactcccgaagcgatcgaaacgctttcggccattccagattgggaagccgtcccacgggtacgcccgcgcgggacggctttttttcgttggccggctccggctgcgggggaggtacggcggaagtcggcgcaacgctgtcctgccgggaaaacggcgcggctttcacgggccgctccatggcctgcacgtagggcgcgggatccagcgctgggagaaaaatttcccgcggaagggatttttcccgcgctggggttggggcggacacgggcttggaggacgcatcaggcgcgaaaaccggcgcttgggcggctgttggcgtgcgactctccaatgtttccttgcgctggacgggagcgtccgtcggtttcggttcgaccggctgacggcgtttgaccgccgcccgtgccagcttgtcgcacagggacagactggcgtttttcgcgtccagcaggctcccggcgctggtctcggtgcacaggccgatgagcaggggccggggcgcgacgttgttttccaccacgatcagcgcctgcagccgttccggcgcgtaaaggccgccgggagcgggaccctccagcgaagcttcgccccgggcgttggcggcgcaggtccccagttcccgggcttcgccgccgctggaataccagaacgcccgaacgccttcgccgggcgcgcctcggacgttcagctgcacccatgcctgtccccgttcccactgcatccgggcaaagccgctgacccccgtccgcatggggcgcagcagcagaaatttttgatgaagttccgtcatgatctcttccccctttggggcagactatgcgtcctgcaaggtgctttatgccgcacccttccgtccgccgcgcataggctggcaatggaacgccgcttttttcggcgtgcctgacctttgaatttcaggaggaagagattccatgaatgatctgcattttcagcccgtcggcgcgggaatgggagagggcgcggccgtccgtatcggccgctgcgccgaggaaacgcccgccggggagacccatctttattttgaaccctgcgaatccatcaaaagcgtccgaatcaccgaaacattgcccgacagcgaaggcaggatgctggacgtgactatgaccctgcagaatgtgtgcccggggcggcgggtcttcgtgggcctgagcgcccatgaggtggtggaaggaggtgcggaggagctgcgcgggtttcgcgcccttaccctgcccgcccaccacgacggcgctgctcacgccgtggacgccccgcccattcggttcattctgcccgaagaagggagccatcccggacggccccggcatttcgtcctgagggcctatgcccactacgcggatcaggcgggatgtgaggctccgtgattcccgtccgaaaattgattcaggtgtttcactccatgctgggctggccctatgtcacccccggcaccagcaatgccaaggggatcgactgctccggggcgtttgtgtacgcctaccgccagtttggggagcgtatctaccacggctccaaccggatcgcccgcatctactgccgggagatgaagcgtgtgaccgcctccacccggctggaaccgggcatggcgattttcaaaagccgctccgacctgagtcggatgaagggcgaatacaagcccggcggcgcgtattacgacccgaatctgacggaggatttctaccatatcgggctggtggtcagcgtagagccgcttcagatcatcaacgccaccccgcccaaggtgcggatcgacgaccggctgtcccgctggcagtgggccgggtatctgaaagccgtcgattactcccccgctgacacggagacgggcgagacctgcgcacaggtaacggcggaaagcggcagcacggtgaatctccgcaaaaagccctcgctgaaagcggcggttctggccaaggtaccgctgggccagcgggtcgccgtccgggaaaagaccaacatggaatggtggaaggtggcctatctgcaatttaccggctatatgatgcgcaaatttctgaaaaccgaggaaggggaaaattcctgaaaaagggggtgaaaaaaggggaggcgcatttctgcacctccctttttcagtagcccgccttaagcagcgatcttcttttcttttttgaaatggccggagaatttctcccagcgcttgcggcgcttttccttgatggccagccggtcgcccagatcgcgggcgccgacgccgtagaccagatacaggatcaagccgctgacgatcatgatgaacaccgtcgacgcacagcggcggccggaggcgttcacgttgtagccgtcccggccttcctcggcgcacatgttctggatgaccatggcgtagctcttgccgtagctggaatggaaggtggcgctcatgtcgtactcggtgaacagggcgttgaagttcagcgcgaataccgccagtacgctgggcaggacgatgggcagcttgactctcaggaaagtgaccagcggactggcccccagattccgggccgcgtcctccagctcctcgtcgatggcgtagaaggccgccttgatcatgcgcagggcgaagggcagcttcaccaccgtgtaggccatgacgatcaggaaccgcacgttttccttccagtacaggttgttgttgaacacataccatacgctgtcggagttgaaataggtgcggtaggaatagcagatcaggatggtgggcagcagccacgggaacagcaggctgtattccagcaccgtggaacgcttcttgcccttgttcttgaagatgtagtttaccgccactaccacgatgacgcaggccagcgccgccgcgatggcggaaagcacgaagctgagccggatgccgcccaccgtgtccgcgttggcgaacaggccggagatagagcctacgcgggtcttcagcttgccccggttggtcaggaactcatagtcctgctggccgaagaagttgatgagcgtccactggttcatgtccagcgacttggcacggatggcggggtagttctggaaagagaacagcacgatcatgaccacgggggtcatgtagatgaggaacagcacataggcgtagatgtgcgcgatgacgttcatcaccgggttctgaatcttctgcttcaccagcttggccttggtcttggacacgctcaggtagtggcccttgcgctcgtaggaggacagggtggtcagcaggatgatggtgaacatggccaaaatgatgctcagcagcgcggcgcgggcctgagggaaggcttcgtccgccacggaggaaccggccagacggacgatctccgggttgatggagtcatagcccagcagggtaggggcgctcatggcgcacaggccggtaatgaaggtcatgaccgtcaggctgaacagggtggggatcagggtggggaaaaccaccttcatcagcaccttgaagggcttcgcgcccagattgcgggccgcttccacggtgttgtagtcgatgccgcggatggcgttgcgcaggaacagcatatggttggaggtacaggcgaaggtcatagtgaacagcaccgcccggaacccggagaaccagtccttgttgaagcccgggatcacattcgccagccaggtagtcagcatcccgttggaatcatacaggaacaggtagccggtcaccagcgccacgccggagtagatcagcgtggtcatgtagcccagccgcagcaccttcgcacccttgatgtcgaagtactcggtcagaagcacgatactgatgcccacgaaattcaccgtgatgaccagcgaaatggccagcttcagggagttccatacatagctgggcatgttgcccgcaaagaagaagcggatcacggccagcgggtcggtcttgccgtccgcacctttgacggtgaagatctgcgtgatggtgttcaggcagggaagcagcatgaagccgaagaacagatacacgaaaaaggcgatgccgaagaccttccagatgtactccggcttcagccatgaggctttctttgtcatggttccgcccccttacgcttcggcgggcgcatcgtaggacatgacgtccgacggatggatgcccacggtgacggtctcgcccggctcgtagatgttgatgccgtcgttcttttcgatggccttgaggatctgtccgtccacgcggatgtagtacttgatgtacaggccgtagtattcccggctttcgattacgccctgcagctgcagctcgtcgtccgccttgggccggttcacccgcagacgctccagacggatgaaatgatgctgattttccggcagcttcatttcgccgcagatggtctcctccagccggttgatgtcgccgatgaagttgcagacgaactcggtcttggagtgattgtaaatttcattgggcgtgccgatctgttcgatgtagcccttgttgaacacggcgatgcggtcggacagggtcagggcttcctcctgatcgtgggtgacgtagatggtggtaatgccgaaatcccgctgcatctttttcagctcgttgcgcagctgcacgcgcagcttggcgtccagattggacaggggttcatccatgcagatgatggaggggcccgtcaccagcgcgcgggcgatggccacgcgctgctgctggccgccggagagctggctgacggcttttttcagctgctcgtcggaaaggtctaccttccgggcgatgtcccgcaccttctggtcgatctcggtcttgttcagcttctgaattttcaggccgaaggcgatgttgtcatacaccgtcatggaggggaacagggcgtagctctggaacacgatgccgatattccgcttttcgatcggtacccgggtaatgtccttgtcgttgacgctcaccgtgccgctgaccggctcgatgaagccggtgatggtgcgcagcgtggtggtcttgccgcagccggacgggcccaggaaggtgaaaaattcgccttccttcacgtccacgttgatgttgtgcagcgcttcaaaatcaccgaatttgacgataatgtccttcagttcgatcatggggaaaatcactccttgatgcagtttgtaaaaaacgcagggaaaaccttccgcgggcttggaatgtgggaaaggctttccctgcgttttttgcatagatggtcgttgggggaacccgccgacggcaggttcccccattggaacggaatgatgattccgctgcttattcagcggccttctgggtcagagtgtcccactgcaggttgtcccagtcgggttcggcgggagcctgagaagcgtcggcccagtagaagccgaggttggtcatgatgttggtccactcggcggagtgagcggccacatactcggcgtaggtcatatcggtgccttcgaccttggtcagggcgaagttcttgatctggtagatggcggggatgtcttcgccgtagatttccttggcggcaacctggttgcaggggaaggagtcgaactcgtcgctccaggcagcctgcacttccgcggagccgaaccagtcggcaaaagcggtcacagccttggtttcttcctcggtgcggccttcgcggttcaggatgcccagatactcggcgatgtagtaggtgccgtcggcgatgtccaccagcgcccagttttcaggctccatggtgcccttcaggggatgatcgctttcagaggcggcctcgtcgatcttgccgtacagagaagaggaatagaaggaagaaacctgcacgtcgccgcggttcaggggcgtgaagccgtacttgtaatcgtcgccgccgctcttgccgccggcgcagtaggcccacagggtcttccagccttccacggtgatgccgccggcagggctggtgggatcggtgaaggggtacagcatggcgctgttgatgttggcgttggtggtgccgccgaccttgttctgacggtaccaggtgtagccggagttcaccacgtcggcccagtggtcgaagtgcagctcggtgccgttggtgcccagttcgtcgttgcggtacagcatcagcacgttctggatgaccagaccgtaggccttgccgtcatacttgtattcgcccacttcttcggcccagtcggggttccagtccatgatggacaggttctcgtaggtgccgttgatgacctgagaccagcgggtctcgttcaggccgaacaggatgtcgccgtccttgttctcattggcggcctgaatggcggcggtgtcgccggagatgacggagttgtcgtcaatgctgatggtgaagccggcgttcttggcctcgttgatcagccagttggtgcgctcggtggagttggagttggagtagatgcggatggtatagccggagtagtcttccgcggaagcaaagctgcacaggctcagcaccatgaccaacgccagaacgatagacaaagtctttttcatggtatggatgttcctcctttatttttccagggaactttttctcggttccgaatggtgtccctattataccacattgtaaaatcggtgtaaagtgacccaaaaagaataagacaaacgtttgcgataaattttctttttcgccccggacagaaaaaatggacaaaccggcgtagaaaaatccgccgcatcctccgggcttgcaagcccccggaggatgctttataatatatgatacgggactttgtgtcccgatccccctgagccgcttcggcttttggaagcggctcccaaggcaaggaaggatggctgcctgatgcaaaaaaaccaaaacgtatttctgttttatgtgcgcgtgctgctgtattgcctcgtcgcactgctgatccgggcggcggcgctggctccgctggcggcgctgtttgttttcccggcggattccctctggcggtggctgtgggtggtctccccgctgatggtggtgtttctggtgcttccgctgcggttttccttcgcggacgcgctggtgcagcggccccgcacccgggatttttccattgaccgggcgttgagccttcgccagtacggcgaaaagctggcggaaagcctgcgccatgctttgagcgtgctcaaatgggccatcccgctggccgggctgggcgcctggggttattatttgaaggaacagtacaccgtcaagggcctgctggacggcctgcgggagctgggcaagaacgtctccggcacgtggtacgcggtggtgaatttcttccggggactgttcggccatctgccgctggaaacggtggagggctcctatatgcagggcgtgtataccgtattgacgctggtggggctggggctgctgatcctgttgtacggcgcggtgcgcaacagcgccacccgctatatttgggccgtggccaaccatgaagaccgcccggtgcgccgggagattcgccgccgcctgcggggccgccgcatggcgcagctgggcactgcgctgtgcaatctactgctgtgtgttcccttcctgtggctcgccgctctccagttgaaggatacgttcctggagctgtgccagcagctggtgctggccatgtcgtggaacggccggccgcagatcagccccgatgtggtcaagactctgctgccgctgacgctgaccttctttttgacctatatgcccctgcttccggcgcggcgcatcctgaccgccgcctttgccgtccgggaaccccgtcacactgcccctcgcagcggacagccgatggaggaagaccctaccctgcccaaggccatcgtgccggactgggtgcgggcggaaaatgaggaaaacggcgcttccgaccgaagcgcggacgcgtaagccatgcggctggatcgttatctggcccagagcggggaacgaacccgcagcgaagcggcgcggctgctgcgctccggcgcggtgcgggtcaacggcgagccggttcgggacggcggctttcatctgaagcccgacgaccgggtggagctgatgggacaggccgtggaggagaagcgttaccaatacctgatgctgcacaagcccgccgggctgttgaccgccgctcgggacagccgggcccccacggtgatgcagctgttgcccgaaagctgcgcccggcgcaaggtgctgcccgtggggcggctggacaaggacaccacggggctgctgctttttaccaacgacggcgagctggctcaccggctgctgagcccaaagcgtcacgtgtggaaaacctacgaggccacggtgacggggcggctgaccgctgccgatgaagaggccttcgcccgaggtattaccctgtcggacttcaccgccctgcccgcccggatggagatcctctctgccggggaggacgaaagccgcgcccgcgtgcaggtgcgggagggcaagtttcaccagatcaagcggatgttcggggcgctggggcacgaagtgacggccttgagccgcctgaccttcggtgcgcttcggctgcctgcggagctgccgccggggcagtaccgggagctgaccgaggaagaactgtccgccctgcgggaagaagcggggctgaccgagtcggaaaggaacgaagatgcctgaccattattatacccaaacgcccaccagcgcccacaagccggggcaggtggacttcctctggcggggggcgaagctcgtctttgaaacggacagcggcgttttttcccgcatggagatcgacaaggggacggagattttgctaaacgccctgccggaagagctgaccggcagcctgctggacatgggctgcggctacggcgtgatcggcgtgacgctgggcaagcgctatccgggcctgtcggtcgtgatgagcgacgtaaacgagcgggcggtggaattgagccgccgcaacgcccagcgcaacggcgtaccggcccgggtcatgcagagcgacggctacgcggacgtcccctttcagcggatggactggatcgtgcagaatccccctattcgggcgggcaaaagcgtgatctacgccatgtttgccgagggagcccgccgtctggaaccaagtggcgagctgtggctggtgatccgcaagcagcagggtgcggagtccgccgtccgctatctgaagacactgtttggccgggtggaggccgcgaccaaaaaaggcggcttctgggtgctgcgctgcacgcagcccgcggaacggcccgacgaggaatagtatccattagaaaaacaaaggagaagctgggacatgaagtacgatcgttctttttttgacacaccggtggatcggatgggaaccaactgcgaaaagtgggatgcgctgcgccgccgggaggggagcgaccttctgcccatgtgggtggcggatatggacttccgctgcgcagacgagatcgttcaggcgctgaccgcccgggtggctcacccggtgtacggctacaccgagcagagcgacgcggccatcgaggccatgctgggcttctttcagcgccgccacggcctgacggtgacggcggagcagcagctcatgctgccctgcgtggtctcgggaatgcgggcgtcggtgctggccctgaccgaacccggcgacaaggtgatcgtgcagtcgccggtctacggccccttctacgccagcatccgggacggcggccgccagctggcggactgcccgctgatccgtcagccggacggcggctaccgcatggatctggacgcgattgagtccgcctgcaaggccggggccaaggtgatgctgctgtgcaacccccacaaccccgtggggtacgcgtggtcggaggacgagctccgcgccctgtggaacgtgctggaacgctacggcgtgtggctggtctccgatgaaattcatgaggactttgagctgaaaggcaaggtcacgcccttcctgcgcatcgtgcaggataaaaacgcccggctgctgtccatgaccagcgccagcaagaccttcaatctggccggattgcagcaggcggtgctgctgacccgcaatcaggagctgaaaaagcgggtcgaggagcagatgcacagcacgggcgtgacgcagggcaatattttcgccatgaccgccacggaggtggcctacggccagtgcgacccgtggctggacggactgctggactacctgcgggaggcggagaacctgctgcggcgggaactgaacgcccggctgcccgaagcagtgctggcccccatgaatgccacctatctgggctggctggatctgcgggcctacggctttaccacggcgcagctgacggagcgcacccacaaggcgggcgttgccttcagcgagggcacccgcttcggcggcgaagcgggcgagggcttcctgcgcttcaacttcgcttgcccccacagccagacgctggaagccgtcaagcggctggaaaaagcgctgaaagcctgatttttggatcactgcggaaacggaggaagatttttatgaaggacctgaaccagatcattgaccaactgcaggacaaaatgaacgaactgctggatcgctggctgcgcattcccagcgtccgggcggaggaaatccccggcgcgcctttcggcgaggagacccgcaaaatgctgaccgtggccctgaacgatgcgaaggccatgggctttgatgtgcgggacttcgacggctatgccggcgacgtgcgcatgggcccggaggggcaggatccgctgggcattctggcccatctggacgtggtgcccgccggggacggctgggacaccgatccctttgagccggtggtgaaggacggccgcctgtacgcccgcggctccggggacgacaagggccccgccgtggcggcgctgctggccatgctggccgtgaaggaagcgggcattcccctgaaccgggaagtccggctgatcctgggctgcagcgaggagacctcgtgggacgacatggcctactacaagacccactgcgatatgccccgcacgggctttagccccgacgccagctatcccatcatcaacaccgaaaagggaatgctgctggtgagcctgcggtctccctatgaaaagaacgggctggtgcgctccattcgagtgggcgaacggcacaacgtggtgcccggcgaagccagcgccgagctgaacggcggcgaagaactggccgctaaggcgctggaagcggcgaagaagctgggcttcgaggcggatacggctgtgaatggcgataccgtccggctgcacacgttgggcgcgacgggccacgcggcctaccccgaagcggcgaagaacgcgctgggcgagctgctgctgattttgaaggagctgggcgtgaccggcggtctgcgcacgctggccgataccgtgggcatggaatacgacggtctgagcctgggcatccgctgtcaggacgagaccagcggccccctgacctgcaatctgggcattctgcattacgatgaggaaaacggactgtacgccacgctggacatccgctaccccatcctgtgcgaccacaaggccctgagcgccgccctgaccgccgccgtgtcggacggcctgaccgccaccatcgacagccagaaggagccccatcatgtggcccccaattctaagctgatccagtgcctgctggacgcttatcacgaggtgacgggtctgccccgggagtgcctgtccaccggcggaggcacctatgccaagtgtctggacgagggcgtggccttcggctgcgtgttccccggcgaggaagaactggcccatcaggccaacgagtacatcacgctggacagcatgatgaagaacgtgcgcatcatcgcccacgctatcgaaaaactggcgggcgaataagaggacgaacagtcataaaatacaatctgccggttatttttgcaggcagattgtatttttatttttttcggcaggattcctacggaaggggtggtacgcaagttgaatttcatatatcgatatggtataatttttgctaatatatcgctaagactttgtcaggtctcatccctgacaggcgaggaaatgttcaggtaagcaagcgatgaagcttgctttgcaggtggaaagggagcggacggttccatggggaagaagcgtaagtgtcagaaaaatctttttatgaagatgattctggtctttatttttttgcatggtgatgttattcggcgcggtgcaggcgcttgcggacgatgcggctcctgcggcgaatactgcgaccgtggagtgctatgcgctggtcagtggcgaatggaagctggtcacggtggaagaaaccgtccagcagatggccttcggcagcaggacgcgctactatatcaccgcggatgagttggaacagatttacggtgagttcggtttctccgccgcaagctacgccggggagcgcatcttcccccatacggacatgaacgatgccagcctgatctgggcggacgcggcgccggtcatcgtggacggccagtggcgcattccgctgagcttcctcaatcgcattctgctgttctatctgcccggaaacgtgcccggaagcacctcgtacttcaccacatcggtcaaatcggacaacgcggcgatgattcaggataataatttctacagcgtgaccgtttccgacccctccggcattgcgccggaggaaagccgcgaatggtatcagcgcacgggcaccgaggtgaacgtttctctgcccctttccgatacggccagctggcatacgctcaataatcagcggcagcaggaggttacgccggatgagacccgcgaggaggacggcagggtctattatcattttaacgcgatcagctatcctatcaagtttaccaacgccagcgggcaaatgggctatacaatccaatacaacgccaataccgtgaaggattccctgtatacgctgggcagcttgacccaaagtcagcagaaggtggaggcagaaggctctatccttggcggagaaagctggcaggacgtgtggaaacccggcgatcagctcattctgcgggacgtggacgagaaagacgcgctggtttcgatccccggctccaccaaaaatcaaaaatactattaccgctttgcgggttggcgggtaggcacttccccgttggtagtgaatgccggggaagaactggtccgcagcgccattctgtgcaacgagcgcgacggcgtggtgaatctttatgctcagtgggtggcactggataaaaacgagcgaatcaattccgcaaatttctacatcaatttggcttgcgagatcgccgacaacatctccagcggtttccagtcccagccgaaggaaaattttacccgctgcatttatacggctccggtattgggggcggatgatctccccatcgtggcggggcagaaaaagaattacgtcctgcttgctccgccggattcggcagccacggctcacgagacggacaaaaccatccgcgccatgaagaccacgccctacagcggtgtgaccatcggccattttccctcagacgaggatgtgctggcgcatatccgggaaggcggctatactattacgctggacggccaaacgctcccgtcggaaatcatcacgtcggatcactttaccgtccgctggtacgtggtcaaatatgaatcgtcggacggctggcatgtggacggcattctggtggcgaaggaggccaaccttcgcgtgaccaaaaccttctccggcgataagacggctgtggaagcggtcaaaaacggcggctattccatccttgtgacccacgacccggagcaggaaaacggaaccgttaccgactttgagctgtgtctgcagcccgccggacaggagacccggtcggggcagaccggctatacggaatatgacccctccacggatacatacacgtggatcctgaatgggcacccgctgcgggagtataccctgtcggaaaggaattacctgccggagggcgaatggcacaacatcaaccgttaccgcgtcaccagcgccgccggtacgccgtcccgctgggaagcttacgacgctgcggaaaaggtgaaggtggtggcggagtcctacgccaacgacctgcccacctcggcctaccagacggtagcgttccagaatatctatacgcaaaggcacattctgacgctgttcaagatcgacgcgttcacccacgcacccctgcagggcgtggaattcaccctgacccggacggacgcagccctgcagctgacccgcaagcccgacaccagcgaatactgcggtgctggcgactttacggagccggtggcggatgatcggatcgttaccgacgccagcggccatatgtacctgcatctggaagcgggcgattacaccctgaccgaagtttcccccgagggctacatcagcgcttctgccatctgcttcacagtagaggacggcggcgcagtcaaggccctgaccgataccaatggtcagcctgtctccgacgaatacgccagcctgagcgatacctcgctgattacccttcgcaatacttccgagcagctgttcaccgtgacggtagaggcggattgggacgcgtccacgcctaccggccagcaggtgccggtagaggtagaactgtggtgcgacggcagaccgctgtatgccgccactggcgaaagctacaagtgtgtgctgggggaaaacggcgggacgtatacgtggcaggatcttcccctgtacgtcaacggccatgtggccgcctacaccctgcgggaaaccaggatcggcagcgctgcctacgacgcgtccattcagcctaacggctataacgactacctcgttaccttcgacgacgcgctgtaccgcgagaccgagaacgacgaatatcagaaggacgccgtctggaccggttcggacggaacgctccactacgcgcgccacgcgctgctgcgggtgcataacaagctgaaggatccccccgatgagaaaaagatcgacatcaacggcgtgaagcgctgggtcggcgacgatgaagcccagcggcctgaatccatcatcgtcttcctgtgtgaggagggcaaggacggcttcatcgccagcacggtcgtgaagcccaacgacgagggcctctggctgtattccttcaacgacctcccggaaatgcgggacggccagaagatccagtacgtcattcgggaagcgcctgtggagaagtatgagaccaaggtggaaggctatcacctggtgaaccagtacattacgccgtccccgtcgcccagcacgaccccgagtcccacgcccgaaccgagtgtaacccccagtcccacgcctgaaccgagcgtgactccgagtcctacgccaacgccgacttccgtccccagccccacgcctacagcgccttatacaaccccgaaaaccggggatgaatcgccgatggccctgtggctggccttgctggccgcaagcgccgtcctgctgggctggagcctgcggaagcgtaagcacggataagaaatttcattttcaaaaaatcaaagcccggacggttcttctgccgtccgggttttctgctgcaaaaatgaagaagaatggcgggagaggcgcaggtcttttccatctgcgcgggcagtgctattccccaccctgctgccagcaggagcagcccggcccgtagtccgggcgggaatgggtcgtgaccagaatcacatcgtcgccgatgcggcgtacatcctcccaaggaatgaccagcccgcatttttcgccgcgcagggattgcagaaaggaagtctcggacggcaccaccagcgcggtaatgcggctgtcctccacgctgaattccagatccatcaccttgcccagccgccggccgtcctgcacgtcgatcacctctttggtgcgaagctccgacagcgtcaaccgtctgcctcctttcttaccctgcgtttatgggggagtactaacagcctatgcgccgaaaaacggaaatgtgcgctctatgcccaaagaccccgtcctgcccggagaagaacggacaggacggggttcgtcagcagcgattatgcggcgtttttggattttgaaatgtgacttttacggctttttccgctcccgcagggctttccagtccacccgaccgtcgggcagaaaggggacgccttccccttccaacagggcgcggcgcagttcggattgcccgccgccggcaatggagccgtccgccttgacgacccggtgccacggaagttcctcagggcagcggcgcatggcccagcccaccatccgcgccgcccggggacggcccagcatttgggcgatctggccgtaggacagcgcctgccccttggggatttgcgccacaatggcgtaaacctgctgaaaaaatccgttttccggttcggaatttgctttgcttgccatgtttttacaattctaacttttttattttgtcagcccatccagataggcccgcagccgcgccacgtcgccgtcggcaaagcagtagcccgtcatgccggtgctttccgcgccctgaacgttggcggcgctgtcgtcgatgaacaggcattcctccggcttcaggctgaatttgtcgcacaggcgcaggaaaatgcgcgggtcgggcttgatcatccgttcctcggcggagaccagaatgccgctcaagtattcagggtgaggcagcttgtactcgtaggtgcggaaacgatgccccgcgttggacagaatgtagagccgatagccccggtcgtgcaggtctgctaccagctgctccatgcccgccagcgggtagagcgtgtccaaatgccagtcagacagaagcttcggcaccagcgcccgctcggcttcgtcctccaggcgggcctgtgccagcggagccagtccttcctcggtcaggtcgccgctgtccagcttgatccagtcgggggaatcaaaaatggctgccttcagccgcagcgccttttcccggtcgccctgcgcgtagcgcagacaggcgatcagcggctcgtagcgcagcagcaccatgcccatatcaaaaacgatattgcgaatcattccaatgcactcctttcccagcaaatgataccatatttccggcggattgggaaggaatttgactttccctgcccgtgcattataataaaggcgcagccttccgaaaaaaagagggctgcggaaaggatggaagcgatgaacgcgaacaacgattgggaaaaggccaaacaggctgtagacgacgcgatgggcgcggtgtatgacgcgctgcaccatctgaatgaaaaagtggacgaactgatgcagacccccgtagtggacgaaaagaaggacgaggtttgccgcaaggccgaggagaccgtccagaacgtcagcgccgctgtggagcaattcggccagaagctgaatgataccctgtccagcccggaatttgcggaacggacggaaaatctgaaaaaacaggcgggtcaggcggtcagccagacggcggactatctggctaagggcgcggcactggtggcgaccgggctggacaaggccgtgcaggccttgaagggcgcgctgacctccaaggaagaaacgcccaaggaagatgcgccggaggaatcccacgacgcggacgagaccggcgattcgtcctccgaaaactgacccgaaaagaggaaccgaagatgaaaatgaaaaaaatctgtctggtgctggcgctgctttgctgcctgtgcctgatgagcgcctgcacgatgcatgtggaccgcgacccgtggccctctaacgagcagaacgccgcgacggcgcagcccactgccgacacggcacaggatgcggtcacgacagacgcgcagcagaccgccacgcccgatcccgccgttacgcctctgcccacggtcgacccgaacgccgatccgggcatgaacggctgacgaatcaaggagaaagaaccttgctgaagaccatcaccccagacgaaatgaagcgtctggaagaaaattacatgaaccgcaccgggacgagcgctctccagttgatggagagcgccgcccggcatgtggccgatgcggtggcagagctggcgggcgaagccggcggaacggtgctgtgcctgtgcggccccggcagcaacggcggggacggtctggcggcgatgcgcctgctgactgccagccgcccggaactgcgggccgtgtgctggcttttgcctggcacgctaaacgacgcggcggagcatcagctgcgccgtctgcaggcggaagcccccgccgtggaggtcgtccgcctgacggacgatccgctgccgtccctgccggaaaatgtctgctgctttgtggacagcctattcggcacggggctgagccgcccgctgaccggaacggcgctagcgctatgcgccatgatgaacgagcacgagcgcgtccccacgctggcagtggacattccctccgggctggacgggaccacgggcgtgattctgggctgtgccgtccgtgccgaccgcacggtgacgtttcatcgccccaagcccggcctttatcgggggtacgggctggattttgccgggcaggtggacgtggtctctatcggcattccttcggacgaggggacttccgccgggtttgacgtgctggagccatcagacctgcgccgtctgctgccgccacgccgccatctgagccacaagggaacctatggccgggtggtgctattggccgggagcaaaggcatggcgggagccgccgccatcagcgccggcgccgccctgcgggccggagccgggctggtcacggtggcctgtcccgacaacatctggcagatcattcagaccttatgcccctgcgccacctgcctgcccctgccggaggacgacccaacgtcggcgtttctgctgctggaaaaggccctgaatcaggcggactgtctgggcatgggctgcgggctggggcaaggcccatgggcgcaggagatggtgagacgtgtgctggggtctctgcgccgccggcaggacagccgtcccctgcctaccgtggtggacgcggacgcgctgaatctgctttctcattcggacgagggctatgacctatcttcctgcgtactaacgccccatcctgccgaagcggcgcggcttctgcgctgcgaggtatcgcaggtcttagccgatcaggaagcagcggcgcgccaactgcggcggcaatacggcgcggccattgttttgaaaaatgccgtcagtcatctgatcgccaaggagggcgaggccctgaacgtgttgggcacgccagccatggccaagggcggcagcggcgacgcgctgaccggcgttctttgtgccctactggcgggccgtcaggctggagcctacagcatgaccgatctggaagtcctacaagccgcctgcggccttcacggtttagccggtcttgccgccgaagcccgttacggccagctctccgtcctcgccaccgacttgggcaggggctgagcccctgcaccccacaccgcgcccatagggcgc

SEQ ID NO: 2015 - DNA, 17659 bp, Unknown
  16S sequences of unknown bacteria
gtccctgcgacgattgagtggcagcagtgcctcctgcacctccacttttttgacacactgaagcccgccgtcaggcgggcttctggaacaaaaatggaaccattacagcagctttttgtagatcttgacgtattcgttggcactgtgggcccagctgtagtcgccggtcatgccgcgttcctgcagcagcttgataagttcgggctgcttccggtagcaggagagggcgcggcggatgacgttgagcatatcgtgggcgttgtagttcaggaaggtgaaaccattgccttccttggtgtactcgttgtagctcagcaccgtgtcccgcagaccgccggtctcgcgcacgatgggcaccgtgccgtagcgcagggaaataagctggctcaggccgcagggctcgaacagcgagggcatcaggaagaagtccgcgcctgcgtacagcttgtgggccagactgtgatccatggcaaagcgcgccgccatgcggccccggtactgctgctccgcccagctgaacaggttggtgtagcgggcgtcgcccatgcccagcacggccagctgtacgttttcgttcataatgtcgccgatgacgcagtccaccagatccagacccttctggttggtcagacgacccaccatggcgatcagcggaatatccgggttcacttccagccccagctcccgctgcagctcggccttgtcgactgccttaccgctcatgtccttgagggagtaggtcttgtagatcatgggatcggtctcgggattgtattcgttcacatcaatgccgttgagcacgccgtacaggctgtccttccgggcgcggatgagcccgtccagccgctcgccgtaataagcggtggtgatctcctcggcatagctggggcttacggtggtaatggcgtccgcatagaccagaccggccttcatgaagttggcgcagccgtagcattccagcttgtcgctgctccaaagtccgtcgcccagtcccagcacgtcctgcacttccttaatgccgaagatgccctgatactgcaggttgtggatggtaaatacggtcctgatcttggaatagaagggcagatgcgcgtactggatcttcagcagggcgggcaccatgccgctctgccagtcgtgggcatggatgatgtcgggcttgaagtccagaagcggcatggcgttgagcacggcgcggcagaagaagctgtagcgctcgtattcgtctccgcccagtccgtacacatagggacggccgaagtagaacttgttatccagaaaataataggtcacgccgtcctttttgagcatgttcacgccgcagtactgccgccgccagcccagctgcacctcaaagtgaagctggaattccatctgctgctgccacttggagtcgatggcggtatacaggggcagaaccacgcgcacatcgtggccttttttggccagcacaggggccagcgcgcccaccacgtccgccagaccgccggtcttgataaagggaacgcattcgctggaggtgaacaggatcttcataatatccactccttgttgttgaaattgcgcgtccgtcgggaaaacggacgcgccggaaacgccaggtcagatcaccatgtttttggacagcacgatggggtagctctttgggccgatcagacggccgtccttctggatatgagcctgcttatccagaatacagttttccagatacacgccctcgtcaatgcgcgcgtcctgcatgatgacgcagttcttgactgtggctcccttggcgatctttacgccgcggaagatgacgctgtgctccacccgaccgttgatgatgcagccgtccgccaccatggagttgacggcgaccgcttcgtccatgtagcgggcgggcatttcatcgcgcaccttggtgtagatgggccgatcctcccggaagaagttgtgccgcagctcggtattgagcatgtccagattgaactggaagtagctttggatgctgtccatgcggtagcacagatcatgatattcgtagcccttcacttttagacccgcgtcgcggatcatgcgctgcagcacgtcccgcatcaggccgtgatagccgtgggcgaaggcccggtccatcagttctaccagcagctttttggagatgaacagggtgtccatgcaggtgttttcatagcggggatgggtgggatccatctccagatcggtcaccatgccgttttcgtccacgtccagataggtgccgtattcggggcggcgcagggagggatccttgctgtacatcagcaccgcgtcgcagctgtcgtccagctggtggaacatttcgttgaagttggggttgaagaccatcagactgttgcagaaaagcacatagtcctgacggctgcggcgcaggtagttcatgttggaatgaagcgcatccagcgaaccattgtaaacgcccacattttcacgggtcaggaagggaggcagaatgtaaaggccgtcgtttttgccgtgcagatcccattccttgccgctgcccagatgatccatcaggctgtggtagtttttctgcatgatgacgcccacgttgcgcacgccgctgttgaccatggcgctgacgaaaaagtcgatcacgcggtagcggcccgccacgggaacggcggcaatggcgcgctgcagcgtcagttcgcgcagaaagctgtccttttcaccggtatagataatgcccattacgtctttcataacggattcctcacttcatcattcattggaacgaaagggtttcaggaaccggcatactgctctccggccttgacttccccgccggcggccagatgcacgcccgtaccgaccacggcgatattgcccgtggcctcgcctacggtcgcgcccgcgccgatgaccgcgtcctcggacacgatggcccgctgcacctgcgcgccgcgctcaatgaccgcgccgggcatgaccacgctgtccttcaccgtggcgccctcccggatggtcacgccggagaagatcacgctgtgatcaacatggccgtagacttcgcagccctcggtgatcaggctgttgcggacgctggcgccctcggcgatgaaatggggagccaggccggggttgcggccgtagatgcgccacttggcgtcgtacaggtcgatgggcatgggcagggtcagcagatccatgttggcctcccaaaggctttcgatggtgcccacgtctttccagtagccctcgaaatcataggcgaacatgcgctgctggtcgtccagcatcttggggatgatgttcttgccgaagtcgttggagctgttggggtcttccgcgtccgctaccagatactggcgcagcttctcccacgtaaagatgtacacgcccatgctggccttgttgctcttgggatgggcgggcttttcctcaaattcggaaatgctgttgtcctcgttggtgttcatgatgccgaagcggctggcttcgtcccacggaacctcgcggacggcaatggtgcagtcggcgttgttctggatgtggaactgcagcatcttgttatagtccatcttgtaaatgtggtcgccgctgaggatcagcacgtaatccgtgttgaactgctcgatgaactggatgttctggtagatggcgttggccgtgccggaataccattcgccggacttgccggtcacataggggggcagcacatagacaccgccgtgagcaaggtccagatcccaaggggagccgctgccgatataggcgttcagcaaaagaggacggtactgggtcagcacgcccaccacgtcgatgccgctgttggtgcagttgctcagcggaaagtcgatgatgcggtatttgccgccgtaggggatcgcgggcttggccacgtcggccgtcagaatgcccagacggctgccctgaccgcctgccagcagcatggcaacgcattgtttcttgttcttcatggatgggaccactccttcaagtttattcccgggaaattggatatcgaagccccgaaagcgatggggggaaaccggcggaggtttaaggagaatgccgccgggaaaccgtgattttggaaagcgtccgataattccgctttggctttggcggcggaagaagcttgtcgtagcggaagtaaacggtgctcagcggcggaacacagatatccacggaataggggaaaccgttgaactccgacttttccgcgtgcagctcataggcgttgtactggttgctgccgccgtattctttccggtcagtgttgaaaatttcattcagcgtaccgcccagcgggaggccgatgcggtagatggggtggaacaccggcgtgaagttactcacgcacagtacggcctgtccggccttgtccgtgcggataaaggccaccacgctgttgtctgtgtcgttagcggtgatccactggaaaccgttccacgagttgtccacctcatgcagcgcgggaatctcctggtacaggtggttcatctgccggacgcagctctgcaggggcgcgtggcgctcgtagaccagcaggaaccaatccagctgatcgtcgtacttccattcgatgaagtgggcgaactccccgcccatgaacagcagcttcttgcccggatgggctatggtgtagccgtacagagcccgcaggcctgcgaatttctgccacaggtcgccggggtttttgtccagcatactgtgcttgccgtgcaccacctcgtcgtgggagaagggcaggatgtagttctcgctgaaggcatagaacaggctgaaggtcagcttgtcgtgatggtatttccgatagacggggtccagcttgatataggaaagaatatcgttcatccagcccatgttccacttgaagccgaaccccagtccccccagataggtgggggccgtcaccatggggaaggcggtgctttcctccgcgatcatcataatgccgcagaagtcatgatagaccgtctcgttcaggcggcggaggaagttgatgccgtccagattctcccgcccgccgtagcagttgggcaggtactgtcccggttccttgcagaagtcatagtagatgatgccgctgaccgcgtccacccgcaggccgtcggcgtgataccagtccatccagaaacaggcgttggagagcagaaagctgcacacctcgccccgggcaaaatcgaacagcttggtgccccattgggcgatctcgccccggcggcggtcgggatgattgtagagactggtgccgtcaaagcggtacaggccgatctcatccttgggaaagtggcagggcacccagtccaagatcacgccgatgcccgcctgatggcagcggtcgatgaaattcatgaactccttgggcgttccgtaccgggcggtggcggcgtagtaacccgtcacctgatagccccagctcatgtccagcggatgctccatcaccggcagaagctcgatatgggtgtagcccatgtccagcacgtaggggatcagttcgtccgccaactccgtataggaataaaagtttccgtccgggtgcctgcgccaggaacccatgtgcacttcgtaaatgtttaccgggctttgatagggattgaaatcgtggcgggtcttgagccactccgcgtcgccccattcgtagccttccagatcgtacagacggctggcgttgttgggcctcagctcgctgtagaaggcgtaagggtcggctttcatgcgccagatatcgtccgccccccacacggcgtatttgtaggtggggtagccgtcctccggcacgtcgcgccagagggtctcctcatccagccgaagctcccaggtgccgtcgtattgctttttcatggggtgggcgctgcggtcgtaatgattaaaggaacccaccagcgccacgtgtttcgcgttgggagcccaaacgcagaaatgccacttacgcctgcctccctcctcgcagggatgagagccaagcatttcataggcgcggcggctgagcccctgatgaaatgtatctcggattccacccgatggagcgtgataccgcatcggtctgtcctcctttatggcttgataaagagtatgcgaaagcgaactctcttgccgcttccattttttaactattcttattttatgccctgccgctggttccgtcaagtcgttttttggaaaaagggtatctgagaaaacataaatgtttctggaaaaacacggcacagcttgctttctgcatactcggcgattttccgccctttagctgtcggcattggggtcgtccccctcatcgtcggaaggtttcagttcagcaaggtgtttcccggtattgtggatgtagacggccagtgcggcggagcagatgcccgccatgacgttttcaggggtcacggcccagccgttgagccacagcacccccaccagcgccacgggcagcagcacgaggggaatgtacttgttgttgaagccctcccacacgtttttcagcagccagcccaccagaaagcagacagcggcaacggggatcaccgcgtatttgctgatgatttccatgatgttgatttccatgttcggttctcctttcttcccataaaaaaagcaaccgttcggaatttccgaagagttgctttatttcttgcgatatgttgctttattttttgcgactaattgcaaccagttgcaatatttttaattactgctgcaatggtatcatcccctttccaaggcatgaaaaaagcgccctgcgcggcgctttacgtaaaaggcactatttccttgatgtctttcaaaaaccttttagctttttccatgaacgagttttcacagaggtatgcgattccagccggggtgatcctgcaagtttccagttggcttacataggggaactcaagcccatccatatgaacctgtttgaccccctcgatcaacccttcttcgaccatgtgataaaggatatacgcccaatactgcttattgatctggaacagcggcccgtcgtgtttcagaaacgccgggtctacaggctccccttttttcagccgttggtaaaggtacgaaaggatttgataaacaattacaaagtagtcgtcctttgccatgccccgctccctccttccaacgttaaaagcaccgtgcaatgcacagcgccttgttatcctatctctctttccttttttgtgtttgtccaagatgtattgtagtcctacaaaaagcggaaaacagaaaaaaaccaaggcttgcgtaattgacaaaacaatgctatactgtcaaatggtgtactttgataaatggggcagagggaaaccggcgcccagggaggaaaatacatggaacattcggtagaaaagctcagcagcaacaaagtaaagatcagcttcaaggcgaccgcggcggagtttgaaaacgcgctgcagcaggcgtatctgaagctgcgcggacagatcaacgttcccggcttccgcaagggcaaggcgccccgcaagctgattgagaatatgttcggcaagggcgttttttatgaggacgctctggatatcctgttccccgaagcctactataaggccgtggaagaaaacgacctcaagcccgtggcccgtcccgaggtggatgtgcaggccatggaagccggcaaggatctggagttcagctgcgaagtgtacgtgatgcctgaagtcaagctgggccagtacaaggatctggacgtgacccgcaccatccgcaaggtgaccgatgcggaggtggattcccgcattgagcaggagcagaagcgcgttgcccggatggtggacgtgaccgaccgggggctggagaacggcgacaaggcggagctggattactccggcactgtggacggcgtgaagttcgacggcggcaccgccgagcatcagacgctggtcattggctccaacaccttcatccccggcttcgaggagcagatggtgggcatgcagatcggcgaggagcgggacctgaacgtcaagttccccgaaacctatcatgcggaaaacctcaagggcaaggacgcggtcttccatgtgaagctccacgccatcacccgcgaagaactgcctgagctggacgacgatttcgccgccgaagtcagcgatttcgacaccatgaaggaatatcgcgagagcgttgaaaagaccctgcaggaagccgccgacattcaggcggacgaagccgccaagagcgccatggtggaaaaggccgtctccaacgccgagatcgacgtgcctgctcccatggtggaagaaaaactggatgaaatgatgcagcagatgaactggcggatgcagcagcagggcttcaccatggagcagtacatgaagatcctaggccagagcgaagcccagatgcgggatatgtaccgcggcgaggctgaaagcaacgtgcgctccgagctggtgatggaggagatcatcaaggcggaaaacatcgaggccgacgaagccgacgtggagaaactgctggagggctacaccgccgccatgggtcagaccgtggaacagctgaagtccaccttctccgccgagcagctggattacttcaagcaccgcgcccagatcaacaaggccatcgacctgatgtggaagagcgccaaggtcaccgacgaggagatcaagccggacgctgaaaagaaggaagaagccgccgaagtttccgaagaaaaggctgataacgagtaattcaaacgcataaggcgcgcaccgcattcatatactgttatggtatatcttgcggtgcgcctgtttcaacattgcgccacaaggagggaaagcaatgaatttggtacctatggtcattgaacagaccaatcgtggagaacgttccttcgatatctactcccgccttttgaaggacaggattgttttcctgggcggggagatcgacgacgataccgccaatctggtggtggctcagctgctgtttctggaaatggaaaacccggacagcgatatttcgctctacatcaacagccccggcggcagcgtgaccgccggcatggcgatctttgacaccatgaactacatcaagcccgacgtgcgcaccgtgtgcatcggtatggccgccagcatgggcgcgttcctgatgatggcgggcaagaagggcaagcgtctggctctgcctaacagcgagatcatgatccaccagcccttgggcggcgcgcagggtcaggccaccgatgtggccattcgggccgaatggctgatgaagaccaaggaaaaaatgacccgcatgatgtccgaaatgaccggtcaggatatagaacgcgtgaagcaggatgtggagcgcgactatttcatgagcgccgaggaagccctccagtacggcattatcgacgagatctaccagccgagaaacgcccggtaaacggcctttcaacggcgctgaaagcaacaaaacgaggtgacaacattgccgggtgacgataccaactcccgcacccccaagctgcgccggtgcagcttctgcggcaagaccagcgatcaggtccgccgcatggtggcaggccccaacgcgcagatctgcaacgaatgcatcctgctgtgtcaggagatcatcaacgacgatttttccgccgtccatgacagcgtctccggcagcgagatcccccgtccccgggagatcaaggccgtgctggacgaatacgtcatcggtcaggaagcggccaagcgcgccctgtccgtggcggtctacaatcattataagcgcatcaacgccaagacacagaatgacgaggtggagcttcagaagagcaatattctgatggtgggccccaccggttccggcaagacgtttctggcccagacgctggccaagctcctgaaggtgcccttcgccatcgctgatgccaccagcctgacggaagcgggctacgtgggcgaggatgtggagaacatcctgctgcggctgatccagaatgcggactatgacattcagctggcccagcggggcattatctacatcgacgagatcgataagatcgcccgcaagagcgagaacccctccatcacccgcgacgtgagcggcgagggcgtacagcaggcccttctgaaaattctggaaggaaccgtggccagcgtgccccctcagggcggccgcaagcatccccatcaggagttcatccagatcgacaccactaacatcctcttcatttgcggcggcgccttcgacggcctggcccccatcatcgaaaaccgggtgggtaaaaaaacgctgggcttcggcagtgagctgaagtcgcaggaggaagagaagatcggcgagattttccgccagctgcggccggaggatctgatcaaattcggcctgatccccgagtttgtgggccgtctgcccatcgtggtcacgctggatcagctggatgaagcgcagctcatccgcatcctgaccgagcccaagaacgcgttggtgcgccagtacggctatctgctggatctggacggtgtggaactgctctttgagcctgccgcgctgaaaaagatcgcccatcaggccatcgaacgcaagagcggcgcgcgcggcctgcgggccatcgtggaaaaagtgctgatggacaccatgttcgatcttccctcccgggacgatgtaaagcaggtggtcatcaccgaaaagtgcgtggacggactggaacagccccggctggtgctgacggacgaagctgcaaagcccgcccggaagccccgcgcggcggccaaaaagcttccgaaggacgaaagcagcgcttcctgaaaaaagtcaggaaaacctattgcaaaatgcgggctttctgtgtaaactgtcaaacgcccggcaggtcggttcttccggtctgccgggcgttttcgtttgcgctgctttccgccggagggcattttgcctgtgggggaaagatcgatcttttcgaagggcggtttgatcgatggcaaagacgcgggatatgacggtcggctcgccgaccaaattgatttttgggtttttcatgcccttgctgttcggacttttgttccagcaaatgtacaacgccgtggatacggtggtagtaggccgttttttgggcgtgaacgcgctggcgggcgtaggcgctaccggcgcgttgaactttctgatccttggcttctgcaccggcacctgcaccggctttgccatccctgtggcgcagaaattcggcgaacacgatttcgcgggattgaagcgctacgccgttaacgccattatgatctccgtggcgttctcgctggtggtggggctgctggtctcctgcctgtgccgcacctttctggtgtggatgaataccccggcggacatcatcgacgacgcttttgcctacctgtttgtgatctttttgggcattcccgtggtgatgctctataacgtgctgttcggcatcatccgctccatgggcgattcccgcacgccggtattgtatctggtcgtcgcgtcgctcatcaacgtggcgctggattttctgctgatcgtcgttttccataccggcgtggagggcgcggccattgccacggtgatctctcaggcgatttccgctctgctgtgcgtccgttatatccgtcacagtcaggtgctcatcatcaccaaagaggactggaaggtggactggcagtgctgcaaggtgctgctgggcatgggccttcccacggggctgcagtattccatcaccgccattggcagcattatgctgcagacgggcattaacgggctgggttcccacgcggtggcggcggtctccaccggcaataaggtgacgcagctgatctgctgcccgctggacgcgctgggcaccaccgtggccacctacggcggccagaatatcggcgcgaaaaagctggatcggatcagcaagggaatgcgcacctgcgtggtattcggcctgatctattccgtcattgcctttttcctgatcaagtattttggccccacgctgctgagcttgttcatcggcgcggaggaaacgtcggttttggcggacgctcagtattttatcatgcactgggtggccttctgcgcgccgctgacctttgtgtatgtgttccgtttcatgattcagggtctgggcttttccaagctggcggtgtttgccggtgtgttcgaaatgctggcccggggactgatcagcctgttctggatccctgcggcgggctttgaggccgtgtgcttcgccagcccggtggcatggatcgccgccgacgtttttctggttccggcctatctgtgggtgcggaagaagctgcaccgggaatttggcgttacggctgactgaagccgtattcaaacagcttttgcaaatctttccacgcccggtttcggctgggcgcgcccaatacgacggcgatgagggaacgtccgtcctgctgggccgcgccgacgtagcagaagcccgcccgggaggtatagccgcttttgattcccgccgcatagggcagatataattcggaggcggggtcgaaaatttcgtattcgttgcggagggtcagcgcgtcccgcttggaagtggggggcagcgtatagctcaggcaggtgacgatgcggcagaagtccgggtcgctcattccggcccgggccagcagcgccagatcataggccgtcgtatagtgtccttcatcgtgatagccgtgcggattggcaaaatgggagtctcccatgccgatctgcgcggctttttcgttcatccgttccacgaaagcctccacactgccggcttccagcacggcgatggcattggccgcgtcgttgcccgaacggatcatcagtccgtaaagcagatcgagcttgcgcatctgttctccgggcgtaacgggcaccagcgaactgtctgccggaacgtccgccgcctcctgcgggatggtgacgatgtcctccagaccgccgctttccagagccaccatcagcgtcaggattttggtggtgctggcaggatagcgacgctcccggctggcagactcgaacaacacttcgccgctggggccgtccatcagtatgcagctcttcgaaaaaagataaatcccgttcagcgtatcgggccgggtgaagtcgtaatactccggggcctgccagccataggaggacaggtcgacgttcaacaggcggacggtgtccgggtcagccaaaccgtccggctcccgctggaaaataccccagcccttcgcctctgtctgaaattgtgcgacggcggctttcgtggacgcgccgaacgctccgtccgccatttcatcgagaaaacgaaggtcgatcaaccggttttgcagcgcccggacccgttcgccccggcttcctgtgcacagggtggagagcagtgcgtcgttgttttcatcaaacaaaagctctatcgtttttcgaccggcaacgccgtcctgcgtcaggctgtgtccgccaagctccgtcagcagccgttgggcttccgcgacggcggcggaggtttgcttaccgtaaataccgtccgccttgccgctcagcaggcccagttcgatcagtctgcgctgcagctgcgtgaccgccgcgccggaatcgccgggctggcaggtctcggcagccaacgccccggcaggtagaagcagacacatgcacaaaatcagcagcagggcgcgtttcatcttcggtagcggctcctttcggtgggaaaaatcggttctgaaaatatagacgaatgaaacccgcggaatgttgcataggttttggcggagggatgcagtatgaaacggggttatccgccggtatggctggggattcttatattgacgctggtcgttttctggcgaatggcgggcgcgccagtgacggtggaggagtttggagccgtggaaacgcccttctggcagatgcgggtgctggcccccgcccggatggcgcggatcctgcgcttgtggttttccgccccggcggaaccggccagtgatctgcttctccgggaggatgcagaggaagaaggtctgtcgctagccagccagagcggcgaaatggctgaaaggacgatcgccgtctggttggaggacggcgtgcgcaccatgccgctggaaagctacgtctgcggcgtggtagctgcggaaatgcccgcagcgtaccatttggaggcgctgaaagcacaggcggtcgccgcccgtacccgagcggtgcggcagcagctggacggtggctgcagccgtcatccgagcgcggatatctgcggagatagcgcctgctgtcagggatacgtgggggaggcggcctgccgggaaaaatggggcggggagtttgaactctaccgcaaacgagtgatgcaggccgtgcttgaaacgcgggacgagcttctccgttacgacggtgagcccattaccgtgatgtatcacgccatgagcggcgggcgcacggaggacgtacaggcggtgttttcccaaagtctgccttatctggtcagcgtggacagcgccggggaggaaagcgcccggggattttatacggacgcgactttctcctacgaagaagcggctcttctgctgaatgcctacttcagcggcctgaatctgacggcccagcgtctgcggcagaccttctccgtggcggcctataccgacagtggacgagtcaaggcggttgtggccggggaacatacgctggacgcggcggaggttcgccgggcgctttccctgcgaagcacccttttttcggtctccatggatgaaacgggcattacctttcatcagcggggatacggccacggcgtgggaatgagtcaggtgggagccaacagcatggcggcggacggcacagattatcggtcgattctggctcattattatcccggcacagagctgggaactgacgaataaccgctttggaatggaaaacccggctgcagggcaaactttagccgggagggatgcaaatggaaagaagccggggatggcaaaaattcaagtccgggatgaaacgagcctatcagcgttatgaccgcatgatggaaaaacagggcttttatgtggtactggcgatctgcgtgctggtcatcggcctgagcgccttttatacgtttcgccttcgaagcgaggaagaagaaccggttctgaccagcggcgaggcggaaagtgcggacagttcgcaggcccagacgctttccgaagcaaaggaactggtgactggcagcgaaacagtgctggccgtgcctacggaagcacccttttccctttcccagcctgtttcggggtttctggatcggacgttcagcgatacggaaccgcagttttttgctcagactaacgcgtggcaggttcacgcggggatcgacctgcaggcggaatacggaaccgctgtgtccgcctgtgccggggggaaggtcgagcgggtctggcaggataacgaactggggctgtgcgtactgatcgaccacgaaaacggttacgagaccctgtatgcggggttgagcagcgcggattacgttcaggcgggcgacccggtcatacaggggcagacattgggacatagcggcaatggggtgctggcggagagcgatggtctgccgcatctgcatctggaagtgcacaagaacggccggccggtggatccgctggcagcgtttttaggccttgacaatgaaaatatactatgatatgttatataacgttttgaaacaaaaggaggaagaaccatgtgcggcattgtgggatatatcggctctaaaaacgcttcgcccattctgatggaagggctggagcggctttcttatcgtggatatgacagcgccggagtggcagtgatcggcccggacggaaaaatcggcgtgcgcaaggccaagggacggctggaaaatctggcgggccttctgaaggaaagccctgtttcgggcactattggcatcggccatacccgctgggccacccatggggaacccagcgacctgaacgcccatcctcatacggacgtgaagggcggcatcgccgtggtacataacggcatcattgaaaaccacgcggcgctgcgccgccatctggaacagacgggcgcgaagttcgtcagtcagaccgacacggaggtcattgcccatctgctgaactggctgtatgacggcgacatgaagcgcaccctcattcgggctatgggaatgctggagggcagctatgcgctgggcattctctgcgaccacgaaccgggcgacctgtactgcgcccggaacgacagtccgctggtcgtgggcgcgcgggacggcgagggcttcatcgcatcggatattcccgctttgctgagccacacccgggacgtcattttccttcaggataaggagatcgccgtgctgaaccgtcaggggatcagcgtattcgacgcctacggcaatcattgtcaccacccggtctttcatgtggattgggatctgaccagcgccgaaaagggcgggtatgcgcactatatgctcaaggagattcacgagcagcccgaagcggctcggaaaacggcggctccccggctggatgtgccggaggagaactggctgcccatccgcccggaggaagcaaagcgcctgaaaaagatcaccattgttgcctgcggaacggcctatcatgcgggcatttacggacagtatgccatcgaaaaactggcgcgcattccggtggaggcggccattgccagcgaatatcgttaccgggatcccatcatcggcgaggacgaactgttcatcgccgtctcccagagcggtgaaaccgccgatacactggcggcccttcgggaagccaagcgccagggcgcacatgtgatcgccctgtgcaatgtggtaggctccaccattgcccgggaagcgggggaggaaaacaccctgtacacctatgccgggccggagatcgccgtggccagcaccaaggcctacacgacacaggcagaactgctgtttttgatcggcatggcgctggggaaaatgcgcggccacttgacggcagaacaggcggaagcactggcggcggaggtgcgcgccttgccggaaaaaatggagactgtcttgaaaacagagccacagctgcagcgtatcgccagcacggccagccagaagaaacacgttttcttcgtgggccggggcatggactatgcgctttctatggaagcggcgctgaagctgaaggaagtcagctacattttcagcgaagcctatgccgccggggaactgaagcacgggccgatcgctctgttgcaggaaggccggctggtggtggcgaccattacccagccgcagctgattgacaaggcgatgagcaatctaaaggaagtcaaagcacgcggtgcgcgaattttggctatttgccgggaaagtctgcgggaaaaggtggagccggaggtggacgaactgattctgatccccgacgcagacgagctgatttgtccgctgctggcggcgatcccgctgcagctgttcgcatactgcatggcagtgcagcggggctgcgacgtggataagccgaggaatctggcaaagagcgtcacggtggagtgaaaaaaaggatggcagacttttcgccgggtttctgttttcatcgctgtgcggttgcgggcttcctacggggcctgacgcgccgactccggcgcgaatggtgggactgccgtcccgagagggcagtactttctttcgacgcgaaagaaagtaccaaagaaagcaggcagcacggcgactccagaggcggcccacgtcgctatgcactgcggccaagccctgcgctgcgcttgggcttggctacgcgcttcatggctttcagccatt

SEQ ID NO: 2016 - DNA, 7016 bp, Unknown
  16S sequences of unknown bacteria
gagcatctgccttacaagcagagggtcacaggttcgagccctgtagttcccaccacatttggcccggtagttcagttggttagaacgctagcctgtcacgctagaggtcgtgggttcgagccccattcgggtcgccaaatgtatgccttggtagctcagtcggtagagcaagggactgaaaatccctgtgtcgatggttcgattccgtcccaaggcaccaataagcgggtttagctcatctggtagagcgccaccttgccaaggtggaggtagcgagttcgagcctcgtaacccgctccaattttttataactcataatttttcatattcattgatccttatcggccgctgtaaaacagcggtcgtttttctttgccgaatatctgttaatttataaaacccgggttaaatcttaataaattttaatagttcatttattaaatttaatcttggtctgagttataatataatcacgggaggaaaaaacatgagtaaattattatttatgattttcggaatattttttatgttgttgggctttatcgggcttatgcttccgattgttccacagataccttttcttttggccggtgctacgctgctgtccatgggctcggaaaaaataaaaaagaaaatcatacattcgggtatatacaacaaatatgtaaaagattatgtaaataaatataaaataacaaggagaatattcggcgaataacccctgcccccttaattagtttatatccaaacaataaatattatatgtcacggcttgccgtgacattttttttgcggttatttattaaatttaattttttgtataattttcgctttttttgcgtttttaagggctttttcgtcgtttttgcccctaaattttaaattttccccattttgtactcaacttttgcccttttttcttgtttttctttaaaaaaatcccctttttgtacttatcaccgctgttttttgataaaatcctgcccctttttgtacttaacagggtgtatttttgtaaggtaatttccctttacaagcctgtaaaaatgcccaaattgtacttaactgtatgcaaaaagcacccattttgtattcaactgtgtgattttaacccccaatttgtacctaacagcagaaatttctccccctttttgtacccaactaaacaggaaaattttccaaaaaaatttgattgaccgcccctcccctatttgtaataaactgaaaaattcccggaaaattcccgactttctcccgcaaaattcccacgaaattcccggtgtattctcatgaaattctcagtgttttcccgactttttcccgatttttcacagattttttttaaaatattttatacatatagttaattttcttatgttttatacttattgacaatttaaaacggagggattttctgataaaattatttaaaatactccccctttttgtacctaacagggaaaatttttttgccccattttgtacttaacattcccggattgtatcttactgaaccccgaattgtacttaacaaaatccccttttgtactttactaactcccaatttgtacttacatcttacccgaaatgtatttaactgcctttgtaaatccccacagggagccggttttcggctgcctaaaatataaaataatattaaaaataaataataaaaaataaaataaaacactgtaattgttttttaccttggcttatggtataataattgaacatagataatgaggatcggtaaattatgccaagaaaaaagaaaaacaaggtgaacaacgatatacgcgttgttacccaaaacgaatttaataatgtttcgctggctacatttacgcctaacgaaaacaaaattttacacgccatagtggcaaaaatcaaaaataaggacacacagaaaattcaaatttcttttgatgaaattaaatatctggttcaatataagcgcaatgacaattcaagttttattcgggatattgagcgtgtcaatacaaagttaatgcagcttaactatcgctatgaggacgaggacaaaatcgttcagtttgttctgttccctacttatatcataaacaaaaaagagaaaacccttgaagttgccgtaaaccaagattttacttttttgcttaatcaccttaccggtgaatttacggcttttgctttaaatgattttacaagtataaagtcaaagtacgctttgttgatttatccttttttgtcccagtggaaaagcgttggcaaatacaccgtttccattgaggattttaaggcgaatatgggccttgacgaagattattccataagcaacatagataaaagggttttgatacctacggttcgtgagttaaatgccctgttccccggtttaaaccttgaagtcgacaaacagagaggtttaaaaaacaaagttgtgggattgaaatttacctttgtgggcagtaagctggagcccggcaaagatataaagaccattgccgccggaaaaattaccccggaaaaggattataccgccgtgtgtgagattttcggctatgacaaggacaagctgaaaggggaagatatggctaccatagattcttggtataaggatttaaacatgagcaatgaaatgattgccgccgcttataccgccgcccgtgacagggcaagtattcgctactgtaacggtattttgaaaaactggtttaacagcggttacaaaaaagttgaggacattgtgggctacggcgcaaagccggagaaagtttccgaggaggattttctccttggcgacattgcccagttagggctttttgaataaaaaaacagggcgttttatcgtcctgtttttgttttagggtaaaatttggtaaatattttccgaaatcgcctttttaaataggctaaatttgaattttaaatgtttttagtgataggttattatagacagttaaaaccgaattttgggctgttaaaatccctgtgggggcgttcggtataaaatcggtgtttttgataagaatttaccattgccctttattgacaatttcccccttttgtatctaacttgaattaggggttttgataaaagaagaagtcagatttatctgattttcggataaaacaaaaggcggttttccccgccctttattttataaaaagttatataagtttttctttttgcaaactgtcggttaaaaggccgattacaagccgatttttggataaatcccctttttgacatatttcgttaaatttttcactttctgccgggcttaaataaagggtgacctgctttctgtccaatttaacaatcatatttggcaggtaaagagaggcccggtcggatatttcgtatccctctccccggtttttaagccggctgcggactaaattgttaaaagccgtgccgggtaaaattccctcctgccgccgatattcacaaaccgccgaataaagggggtcttttacaattcggtatgcgcattttatagggtgatattcgcttacggtgtatcttgccatatcagccctcgatttcctgttttaaccggtttataagccgtgagagccgatttaatttttcaagtatgctctgctcatctttgctgttttccagccgtttaatctgttttaaagctgttttattgtccagttttttaagccgtgtgtaggcactgtcaacatttttaagatattttgttctcaacaaatccgccgatgtccgaggctttttaacctgccgggattttatttttgcctttgtttcctcttgcaaagtttcaagaggtgattttttctcctgcccggaattttttgcaagggtgagaatttcgtttctggtatcggtgtaaagacctgtgtagccctcacctattttggctttgctcttttgcagcagagataaaatttcgattataattccctgctcctcaggggtgaattccgtaaatacaagggcgtcggttttggaaatttcgttctccccgttgcgtacaaactcgtacagttccggcacaagttctttgtacaacttaaaattgcggtcgatggtttttcttttatcccggccggactgcttttgaatttgagttcttaaagtcttttttgcctcactttcgcttaatccgtaaaccgcttgcaggttgtttatgtaccttacgcttacggtttcaaacatatcgctgtcggcaatgccctcacgggtgaatacattggcggtatccaaataaagctgttcggcatttcggcgcaggttttcatccttaaccgaaatatttatgattttacatggaagatatgagtattttttcatttcttctttgttgtctgtttcccttgcccggttatacaaaaggttgtaggctttaaaacggcgctcgccggaaagcaggatatagccatcctcccccggtcgccgggttactacggcgttgtgcataaggccgttttctttgatgttttgcgccagctcgtaaagggcttcttccgtgtcgtttttgttgtaaatgttgtccgggtgaatttttatgtttgtgagctttatctgtttgatttcgtccggggaaacccggctgttttcgtttgcggaaattgcccggctaagttcccctgcggtggcggcggaaagcatgttgttgtcggtaaatttactgcgcttgctttttaagtctttaatggccatcagttttcctcccggttgtcctgccgaattctctcttgaatttcacggcttaaatcccggtattcttggctttgcttgcttgaaggctcgtttatgataaccggcaagtttacgaataccgaattttctattgattgcccacggtgaatttcagttttaaaaaggtattttgcgtattcgctttcggctaaatcgtttttcaaaagttttgttgtggtggttctctcggaaaccattgtcataacgatgcctaaaattttaatttcacattcttcttctttttcaagctccttgcaaagggtaacggttgtaaccataccacgaatagcaaggtcgttgtaggtgcaggggataattacataatcactggcaataagggaactttttacaagccgttcatcctttgacggccttgtgtcgatgattatgtaatcgtaaattgcctcgatttgatacaggcgatatattaaaacttcgtacatacttaccccgtcgctgttttccgccaaagtttcaagaagttttggaattgaagcggtgtgggcgttggaggcgattatatcgcagttttccacatttgtggggcttatgtatctgtcaacggggattgaaaggtctttgtcctgatcccagcttttaagcatattaaaaagaccctttgttttaaaagcagggtctgtccagtttttgccggtgagcaaaagggtggaatccccctggctgtctgcgtctataaccaaaacttttttgccttgttttgccaaaacgcttgccacatttattgtggtggtggttttgcctacgccgcctttggcagaggcgacagtgataatttttgccatagtttttcctttctttgggtcatgtgaccctgcggtcatattgatttttcttttgttaaatttattatagcctatttggtaaatagctgtcaatcgaataatggaaatattaagctgaaatttactcctctttaaggtaaatgtggtcatgtgaccctgcggtcatattgataggggcttttgcaagttgacaaatcgtaaaattatgatatagttttaagagagaaataagtaaaatgtgtgtaaagcggcagaaaaaggctttgcattgaatgagggaattatggcaaaaggaataattgttttgggcgccacatttgtggatattaaggggtacccgttggatgtgtttatccccacaggcagaaatatgggtaaaaccgagcaggttcacgggggagtaagcagaaatattgcggaggacataggcaatttggaactgcgccccacattcgtaacctttgttgacgaaacaggcatgggggacgatgttgtgcggaagttgaaaaaccacaaggtcaacaccgactatatttttaaagtgccggacggaatgggcacttggcttgcgatttttgataacaacggtgatgttgcggcctcaatttcaaaaaggccggatttgtcggctctttccgattatttggaaaaatacggtgacgaaatttttgccgactgcgacagtatcgccattgaattcgatatggataaggaagccacaaaaaccgtttacaagtttgccaaaaagtacaataagccggtttattccgctgtttcaaatatgagaattgcagttgaacgccgtgatttgatgaagcaatcagcttgttccgtatgcaatatttcagaggcgggaattttgttttccgaggattattcccaaaaaaccccggaagaaatggtggatattttggcacggagagttgcccaggcacagatgaaatcaatgattgtaacaatgggtgccatgggtgcggtttatgttacagccgagggcgaaaagggcgtttgcccggcaaacaaagttgacgttatagacaccaccggtgcaggggacgcattttttgccggcattacggtaggccttacatatggaaaaaatatggcggaatcctgtgccataggcacaaggcttgcttcaagcgttattcagtcaaaagaaaatgtttgtccgagatttttgcccagcgaatttgatttgaatgttgttgtggattaaattattaaatcttaattttgcattttaaaataaagaaaggttcgggaaaccgagccttttttgtttgttatataatctttttcggatataatttagtgggtaataagtatggtttatacaaaaatatataatatatattataaataaatctgcagaaatatcaaaacaataatttttcaaaaatttttaaaatttttgttgacaaatttcaaatcaagtaatataatcaagctaaaccgatgaacaagagtagtagttgccgttactgcggcgcagagaacct

SEQ ID NO: 2017 - DNA, 32759 bp, Unknown
  16S sequences of unknown bacteria
catattctgagaaatgacctgttgtgaatgtgtatgtaccgtctgcattgagaaccccctctaccaatgtgtagctaccgttgtcatcaatgtatacgcatactaattccttggctgcaagctccttatcaaggttaattgtaaccttgacattaccgcccctgaagtctgtaacagcgccctttgatgttacaagcttcagatccacatggcagatgttttcatcagtcttaactgtttcaactgcaagtttaacagttccgtctgttccagcctgctctgctactgctgcaagggcagtcttgtctaaatcaactttaccgttgtcagttttaataaccagactggcatctgttttttcagccagttccttaactgtcttttcaggtatagctacttctgatgaagctacagtattattgcctgctgcatcaactattacctctgttgatttgttttctactgccttgtcaacgatcttgtctgctgtcttggcatctactgttgtttcagccttgttgtccttaacagccggagcaaggtcagcagttgtattcttatctgttgtattattggttacgttgtctgtaggtgttgatggtgtgtatggtctgcctactgtatacggaccattacctgttactatatatccatctgctacatatgctgtaggatctgatgagaatgtaccgccagttactgacaacaaacacttaggatcttcgggttctgtatcataaagtaatgcaatatcattcaaaaacataccgccactgacattaacaattgctccaccataagaggagttttttaccacagccaatgcatatccatttgttgatgaaccattaaaatttgcaacctgtgttttttctggtgctgtattattaaatgttccacccttaatatcgagtgttccgcctttaatttcaatagtacttcctttgcctgtactataatttccattattaattacatatttagaatttttagcagcaagatataattgtgcttcaaactccccattattaatagttatattactattttcatatgagccattagtatatacgtatcccttatatgttccattatttaatgtggtttcagtattatatattgaaaaaaccgaaaattctccatccaatacaccattttctataataagtgtaccattattctgaacagcaacttgtttaccttttattgtaccatttcctgttattttaagttttgaattttctccaactcgaatagttctcacacagcctgttttatatgatacttctttagtattcaagtcaagtgttatatttttatttactacaatggtttcatctgtacttatatcttttataagctttacagtagctccatcgcttgcagcatcaattgctccggcaagagttttaaaacactgttcatctattgaggctactgcatctgctggatctgtattccttacaacagtaccatctgtttttaaaacatatccatctgcaatgtacgctctcacatcacctgagaatgtgccacctctaatagcatttttcttggtagaaacctcaccattaaattttccacctaagatttcaatatttgatccttttgcagaaactgcagtcggtccagagatttctccgtttttaatagttattgtactcatagaacttccacagattgcagttatataagtttcattatctgctgataccgcagtgatttcgcctccattcatttcaaaagctgcatttgagtttctaatgtttacagcaaaattacctcttaaagcagttgctattactttaccaccattcataatggcttttccattaccaccaatataaattgtgcttccagccttagccataccttcaccggtaataatagttccagcttcaattgtcaggcttccatttccttcaactgaaacaactctgcctgatgttcctgtgtaacccgagcagattttgccactgccaatgctgtctttaactattacgtttccctttataagtagcgcttgctggtttacagatgtattagtaccgctaagtatatgtccgttaaggtcgattgtcagttttttattttcctcaattgtagttgtcttacccgtaactgtaacattatttattagctttatagtactattctctaccgcagcatcaatagcctcctgtaacgtatcataatgtgtagtgcctattgctgcctgatgactacaattctctgctgtacaattctctgctgtatcagcaaacacccccattggcatcattgccactatcatagccatacttatgactattgccaataacttcttcatttaatcaccctccttaactcggatatttaattactcagggctgcctctgccataataaaaggacaagccttaacctgtcctactgtcattatatattcctcatctctatgtaactggcagccatgctctattgagcttcaggctctgtagctttgcatccctgtctttcgacagatttgccctcttttgttttactcttaaagtataccctcccccctggtgctttgtcaataaaaaaagaaccctgtcggatataatcgtcagagttctcttttttaccttgattatgttaattaatacttctaagcaatcactgtataattaagcttctgccgcttttggctctgcaggctttctctttgctctcaggtttatgatagcacctgtagggcattccttagcgcagagtccgcagtttttgcatttttcaggatctattgcagccagattgttctcaattgtaactgcttcgaatttgcagaccttttcgcattttttgcagcctatgcagccgtttgtgcaggcttttcttgtctttgctcccggatctgtagagttacagtgaacgataaccttgttctttgccggagcaatcctgataacatggttagggcatgctttttcgcacataccgcagcctacgcagagctctctgtttacaaccgcaacaccatcgcatacactgattgcgccgtaagcgcatacagcctcgcagtcaccaaagccaagacatccgtgtgaacatacattgacaccgccaaacatctgctttgcagccttgcaggttgaatgtccctgatattccatcagggtttttgctgctcctgtgttgccgttgcacattactacagcaaccacaggctctgctgactctgcctcaacgcccagaacgccggcaagttttgccgcaaggtcagcgccgcctacaggacattttgccgtaccgatgctcggatcaccgccaagagcggcagcatagtcgtcacagccggcaaagccgcaggctccgcagtttgctcccggaagttcatttcttaagtttgcaactgtttcatcaaccggtacatagaaaacttttgatgcgatagtaagaataacggccaacactaaaccgattgccataaccagtaataccggaattaaaatattcatctctttcgcctcctcattctataccagtccgccgaatcccataaatgcaagggacaggaaagcagctgaaaccaatgtgataggtacaccctggaaagctttaggaatagcctcgttgccttcaagcttcattctcattcctgagaaaagaaccattgcaagcaggaagccgattcccgcaccggcagagtttactaatgcctgagcatagttgtaaccctcatcaatatttgaaatacacacacctaaaactgcgcagtttgtagttatcagcggcagataaactcccagcgatctgtgaagcgccggtatgaattttttgagcgccatctctacaaactgaacaagcgcagctataatcagtatgaatacaattgtctgcagataaccgattcccagtttgtcaaggataagcataatcggccatgttgcggcagttgcaagaaccattacgaaaattaccgcaacacccattccgactgaggaatctagttttttggaaacaccaaggaacggacatataccgaggaattgagccagtacatagttgttcacaaggataatacctactaaaatagtgaaatacattatgcttcagctcctttctttatctctgcttcaagcgcttctatgcatttttcctgctggcagatggaagccattgcgcagcccctgcagtcaaagctgcccttaacacctttgcccttagtgaagtgattgattgccgcaatcataatcgcatatacgaagaatccgcccggagccagcgctatgataagcattgggtgaacgctgagccaaggaagcgcaattccgaagattgtgcctgcgcctatgatttctctgatagcgcccataattccaagcgccagtgtaaatccaagacccattccgataccgtctaaagcggaatccagagcgttgttctttgatgcgaacatctcggctcttccgagtatgatacagtttactactatcagaggtatgaacagtcccagtgagtcataaagtgacggtacaaacgcctgcagtacaaactgtactacggtcacaaagcctgcaattactacgatatagcaaggtattctcactttgtcgggtataatctttgcaagcagtgaaataactatattcgagcagatcagtactgccattgcggaaacacccattccaagaccgtttaatgccgagcttgtggttgccagtgtaggacatgttccgagaaggagcaccagtaccgggttttccttaattatgcctttggttaatatggcgagtttacttactttgttttccattagttagcacctcccacttccttgtattgttcaagcgctgcgcatacaccgtaatgtaccgcatttgatgatattgtagcgccgctgacatgagtaacgtttgtatcatctttagctgtaaatgcactgtagctgtcaagtcccacatactgttccagatacgaaggctcctgcgccttggtgccaagacccggagtatcagcatgtgcagtaaccttaacgcctgtaatgcagccgtcagtatctatacctaccatttcggtaagcagtccgccgaaggacttggatttaacggtaacaaccatacctgtgtcattgtcggcaatatagcagtctgtaacgaaaaccttgtcggcttcgaggacaaccagatcgccgtcataagctgtaaatgagtctgctgaaggcagaagctcagctcttgcctcgtctgccgccttaattgagttctgttcaattataggggctgtgattgagttaatgtatgcaagcgcacctgtgataacaaggcagattactacaagaacaagtgatggtgcaatatattctctgaatttattacttttcatttttctttgcacctccatacattcttttctgacagaagttatctattaacggagtaactatattcattaacagtattgagaatgaaactccttcaggatactggccgtacagccttatcagcattgtgataacaccgcagcctatgccgaatataactttgcccataggaagtatcggcgttgtaacatagtctgttgccataaagaaggcaccgagcataacgccgcctgcaagtacatggaatactgccatctgaagcgcgtttccgtcgcctgttgcagcatagtatataagcgcaaatacaaatactgttccgataaagcatgccggaattataggacttataatctttctccagatgaggaacagtcctccgataagcagcatcagggcgcttacttcacccattgaaccgcctatgtatcccataaacatatccatatttgacggaagctctccgccgccctctgcaagtatgcccagcggagttgcgcctgtctgcgcatctgctcctgtgaaaggaacaggccatgttgtcatttctgttgcaaatgctataaacagcactattcttgctgtgatagcagggtttacaaggtttttgcctatgccgccgtaaagctgcttaactatgatgatagctacaaagcagcctactattgcaatccagtaaggcagacctgacggcacgttgaatgcaatcagaacgcctgttaccgcagcacttaaatcgcctactgtctgaggttttttcataagcttgttgtatgcccattcgaagaacatacaggacacaaggcaaaccagtgtaagagctataactctcggtccgaatacatatatgctcattgcaaatgacggagcaagtgcaatcagaaccatcagcataattctggtggtatcagtgtttgatactatatgaggtgctgatgaaactgttaaattactgtatattttcttgtccattacttaattccagcctcctttactattgcttttccaagcttgttcataaagctgagaggtcttcttgcagggcagatatatgagcagctgccacattccatgcactgcattacctgcagattggaaagcgcctgcgcatcctttgcctcatatgccttggccagtgccgtaggtatcaggccgaaaggacaggctctgtgacatctgccgcagttgatgcaggcagtttcttcttttactcctgccttttctttggagaaggccagtatcgcattgttgtttttaacaacaggcatttcatctgatactatggctctgcccatcataggtcctcccataaggatttttctgggctcctgtttgtatccgccgcagaattctatgacatcacaaattctggcaccgataggaactattacgttctttggctgggctacagcatctccgtctacggtaattctctttgaaacaagaggcatacctgttctgaaatatttgcctacaaatgctattgtggtgacatttgataaaatgacaccgagctctgcaggaagcacacctgcgttcattttcttgcctgtaatctcatatacgagaactctttcggctcccttagggtatcttgcctgcagtttgaaagtatgaatattggttataccttttgatgcaagcagtttgtcaatgtgctcgatagcatccggtttgttctcttcgataccgatatatccctcatcaagacctatatatttcataaccagctggcagccggaaataagatcctccgcatcctcaagcattgctctgtggtcagaggtaatgaacggttcgcactctgccgcattgacgataagtgtatgaacgtcatcgatattcttagggttaaatttaatatgtgtagggaatgaagctcctccaaggcctaccagaccgctgtctctgattgcttttataaattcaggcagatccttagcctcaggtactttaattccttcataaggttcctgctttttgtctgcttcaattacaacaagtgtgtctgttcctcccatagctgatctctgttcttcgattcctgccacggtcccggaaacacttgaataaataggggcacttacaaaagcatctacatctccgataagctggccgactttaacgtagtcgcccttctgcaccagcggcttgcacggcgctccaatgtgctgagacatagatatttttacaacatcaggtacaggcattacttcggttgcactgccggcagtgttcttgtaatgactcacgtgaatgctgtgtaaatgttttcgactcattattgtgagaccttcctttctaaaaatatacaaaaatactctttacatcatactacaaactcaaacaaaaatccatacttttgcgacaattatggctaattggagtacagataattttttccgcctagcactttggtattatacaattcttttacgagcagcaaaagacctgccgcataaaatcagcagatcttttattaatacttttactactttattcagcaataatgcaacttggcttaataggcttaattatctgagaccccatatggtttaagttgtcttaaataatcaattacatcgcttcgataattactctgacacttccattcaccatcagcggttatcaccatattatatttagtattgtcgtcatatgctttccattcggaaatcaaatcattattagggttcccagtcttagcaaaagaatacaccatagattgtgcctgcgcaatcagatcatcagacattttatccggatctccagtaagttccgtatatccttctttcgttccgaattcaaagcataaatccatacaatgaagagctctgccccaaggagaaacttctgcagaatcaccactatattcaaccacttcgtctttatccggagcatattcccaataatacagatatgtatttttattattttttgattgtgtttcagctatcatttgagtaggatagttgaaatagatttcattgtataaatccatagcctgttttacaggatcatcaccttttttaatgaaattatcataaaatccatcgacttcaacaccgtagtatcttccgtatgcatcagaacgcattgtatctgtattcaccatatagtcatatatggattcaggatcagaaatcggatcagatacaccgttatcccaatccacagcatgccagtcctcttcaccattggttccgccgataagcagatctatactcgctgccgatccgttttcaagatcttcccaccatgtttcggaaattatatttccatcggcacatttcagtccgggatgcgctctgcccagtttttccacaatatctgatatattttctgaaatttcctcgtctgtaatctttgaagcctcttcaactgtacttactccaagcatatcaaagattatctttgaattctttttaacagtttcttttgatacggcttctcttgactgtgttccgctgtttataatcgctctgttgaaatatttatttgtatccgaatctgccatcagcatctcaactgctccgccacctgcagactgacccataattgttacattgtccggatccccgccaaaagcagaaatgttttcctgaatccatttaagtgcctgtgtctgatcttttttactgagattaattgcatcggcatattcatcagtatagccctccagtaccgacatatcaactccggacattattgacattctgtaattaatagttaccagtacgcagtcttctccttccggcagattccttataaagtattcgccatcataagaaggatctgtagttcctccccagatgcagcttcctccatgaataaacattattacaggtttatcttctgttttaacgtcttttgtccatacattaagaaacaggcagtcctgtgaacaagggtcctgcgaagctgcctccacctcatcataaggctgaatgcaattagctccaaaggaagttgcttcaatttcatcctcagaagttgtggtaacatctgttgcggctttaaacggttccatattaccgtaccttatgcccagaaattcatcaacaccatcgttgtcctgtcctatataggttccggtcggggctacagctttaacagctgagtcgctgcagccgcaaaaacacagtgtcatcattaatatacctgcaaatacaatcggcaataaaaactttttcatcttatacctcctaaactaaatctttgagtattattgcaataaatgactctcattgccatagattatatttgattattaagaattttcatataatacaatggtacagttttaagttataccttgattttttgaatcaattcatacctgttttttacatttaactttttatatatatgtgtcaggtgctgttttaccgtactctctgatataaacattttttctgctatgtccggattacttgctccactataaataaatcctaacagctccagttctcttgcggtcagtttatattccttggcaagaatctcccacgcagcctcttttctgtcactaacgcctaaaatctcaggaatataataatctgtcctgagttcatctttttttgcaaccatatataaagtcagtatacacatcactatagcaaaaatatgcgcaggatcaaaacttgcaaaaagtatattattcggaacctcatccaaacacgatattatatcccaattagtaatataaatcatatatgtaacaagacacccgctaaatataagcacccattttccctgtttctcccctttcatttttaaggcgccataaaacacaaatattatgcttattataattactgtcacatcaaagatgcaatttatatataatagtatgtttgatatttctttactactcattccaaatttatatggactgaatttggatatcagattcaatccatctacagaaattccataaataattgtatatattgcaaagccttttatctttattatataaggatttccagatactattactatggtggctatccattcaacaatcacaacaaaatatgccacatcagaaagtgtcgtcagcgtataaaacaaccccctggttatttggagttctgtaaaaaatgttacaaacatttcaaatacggtatatgccaaaaatgatatcagcagcattgaaacacttttatataaactcccggttcttttaaatgaaaatcttacatataaggttgcagcaatcgtacatattattattgtactgacataaaacagcatattaacaaacatcggaaataaaatcattacaaatctctactttcatattataccgttaaaagaacttctgagggttgtatgttctgccgtttatccatacctcaaaatgcaggtgatttgtagagcctgcgttgcctgtgcttcccacagttccgattttatcaccggccttaaccttctgtcctgctctgacgcttctggaattgagatgaccgtaccacgtcacaagtccctttgcgtgctttataactatgccctcgccaagacctccgtagttgcttctcgaccttgtaactgtacctgaagctgctgcgtataccggcgtaccctttggcgcagcatagtctgctcctatatgaaacgcacctcctctgttgccgtagcccgacacgtgagttgattttttaacgggctttacaagtgaaattcccctgtaggatttgagagtccagcccacagctttttttgattttctacttttgacggtttttccctctgttttagcatatgccgccactttgtagcaatacctgctttttatgctgagcccggagtctgtatatgaagtttttttacttccctttagagttttgatgcatatgtatttctttttgttcttgctccagcggtacaccttgtagccgtctgccgctttgatacgtttccagcttacctttattttatcgtaatctctgcctgcggcctttactcctgacggcgcagccggtctaacgggctttgccggtgccgcatttacattgtcctcagctgccgccggctcctctgttactgtatcaggggctgacggctcctgcgcagcatcccccgcgccctctgcttctgatgaaaaaacagcgacaggcgcaaagcacagtgcgaacacaaaaaaaatacttacaagtttttttatcataactgttactccttttattatttaaaatatttcgcaatctatacataaatcagtagttctgcggcctgtgaaatctgcccataaacatctcggtcttaactacatttataaatgctttagggtcctgctctataacgcaacgggtcactattttggcctctgtgcttgacaccacgcagtaaagcattgttctgttgctctgcgaatacatacccgttgccggaatttcagtaacgctgtggtgggttttttcgagtatcacctgataaagctcattcgggtaatccgtaactataaacagcgtaaccttgttgtgagcctgatagagaagccttatcatctctgtcgaggtgaactggaatatgattgaataaagcgccttgtcccagccaaacagtatgcccgctatggcaagcaccgtagcgtttcctatcagaatatagttccagacatccttgtttttcttttcgagaaaatacaccgcgataaaatccgtaccgccggttgaagtaccgccgataagacagatgcttattgcaacgccgtttacaaggcctccgaacacacttatgaggaggatgtcctgtgtaatagatattgcaggcacaatatccgtaaacagactcgtcacaactataatcagcgctgtatttagagtaaatctcttgcctattaccttgaaacttataatcgccggaactgcattgagcgcaaggcttataggcgaaaacggcagcgctatgccaaagaacctgtcaaatatggtctgtatcagaagtgtgactccgttaaagcctcccggataaagccctcccgtatgcacaaagctcttgatgttcaccgccataataaatgagcctagcagcccgaaagccagtattttaagctcggatttcagattaaatctggaactcataaaaatctcctcccgtcatttcatatgaatatgtccgtatagttttaaggcagacatcacaaccattgcgatgactgccgtttgtttaatagaactttcttggattgtacgccttgccgtttattctcacttcaaaatgcagatgagcgcacattgcgttgcctgtggctcccactctgccgattttatctcctgccttaactttatctccttttttgacgctgcggctgctcatatgaccgtaggttgtggtaattcccttgccgtgactgattttaaccatagtacccatgctgttgatagagccgtgggactctattacggtaccgtccgccgccgcatatatgcttgtgccgtgcgaggctctgtaatcattaccgtggtgcattctgccccatctccagccgtaggaagaaactgtgctcagtttagtaagcggcttaaccagggctatccccatatatgtcttataggttttcttttttactgtctttgaaaacttcccctcaaccttattatttccctgcagcttgtaggcgcataccttgtatctgtaggttttgttggatttgagttttttgtccgtatagtaagtcctgctgcctttgatggtttttttgagtatgtatttgccggaggagctgctgtatctgtacaccctgtagccgtcgcagttctttacttttttccagctcagcttaatattatttgaaatcgtcttaacctgagctttaactccctcaggcgctgccggtgccttaatctcctctgccgaaggtgtggtatcacttcctgcttcatatgtgatttcagcagggatttcagaccctgcatctgctgatgtttcctgcgcaaaacaagctccgccgctgcacagacttataatcattgccataactaatatataaataatcttcgttttcattgcttcaatttctcctgcattttgttcttaaagtttaccacaattttgccacatttgtcaattgcgcagttgtatgatatatttaaatcatagaaatattgacggaggtattccaaatgaaaaaaatacttacaagcgaatgtctttacggcggcagaacagtaagatatgatgccggcgactgcacagaaacaaatcctgtatatctcaaatggaaagaggaaggccgtctggttacagtctgtcctgaagtgttcggcggactgcctactccaagacctgattcccagagagtcggcgacaaggttatagcctgcacaggacccgatgttactgccgaatacactaaaggagcagaggaagcattaagacttgctaaagaacatgatgttgctttctgtattatgaagcaggacagcccttcctgcggaagcaaattcatttatgacggaacctttacagataccaagatacccggacagggacttgctgttgagtatctgagaaatgccggtttcaaagtatttgcagaagaggatatagacgaggccgctgcatatcttgcagagcttgaaaaatagcaaaaaacaaagaggtggaattccgcctctttttgtgtgccgtcatatgccggcgggcactgaaaatttaattgccttaggaacaacctcaagctccagagcatgaggcgatattatttcgccgtcatttgaaaccttcatagaccctgtgtttgatgttattttcaggcttcttaccctgtggtagtcaagtattccctctgccgtaaggttatcaatatgggtaccctttgaatagctgggataaagggatatgaatttggttcttgaaacctctttgataacgctgacctcaatcataccgtcatctaccagtgactgcggagagctctgaactcctccgccgcagtatctgccgttggctgccgccgtcagcagcagcggtccgtcgtggacatatccgttatcaagctctatccgaagatccgctcccttttttttgatgagaattattcccacgcccagaaggtaggccgcagagcctgtaacaaccccgccctttcggatttcggccgcctttgcaaccacgttgctgtcaaagcctatgtttatcatattgtcgcagtatctgacaatatgctgtccgtcaagctcatatgtacatctgataaggtcaacctctctgatattcccaagaagctgcgcctttatgtccgcaaagcttttgagaggtccgaaagcccttgcaaaatcattgcctgtgccaagaggcacattgcctgctacggcattgtcaaagccgtaaattccgtttattacttcattcagagtaccgtcaccgccgcagccgaaaaatctgaatacctcatcgggattgtcgctgcacatttttctggcaaaggcttcaccgtcgctcatacttctggtaaagtatacctcacagtcaagaccggtttctgacgccgcacgctctatacggctcagcagctccgcctttcttcgttttcttcctgcattgggattgattataaaatagtttttcatcgaatacctcgtatattactgtatatgcaatatacattatatcacctgttcaaacaattcacactattatttttttaccgttcttttatttttgatattttgagtgtatactatagatatatctaagcaacaggaggtttttaatggatttaagagtaaaacagcttgcagatgtacttgtcaactactcctgcaacgtacagaaaaacgaaaaggttttaataaattacgagggtgagtgctgcaaaccgctggtgaagcagcttatcaaaaacatttatgcccgcggcggcatgccttatgtggaaatgagggattcctccgtaacaagagaaattctgctgggagccacagaggagcagatgaattttcttaatgaatatcagcttatgcagatgaaaggtatggactgctacatcgcaataagagcgggaagcaacacgtcggagctttcagatgtaccgtcagacaagctcaatatgtactaccgaaaaacacagccggtactcgattacagagtaaacgaaacaaaatgggttgttttgagataccctaacgagtctatggctcagcttgcaggcaccagccttgaaagctttgaggatttctattttgaggtatgcactcttgattacgccaagatgagcaaggctatggacagtctggttgagcttatgaacagaaccgacagggttcacatcaagggaccgggaactgaccttactttctcaatcaaggacattcctgcaatcaaatgcgcaggcgagatgaacattcctgacggcgaggtatacactgcacctgtaagagagtcaatgaacggagttatatcctataatacaccgtcagaggaacagggcttcacctatgaaaatatccgttttgaaattaaagacggcaaaatcatcaaagctgcggccaatgacaacgagcgtataaaccagcttcttgataccgatgagggcgcaagatatttcggagagtttgcaataggcgtgaacccatatatcctaaaccctatgaaagatacgctgtttgatgaaaaaatcgcaggcagcttccatctgactccgggaatggcatatgaggatgcgccaaacggcaatgactccgcagttcactgggatcttgtcatgatacagcgccctgaatacggcggaggtgagatatattttgacgatgtgcttatcagaaaagacgggctgtttacactgccggagcttatgtgcctcaaccctgaaaatttaaaatagcggattaactgcaaaagcctgctttcacagcgggcttttttaatttaaacagttcataaaacaaataatatatctattgacaatctgataataatcatacataattaattataaatcgaacaccgatgttcatgtcaactgttttttgaaatttttttaatttttttcgaattaaatttacagaggggatatatggatactaaaaatctctttaaaatgggggaagtcacaaaagcactgggccttacaagaagaattcttataaattatgaggaactgggacttgtaacgcctgcctttaaaaatgaaaatcagggttttcgctactattctgccgacaatatggtgcatatcagacttatacgcactttgcagaagctgggactgtccctttctgaaatacgggagtattttaatgacaccacacatcttgaggatcagattgacagactggtgctgctcagaaatcagctcgaccagtgcattgcgcagctgcatctgcgtcagtttgaggaaagcagtcaggaaatctatcaggttacactgcctgaattcaatgcattctgccgcgattttaaaaccgctgatcttgcggaaaaaacagcgcagcttcgccagacatatatagatgcgctcaagcatttccctgcagataacgaaaacagaatgtgtatccagattccggcaggctcggattcagagggcacatatattatacctgtgctggcagatgccggtttaaaggacataaggcatttcccgcaggcagccgcaatatgtatatattacagaggaccgtatgagaattttcccaatgttcacgaaaggcttatgcagtatgctttagacaacaatatgacgcctcacggatacttccgcaatatatatatggagggtccgcctacccacggtacaaacaaagaggcatatgtcacacagattgccctgcctatcaaattcattgaaacctgaaactaaaggtctgtatacgcagcatagactgcgcacacagaccttgtttttattgtatatagaactggttgtcgctgaatttatagatatagttacctcttgcaagtttcttgttctcatagtagctgtgataaaatcccagatagtatgtatctcccgcaaagaacccgttctcaagctcatacccgcaattgaccttaatgcggcatttcagcttgccgcttttgtcatacaggctcagatagcttggcaggcttcttacagaggtgctctcctgagatacgatatctccgtttagcatattaagccccgcatatatcgtataactttttttagccgaagtctttataagctcaagaggtctgaattccctgtcaagcattatcatacctttgatacctctgacccttacataatagcagttgttctcgctgtcataggtaatggcgttatacccggaggtttctgtctgcacatcctccgaaagtccgtgcagaaataccggaagttctattttgatattccttttgaccttgagtgtatcgggattgattacggctatggtatccggtacgccggtaaggtgtattgctattatctctccagtacggtcattatatgtaagatcgtttccgtgatgaattttcagcgctgatgataccttaaccaatttaaaatcctttagcctcacctttgctattttgcatttttctacagcgcggttgtaaagaatatagtatgcgttttctccatcgctgcaggctccctgaaatgtatcatacccaaagagtttttctcctgcggcagctctcaggttgtatgtacccgcagaaccaaaccttataatcttccctgtcatttcgttataggtttcgttttctatgcccgccgtaatgtttttttgaatggtcacagcatccgctgtatacggtatccccgatattataactaatgcaagcagtataacacaaaatcttctcatatccctttgctccctcttaatccagtttctctctgtttctctttttcttttttactgctgcaattatgcttactgttataagcagtaccgcaataattcctgccgatatttcaagcagtctgctgtttttctgatgctgtgtatcctctgactttacagtatcggtaccgtttttatcactgctgctgttgtctgcactgccgctgtctccgtctccggtattgcctgcaggctcattggctgaaatttcttctatcgttatgttcctggtgacatacggcgtattcatcgccttgccgtcaaggtcataggcctcctctgtgctgattgcaacagaagctgctcccgttttgagcgctttgaatttgagattaaactccacagtcttaccattatcagagctgcctttaagcttgataataccgccgtcgcccgtacttgagcctccggatatgtactccagcagatctgtatcatagctgacgctgccttttattgagtcaagataatccgaactgtattttacgtctacagtgaagttttcgcctgctgaaatattactgctgctctctgcatttaaattgagtgatgctgcaaacgcactctgaggtactgcagtaattatacacagtatcagcactgctatgaattttttcataatgctcttcctcctacttccttataatcgtcagcgtataggtccttgaaagtccgctggtcgctttcactttaatatagtgggtattggttcctgttttaagtgatacggtatcagcgccgcctgttacctgcgcgccgctgtcatttgctttggcggtaaccgcaaccttatctgtatcgtgaggaaccgtaactgtatatttttgagtatacctgctgaagttcttgtcaaggcttaccgatgcctctcctgcggttactttaatgcggtctaaaagattgttgttgttgcctgttgtggtcggttttttgcaggcagatgacggcatactcttgaatacaggtattttaaatactatggcgccgtctgcaagagagctgtagccctgcttcataatcatagcctcgctttcggctccctgtatatttgtcatatactgatgcgtgcctattgcgtttttgctgtcagcgcatacgttaaatttcttgagatacagggtatcctgtcccgaattcacatagccttcggcataaaacatcgctccgcccttgagggacttgtatctggtgttccacggcctgccgtaggtggtagcgcctgcgcctgcacccgatgcccaccataaacctctctggactgcagacatagtagaggttttgtaagctccgcagttaaagaaattgtatattcccttgtagcccttgtacgtgcccgataccgagccgtttgaaaggctgccctgctcctgtattatcatagccgcaagcacgtttggatttactcccgtattcttgcctgcgtaatatatggcgcttgcatatgtagagtaaggctcgtcagggaagtccacatcaagaaatgtgcctttaactatttttttaactgtcgatatgctctgagcctcgctgtcaaaagcatggcttacaaacatatatatgccgttttcgttaagaaaattacgcggatcgagataatatttgattattccggtatacgcgcttacccagccgccgctgtcaaatacgacatatttgttatttttaaagtcgtaggctccgcttttcattgatttccatgaatcataggcgcctgaatatataaggtttctgcctaccatcgtttcggctgcaactgcagcagaccatgctgtgcctgtatgctcagccctgaaaatccagtccgggtgtttttcgtgaagcgcccgaagataaggcttgtagctttcgggaaagccctcgttttcgagcattgtttcaaagtcagatgcggtgtttcctccgctgcctccgctgttatccctgtattcgctcactttaacataggcagaggatacatatccgtattcgctgccgaattttattttgtaccaaagcttcccgctgctgtcttttttgcttcccagtattctggctgtcgcccccttgtcgatgcttccaagcactcttccggaagttccggcggagactctgacattaagcggtccttctttgactgttatcatctgttcctttgtttcctctgccggagccgtcgtgctgccttttttgacatatgaagcccttatatatgacagcttgccgttatatgtaactgcataccacagttttttgctgctgtcatatttgtagcctttaagcgtaaccgacgctccttttttgagagttcctctcaaagtgccggaggttcccgcagaagctctgacgcttaaaggtccgtctgtaaccgtagctttctgcgccggagtgtaaattgtatatgctgttttggttactgtcttgacataggccgagcttatatatgaagccttgccgtcataggttatgtaataccatttagtgcttccgtttgttttatatccttttagcgtaacctgctgccctttggcaagctctcctctgactgatgaggtcgccgaggccgcgcttctgacattaagcggccctgcggttacctgccccgtcttataggatgaatatttaaccagttctgcgcctgatgaggctgttaccgataatacaaatatcagagtaaccgttatcataactgcaataatgcgcactagtctgttcattgctgcttctcctgttcaatcccctgtttaatatccggtctatatacctattacctctttaatcagtacaggtatttccgcccggttttctgatatttcaaatgcctttgccgcctctgcagccgcatttgaaagctttgtttcgtcatttgcatatactgctgcaagagtttcaccgcacttaacagcatctccgactttcttttcgaggtatatgcctgccgcaaggtctatgctgtcctccttggtggctctgcccgcgcccgaatgctgcgatgcgaggcctattcttcttgcttctatctttgctacgaaaccgtctttttcggctttgatttcaacgctgtgggccgcctttggaagcaggctgtaatcgtctgcaatgtcaggatctccgccctgcgccttgacaaattccataaatttctctattcctgctccgctcagcatagcatttcttgccatctcatagcccactgccggatctgccgccttacctcccatatacagcataatgcccgaaagtgtcagtgacagctcctgtatgtcctcaggacctcttcccttgagtgtttccattgcctctataacttcaaggctgttgcctaccgctctgccaagaggctggctcatatcggttataacggcggctgtcggaacaccgtcgcccttgcctatatggcacatcagctctcccagcgctctggcatcttcaagagtttccataaatgcaccattgccgcatttaacgtctaaaactatggcgtctgaacctgccgcaagcttcttgctcattattgatgaggttataagccccagatttcccactgtcgcagtcacatctctgagggcgtatatttttttgtcggcaggagccacatgggctgtctgtcccacaacagctatgccggtttcgtttacctgctttataaattcatcaggctcaagcgatgtcttgaagcctctaattgattccagcttgtctacagtgccgcctgtaaatcccagtcctcttccgctcattttggcaaccggcactccgcaggctgccgtaagcggtcctactaccatagtagtcttgtcgcctacgcctccggtcgaatgtttgtctaccttgatgcctttaattgatgacaggtcgacaacatctccagaaaatttcatagcctttgtcagagaatatatctcatctttgtcaaggcctctgatatatgccgccataagaaatgcggcagcctgatagtccggaatacttccgtccgtatatccgtttacaaagaatctgatttcttcatctgaaagtataccgccgtctctttttttctctataatatcatacatattcataagtcttacctcatttttttactctgtcaagcacactggttccaaggcctgtgccgtctactccaagtatatcgcataccgtagcccctatatctgcaaaggtgcttcctgttccaagattaacgcttcttatatgtttaccgtacattacaaaaggaatatattctcttgtgtggtcagtaccgctgtgaacaggatcgttgccgtggtctgcgcatatcataagcacgtcatcatccttcatagcggctaatatttccggtatcctgctgtcaaaggcttctatggctttgccgtagcctacaggatttcttctgtgtccatactctgagtcaaattccacaaggtttgtgaatatgaagccttcaaattcctgcccgagagcctctattgtcttgtcaactccgtccatattgcttttagtcttaaccttgtctgtaacaccattgccgttgaatatatcgtttatcttgcctacggcatatacggtctttccggcttcctttattttatccagaaccgtcggtgcaggcggatctacggaatagtcatgtctgtcgctggtgcgtttgcgtttgccgttttctatgatatacgggcgggctataactctgccgcaggcgtattcgcctacaagcatatttcttgcaatctgacacatctcatacagtctctcaagaggaataactgccgtattggcggcaatctgaaatacgctgtcggcagatgtgtatactataggcttgcctgtagcctcgtgctcatcgcccagcacctctattatctccgtacccgaagccgggtagttgccgagagttccaacgcctatggcctcctcaaacttatccataaattcctttggaaatccgtttggatatgttttgaacggaacctcggttttaagacctgcaatctcccagtgtcccgtagtggtgtccttgccctttgaaagctccataaatctgccgtatgcgcctgtcgggcttttaactgcaagcctgcctcctgcagccccgtctatattgcagaagcctaagttttgcaggttgggaatgttaattcctccctcctgatcgttcatcacatcgactatgtgtccgaaagtatctgctcccgcatcgccgtaatctgccgcatcaggcagcgctcccactcccagactgtctgtcactattaaagttactcttttcatttttcctatacctccgctatgagtttcgggcaggccctgagataatcaaggcttaccagcatatatctggcaccgttaaataccgcctgaagtccgtttttgaatacttcaggcccgtgaagatgtccgtacacgacagtctccgctccgtactccgtaaacagctccgtaaatccggagttctgaaatttctcgtttgtaggcggataatgcagcacccctataatccgctcatatcccgcctgttttgccgctttgagtgaagcctccactctaagcagctctcttttgtatattttttcgtcctgcggggtgaacccgtcatttcccgggcatatccagccgcggcttccgcatatggcgtatccgtctgcggcatagaaatggttctgcaggaagtatacatcatcataaagctgattgagctttgtaatgccggtccaccataaatcgtggttgcccttgattatgaccttgcggcccggcagctgatgtatccactcaaaatcggcataagcctcatctttagtcagtccccacgatatgtcccccgcaattataacggtgtcggtttccctgactgtgtttatccagttttctttaagtctctccgtatggtttgcccataacggaccgaatatatccattggcttatctactctctcgtcaaaagaaagatgcagatcacctattgcgtatatgctcattaactattcctcattatcgtttattccaagcagaccgctgcttgtttcttcgggcagagccgtaacatctctgagtcttctctgtatcacgtttgttctggtgcctatcagagcatccagctcattgtttgcctgattaattctctcctgggcttttttgagggtcttttcaaacttgccaaactccgtcttgacagcaccaagcacatcccatactctgctggagtgcttctctatggcaagggttctgaagcccatttgcagactgttcaggagagccgccatagtagtaggtcccgcgatgttaaccttgtattctctctgcagcacctcaaccatacctcttcttacaacctccgcataaagtccctcaaacggcaggaacagtattgcaaagtcagtggttgcaggcggatctacatatttgtcatgtatatatttggccgaggccttaatcgatgcctcaagcgccctgccgcaggcctctatctgagccttgtcgcctgtctcataggcatctgccagattgctgtatttgtctgcagggaatttggcgtctatcggaagatatacaactccgtcctcatcgccgggcagccttattgcaaattcaaccctgtcagacgagccttttttggtggcaacgttttcgtcgtactgctccttagtcagaacctgctcaagaattgccgaaagctgaatttctccgagtatgcctcttgttttgacatttgacagcacttttttgaggtcgccgactcccgatgccagattctgcatttcgccaagtcccttgtatacctcttccagtctttcgctgacaagcttaaatgactgtgacagcctctcctctaaagtcttctggagcttttcatctaccgtcgctctcattttttcaagctgaacgctgttctcgtcggtaagagccttgattttgctctccattgcagtccttatattgtcaagcttctgctcgttttcgactgccatatttgaaaatctggtattaagctccgcaagcctcatatcctgcgccttggcagactctttcatattgtttgatatcatctctcccagcatctgaaatgagctgtttacattctgaagcgtctcggttctggagcgcgctatctcgtttttaatctctgcgctgtcactgccggcggcaagcttcttctcaagtgatgatatcttaattattgcaataacaagaagcaccgcaataattccaagtaaaatatatataactgtgttcatcggatttcctttctattatgcacatatcccgcatactatataagcagtggaatttcagtctaattataacatataagcgggaggtttaaaacacaaaatgatagaatacctgctgacaggaccctttggtattatctctatgacattcagatatttaatatgtatgctgacccctctggtaacggcatttgccttctgtcagctgtttcttgaaaggtccgggataatactgcgccttgaaagccactccggaaaattactgtcgcatatggggctttcggcagactgccttctccccctcatgtcaggattcggctgcaccacggccgcgctgtccgccctgtcgggcttaaactcctcccgtgaaagatatatagcggcgtttctgctgtctgctgcagttccctgctctgcccagactgccgtaataatcggtatcgccttcgtacttcctccctccctgttcatattctatatatcttcagttgccgccgtatttgtaatttctggtatctttctcaatatactgcttcccgcagataaaatatatcacacgccccgtactaaaaacggtgccgtgcacatgcctgccatgtttccgcttttaaaagtctctgttttatacggcatatcctttttaaaggatacgctgcttccctttgcagcaggctccgccatactttctgttttaagctatacggggtttctggattatctgtgccgcatatgcgcgcctgtaaccgaaagcttcctgcagctgccgagagaagctgcgtccctgttcataatgagcattgtaaaaagagatttcggagcggcgggacttctgtccgtaatagagcagagctcattcacataccggcagcttacggtttcaatgcttattctgagcctgtttgtcccctgctttgcctccctcataatacttctcaaacaggagggcttcgcaaaggccctgtccatatgggcgggaagccttgcactctctatcctggtgggaaaacttgcctctctgcttcttatctcttgacactcgcccctgttttctgtaaaatatactcataatcctgacacaaagttttcgcactgcgaattctgcctgaaaggtgcaatatatgagctatcagtatatctgcattcttttgggggtgcagatatttttaatacacaggaggcttgcaatggaaacaagagttgccgttatgggcataatagttgaaaatcccgattccgcttcatatctcaattcgctgctgcatgaatatggaagctatataatcggaagaatgggaattccctacaaagaaagaaatatcaatataatatctgttgccatagacgcgccgcagaacatcatttctgctctttcgggcaaaatagggaacataggcggcatcagcgtcaaaacagcatattcaaatgtggtgtcaaatggataataatctgaaactgctgatagacagactggaagcagagcgctgcctcgaaaaaaacgaatacaaaatgctgattgagggtttttcagaggaacctgcagcctacgccgcttcaaaggcagacagaataaggcagagcatctacggaaaagacgtatatatcagagggctgattgaagtcagcaacatatgcgcaaacgactgcctgtactgcggcatcaggaaaagcaatgcacagtgcgcgagataccgcctgcctcttgagacagttcttgaatgctgccgcaagggctatgagcttggattcagaacctttgtaatgcagggcggcgaggacggattttttactgcggagcatatatgcagatatgtcagcagtatcaaaaaaagctttccggactgcgcagtaacgctttctcttggcgaatattcaaaagaggaatacaaggccatgtatgatgcaggcgccgaccgctatctgcttcgtcacgaaactgcggacaaggctcactatgagaagcttcaccctgcgtcaatgtcctttgaaaaacgaatgaagtgccttgagaatataaaggaaaccggttttcagacaggctgcggatttatggtcggatctccttatcagagctctgacacacttgcagcggatcttaaattcatagagaagtttaaacctcatatgtgcggcataggaccgtttatccctcataaggacacacctttcggaagctgccctgcgggaacggcagagcttaccgtttacctgctctccctgatacgccttatcagacccgacatactgcttcccgcaacaacagccctgggaactatagacaatatggggcgcgaaaaaggcattcttgtaggtgcaaatgttgtaatgcctaatctttcacctgtttccgaaagaaaaaaatatatgctttacaacgacaaaatatgtatgaacgaggaggccgccgaaaaccttgcggctctcaaaagaaaagtttcggccataggctatcgcattgtcacagacagaggcgatttcagaaatataatctaacgaaaagttaattctgaccgtaagaaaggaaaaattatgacaatctacaatccaaaatcacttaaagctgatgaattcatcaatcacgaggagatactcgaaactctcaaatatgcagaggaaaacaaaaacaatatagagcttatcgacagtattctcgaaaaggcaagaccgagaaaaacagcggacggaacagtctgtcagggtcttacccacagagaggcttccgtacttcttgcctgtgatattcctgaaaaaatcgaagaaatgtacaggctggcagaggaaatcaagcttgccttttacggcaatcgtattgtaatgtttgcgcctctttatctttcaaactactgcgtaaacggctgcgtatactgcccttaccatatgaaaaacaagcatatcaggagaataaagctgacacaggaggaaatacgcgaagaggtaatcgcgcttcaggatatgggccacaagcgccttgcaatcgaagcgggagaagaccctgtaaacaatcctatcgaatatatacttgaatgtatcgatacaatatacagtatcaaacacaaaaacggcgccatccgccgcgtaaatgtaaacatcgccgcaaccactgtggaaaactaccgcaaattaagcgatgccggcataggcacatatatactgtttcaggaaacctaccacaaggaaagctatctgaagctccaccctacaggacctaagcacgactatgactatcatacggaggccatggacagagcaatggagggtggcatcgacgatgtgggtctcggcgttttattcggccttgagatgtacaaatatgaatttgcaggtctgctgatgcacgcagagcatcttgaagccgtacacggagtaggacctcacaccatcagtgtaccgcgtatcaagcgcgccgacgatatagacccgagcgcatttgacaacagcataagcgatgagctttttgaaaagataatcgcctgcatcagaatagccgtaccgtacaccggaatgataatttccacaagagagggggaaaaggtacgtgaaaaggctctttccatcggaatatcccagataagcggcggctcccgcacatctgttggcggatacacagaagaagaaagacctcacgattcggagcagtttgacgtatccgaccagagaactctcgatgaggttgtaaactggcttatggagcttggatatattccgtcattctgcactgcatgttaccgcgagggcagaacaggcgacagatttatgtcactttgcaaaaacggacagattttaaactgctgtcaccctaacgcacttatgacacttacagaatatctcaccgactatgcaagtgatgatactaagaaaacaggctttgcccttattgaaaaggagcttgaaaaaatacctgctccaaaggtaaaggctatcgcaagggaaaacgtcgatgccatcaaggcttccaacagacgtgatttccgtttctagcagggagaatattatgagtcttaatgaacaggtatccgcagaaagactgcatatagggtttttcggaatgagaaacgcaggcaagtcaagtcttgtcaacgccgttacgggccaggacttgtgcgtggtttcagaaacaaaaggaactacaacagaccctgtcagaaaagcaatggagcttctgcctctcggaccggttgtaatcatcgacactcccggccttgatgatgagggagatttggggaaattaagagtcgaaaaggcgctgtccgtactcaacaaaacggatatagcggttctcgttaccgatgcctcaaaagagcttatgcctttggagcttgaccttatccaaagctttaaggagaggaatatagactatataatcgcatataacaagtcggatctgcttggcagtatccctgcggcaggcggaaactcaatatatgtaagtgccattgaaaacaagaatatatatgaactcaaggagctcatcgcatcttttgcaaaggtgcagaaaacagataaaagagtaatagcggatctgataaatccggaagatattattgtacttgtcgtacctgtagacagcgccgctccaaagggcagactgatactgccgcagcagcagaccataagagatatcctcgatacgggagctgtctgtatggttacaagggaaacagagcttgaaaaaacacttgcctcgctttcccggaaaccgaagctggtggttacggattcccaggtgttcggattcgttaacaaagcggttccaaaagatataatgcttacatcgttttcaatactgtttgcagattacaagggtgatctaaggcaggctgtaaaaggcgcagccatgctcgacagactgaaagacggaaatactgtccttatctcagaaggctgcacccatcacaggcagtgcgaggatatagggactgtcaaaatgcctgcgtggattgaaaagcatacaggcaaaaaactgaattttgctttcacctcaggcggtgatttcccatcggatatgtcacagtatgctctgatcgttcactgcggcggctgcatgcttaacgaaaaggaaatgaaataccgcataggctgctgcaaagaaagcggcatacccattacaaactacggtattgccatcgctcatatgcacggtattctgaaacggtcactggagccgtttccggatatacttgacgagctgaaataacaaaaagaccttgttcagagaacttccctgagcaaggtttattaattccgaattattcacaggtgctgtttctgtatttcggaataaaaacaatatggcaagtgcaattccggcgtgtctttgttataccctggttatccgtatggatacctcctatgctttgatatgtctgcgaaaccaatatcattacagcataggaattttcatattacaggcaatacggctgctatgcctgctcccccgtctcggattgggtattgaaagattttctcattcaatactgactgccactccgctgatccttgcttcaatagcaagctccgtacgactgccgcagcctgttttttcgagcatattatgtatgtggttttttactgtgctttctgatatgtgcagcttgtgcgctatattcgaattagaaaaaccttttgtcataacacgcagcacctccagctctctttcggtaaactctgtactgtaggcaagccccagcttaactctcggtgtactgtcgggatatacattctcacctgacatcgttctgtccataatttcaagaatagtttcttttgatgtttccttgtaccaaaaactgtctatgcctatttcttttgcttttttgagccatgaggcttcaggcatggacgtaactgcgattattctgataccggggcagagtttttttactttcatggccgccgcaaacccgttggagccgtcgttcataagaatatccattataacgagatcaatatgctcgcttgccgcaaatgtatcagcataggctgcggattctaccatacatgcaatttcatatttctcactcgaattaatatacatttcaaacagctgtcttgctgtaaactgatcctctacaatcataactctggtctttgacatctgtaatttcctttctgtcatatcgtacaatcatatcttttgtatgccttaatcagtattatacacataattctatgatattcccccacccatatatgccgaaaaggtggggaaaagttaatattttttgttttttacgatatgaaaaagctctgatatcattcaatctctgatgtatgaatctgatcaggcagatttatgttcagggcaaaacgcggcgtgctttctattgtcatgcttccccctgcagcttcaacaatacgtcttgtatttttgagtcctcccgcttcttttacttctctttcgggttgtctgccgtcatttgtgattcttgcggttattatatccccttcggtttttatttcaagaaaaattctgtgacctccggcatgttttacggtattggttagacattcccggagagccgtcattatgatatgcttctggtgttctcctgccggaagcactcctgtatgcgctatatccacgttaaccgccgctgcgtttttgagaagatttgtccattcatcttccggtttttctgaggccgcttcgtgcctcataaccgtaactatgtatttccacaatgcaagcaggctgctgcggtttctttcgtcaaagggctgctccatatatgatctgtacgtgagcagcgctctgcccagatcgtcatgcactttgatttttgctctgagaatttctttttctcttgtgagagcttcaatcctgctgttaaagctgcggagtctttcgttgacttcgcttaatttccggttgcgctgcgacagctcacgattgagcctggcctgctctgtcacattatatgcaataatctctgttatttccgaatttccattcatcacagtattatatctgaaatcccatacctgtccgtctgcttcttttacggttactgcaggctgtgtgcgaaggcgtctggcatttctctcaagttcggcatttctgatgttttccatgaatatctccgcattcataatctcactgcccagcagtctgccgcagagcatattcatctgcgtgttcaccagcagaggacagccgtctttgtcagaaaaacagatcccgtccggaagtatatccataccttctctgatggcatcttccgtaatcattgttttccctgtccggattatatgtatatgaagcataaccgcaacagtggtaaaaaaaacaaataccgcagccagctcagcggcgggcagctccgatatgattgcggtggtatggcggctgcattcgcctgaaaacctgtgtatatataattctccgatttcataaagcaccgctgca

SEQ ID NO: 2018 - DNA, 32759 bp, Unknown
  16S sequences of unknown bacteria
tcgtgagatttcgggggttcgaagccatgatatcttttttggcttcactatatggctgcgatacagggattcgaaccccgacaggcagagtcagaggctgcagtgctacctttacactatatcgcaataccgcgcttgtatatcaagcctttatattatactacatttagaaaatttgtcaagggggataaatgttaaatttcaatgacttatgtgaagacggtgtcgccgcgtttcattttttacggcatttgcgtccgctttttgaaaaagattgactgttcttgttaaaagtgctataatacccatgtttcctatggtatatagagaaagaaagcagaaaaacacgcagaaaggacaagcattatgtctgagaaaaaaacattgacaaaagggcagaaagcccgcaaagccatcattatcgttctttgctgccttgtggggctggttctcgttttgctcctcggaatcagaggatatttccgtattcccgtaagcgagtattacaaaaactccgaaaaagcgttcgtcataccgggactttcggacggtatgacacatcagggacttgcatacgacagcgaaaacgacacgttccttataaccggctaccgctccgacggcaacgcttcgcaggtgtccgtcgtttccaaggctgacggcaaagaagtcaagagacttaatcttgcaaacgaggacgggagcgcattcacgggtcatgtcggaggtatcaccgtatacggcaaatatgtatacgttgcggacaccgacggactgtatgcgtttaacagaagcgacatcgttgacgcggctgacggcggcagcataaaagcggtcggactgttcaagacctcggcggcgggcgacactctcggcgtggcgttcacccatgttgagggcgatatgatatacgtcggcgagttttaccgcgaagaaaactatcccacgcccgattcgcataaatataagactgcggcgggcgacgataacaccgcgcttatccttgcctataaacttgacgcagcggcgcctctcggaatttccgataagatagagtgcgcatattctgcgcgcggacttgttcagggtatgtgcttcgacgccgacggaagaatttatctttccacctcttatgcggttgcgttctcgcacatctacatatatgacgcaacaaaagaagagggcacggtgactgttctcggacagaccgttccgcgctatgttcttgacagttccacgcagaaaggcgatataaaacttgcgccgatgtcggaagagatagttatcgttgacggaaagctctacacgatgtgcgaatcggcgacgaacaagtatattttcggtaagtttacttccgcaaagtattgttacgcgaccgatatatccaaatacgttcaggataaataagttttctcgataacacagggatataatcaaaaacggacactcattttgttagtgtccgttttgttttttacatcccgttttgtttcttacagcgtgcttcggtcgtccatgacgcgatagaacaggtcaaccatttcgtcgggcgtttcgtgaaagtcgcgcgcgacccattcgccgagcaagccgaacacgccgtaggcgtaaaagcggctctgataccgttcaagctgcgttgcgtcgtattgaggcatcatgatgatgcagaacgcatcatatatgcaggtttgcagtcccgtggcgtaaagcgttttcagcagattgcggttgttgtaattgaatatgaaaaagtcccgtgaattttcaagattgaaacgctggcgctccgcgatgtttcgctcttccgaccaacgccgccaaagcgcgacgagtttgaacgtcagcgcctcggactttgttgtaaaatggcggaaccacgtcgaacgtccgacgcccgcaagcgaggttatctcggtcacggtcaccttgtctatgtctttgtctttcatgagtttgagaagcgcgtcagccatacattctttcagaaaatcggtcgtttttgttcctcttgccatattttcctctcttaaaaagatacttttcgggctgaaagtctcattttgcccgcaatacgttgttttgacaaattttgacgttataatgatactcgagtatcattaaaggatttcggtatcattatataccgactgcggcgatttgtcaacagacggcttttgagaccgaaaaggagaggaaacaaaattatgaggattaagataggaacggattcgacggcggatattcctcagaaagtccgcgagaggctcgacataaacgtgctgccgctttccgttgttcacgagggcagggaatacgttgagtgcgttgacataaagcccgaagaattttacgtcacgctcgaaaactgcgaaaagataccgacttcttcgcaggtcacgacgcaggcgtatgtcgatttttacgaaaaaacgtttgcggcggggtataccgatcttattcagatttcgctgaatgcgaaaggttcgggaacgtttcagtcgggcgttgtggcaaaagaccttttctttgaggcgcatcccgaggcggcgggaaaattcgcgatacataacgtcgattccgaaacatacagtatgctttacggtcacgccgtgataaaggcggcggaaatggcgcggaacggcgcttccgtcgaagaaattattgcaaaagtcgaacgcatggtcaaagcggttcgcggtgtttttgttccgcttacgctccgctttgtcaaaaaatcgggcagagtttcagccgcggcggcgtttctcggagatgccatggggttgaagcccgttataactttcgaaaacggagagtcgaagataatctccaaaataaggggcgaaaaacacgttgtttcggaactttgcgacctttgcgcaaaagagcgcgcagcgggaacgccctatgtcctgattcgcggaaacaacgaaaaaatgaatgaggaaatgcgagaagtgtttgtcgccgcgttcggtcagcccgaatacgaatacaatatcgggtgcataattgcaatgaatacgggtcccgatatggtgggcatggtttattacagagatgagatataaaaagaaatcacggtagaagttattaaaaaatcacacaaagcaaaaggtgttcgaactaaaaatcagggacggtaaaaagtgctgaacggatgagcaaaccccgcgaatcaaagggtttcgggttcttatttgtctgacggctttttgccgtccctcttattctgttgacaaagccgtcggtttatgttagtatgtcgatgaggtgaaaacgcatgagaaaaagaatactgtttatcgggacgggcggaacgatagcctccgacctgacaaagggcgcgctgtctccgtctctcggggcttccgaattgctgcggctcgtgcccgacgtttcgaagatatgcgacatagaagcagaacaactctttgcgcttgacagcacggatataatgcctgaacattggcttgcgcttgcggcgctcatacacgaaaaatacgatatgtttgacggctttgttatcgcgcacggaacggacactctggcgtatacggcgtccgcgctttcatatctcatacagaacagccgaaaacccgttgtcataaccggtgcgcaaaagccgatagggtttgagacgacagactcaaaacagaacctctccgacgctttccgtgtcgccgcttccgatatgcggggcgtgcttgttgttttcggcggaacggtattgctcggcacgcgcgctcaaaaaacgcgctcaaaaagtttttctgcgttttcaagcccgaattttccgccgcttgcgacggttcagaacggcagactgactgtgtttttcgaaccgaaagcgggcgaggaacgtttttattcgcgccttgactcttccgtcgggcttctcaaacttacacccgcaacggatgcgggacttttgcgctttatgcttgaccgatatgacgcgcttgttatagagtctttcggtgtcggaggtctgcccgacagggacggagaatttcgccgcgaagcggaacgcgccgtcaaaaaaggcaaaacggtggttgtcacaactcaggtgcaaagcgaggggacggatcttttcgtttacaatgtcggaagcgaccttgccgcgctcggcgtgcttgaagcgtttgacatgacgcccgaagcgtgctttacaaaactgatgtggcttttgcctctgacggacgacccgacggagcgtgaacgcctgttttatacacccgtcagtcatgatattctgccgccgcaggaaattgcggtcaactaaaaataattaaggttttttatctttgtaaaataaaggggctgtaaaaaaacgcaagttttttacagccccttagtcttttgtaaattttattgtttctcggaaaatctgcggtctttggtgtaatactccctgtcccgttcgcttatcgggcgcagaacgcggcacgggtttccgagagccacaacgtttgacggaatgtcctttgtaacgatgcttcccgctccgataacggaattatcgcctatgctgacccccggcagaacgataacgcccgcgccgagccagcagtttctgccgatatgaatgggcagattgaactgataaagtttttcgcgcagttcgggcaaaacggggtgtcccgccgtggcaagcgtcacattcggtccgaacatcgtgtaatcgccgacgtatatgtgcgtgtcatccacaagcgtcagattgaagtttgcgtaaacatcctttccgaaatggacgtgagcgccgccgaaatttgcgtgaaacggcgtttctatatagcaatcttcgcctatttcggcaaacatctctttcagcagcgccgcctttttctctgtttcggacgggcgcagggaattgtactcaaaaagtttgtcgaggcattcctgctgatatttcatcagttcggggtcgtccgccatgacatacggctctcccgcgtgcattttttctttcacggtcattttttcttgcctttcttgccgtcggacaacgcttttttgctctttttctccgcaagtttcaacgttcccgttcgctctgcaagacgttgcacggctttttcggaaagcatattcttcttttcgagcggacgcagtacaagcgagtcgaaacgctcggtataatgccttgcaataccttcttttttaccgccgtttatgaggattttaagcaccgttatcaggtttgcgactgcggcaagcaaaaaggcgttgagcgcaatgcttgcaagcagtttgtacgcgacaaaatgtgttgttgttctcgacgggtcggagttcagcagattgggcgaaagaaagttctgtttgagtatcaggtcaaggttttcgttcgtctttatcgcgttcacgtcgggtgtctgttcaagatatttgagcggaaaaccgaagtgcatgggttcgagttcgtccgccgtgaatgttccgggccatgcgggcaacaggcagaaaagcagacatacaagcaaaccgaaaacagcgaatttaaggctctttttcgcaatgcggggaaagaacgtgaagaacagccctattgccgctatccacgccgtgtttatgaaaacgtccgcaataagcagccctatattccaatccgtctcatagaggtcgtagcgcggcagcaaaaagcccttgttgacgtttttgttgaagtcttcgtttatgagcgcggtcacttcgtcgtcgcttcttttctgttccgcaaagccgagaggaaaaccgtagtccacggcgtttaactgttttgtctgtgtgaacgtgtatggcaatttcggaagtatagccgaaagccccgtcacaacacagcccagaatcagaaaaacgacggcgtaagcgatgattttgcccgcttttccgttcttttttttcttttctttcttcggatcttcgggtgtttcttccacttccgttacttccgtaacctcggttatgacgatgttttcgtcgttcattcgttgtcctccgaagcggcgagtttgttcgctctgtcggtcgttatgagcgcgtcgatgagttcgtcaaggtcgccgtccattatctgcaatatcttgtaaagcgtaagccctattcggtggtcggtaacgcgtccctgcgggaagttgtaagttcttatgcgctcggagcggtcgcccgttccgacttgacttcttctgtcggacgctatcttttcgttctgctccgcttgcattttttcgtaaatgcgcgaacgcagtattttgagtgctttttccttgttcttgtattggcttcgctcgtcctgacagtcaaccacggtgcccgtcggaacgtgaattattcttatcgccgattcggtcttgttgacgtgctgaccgcccgcgccgcccgaacggtgggtctcgatgatgaggtcgttttggtttatttcaacgtctacatcttcaacctcgggcaaaaccgcaaccgtcgccgttgaggtctgtattctgccctgcgattccgtttcgggaacacgctgaacacggtgaacgccgctttcgaacttcaaacggctgaacgcgccgtcgccctcgaccgaaaattctatttcctttatgccgccgagttcggtctcgttgacggaaagcacttccgttttgaagcctttcgactccgcatacatcgtatacattctgtaaagcgaatgtgcgaaaagcgccgcttcttcgccgcccgcgccgctgcgtatctccatgataacgcttcggtcgtcgttcgggtcgcggggcaggagcagaatttttatctcttcttcaagtctcgttttcgcttctttcgcttcttcgaactgtgcttccgccatttctttcagttcttcgtcggggtgggaagacagtaactctttcgcctcgtccatttcgtcgagcgcggtcttgtattcgccgtatttttcaacgacaggttcaagccccttgcgttcgcgcatcagcgccgcaaattcctgcttgtccgaaaatatcgcggggtcggaaagtttttcgtttatcgcgtcgtaacgttttgatatgtttttgagtttgtcgagcatttcgttctccgtaaatttaatgtgatatattatatattataacaaatacttgcggctgtgtaaatacatattttcacaattttttatgaaaaagcgtcttgacaggcggcggagacggtgctataataaatttgcgatacggggaaaggtgaaaatccttatcggcggtagtcagtccgcgagcgcgaaaagcgcacgaatccgacacggaacagaatttcgtttccgaacggataccgacggtcaaagtccggatgaaagtattgatattgcgaaaaatttttacgtccccgcgtatcgttacgcagggacgttttttttgtgattgagataccccgcaaacatatttttacggaacttttctgtgttccgaacggaggtattcttatgcagaatcaaaaaatcagaaacatcaccgtgacggcgataatgtcggcggtctcaaccgttttgatgttcctcagtttcagcgttccgctcgttccgtcgtttttgaaattcgacttctcggaactgcccgcgctgttgacgggctttgcgctcggccccgtttacggcgtcgccgtctgccttgtcaaaaacgtcgtaaacgtgttctttacaacgacattcggcgtcggcgaactttcaaacttcattctcggctgtatgttcgttgttcccgccgcgcttatttaccgtcacaaaaagacacgcttgaccgcatttgtcggttctgtcgtgggcgcttttgcgatggctgcgttcagttttgtgaccaactatttcttcatttatcccatttacggcaaagttatgggcggcattgacaagatagttgcgctttacaccgctatcctgcccggcgtgaccgaactttggcaggctctcgttattttcaacgtgccgttcacgtttgtaaaaggacttgtgagcgttgttatatcaatgcttatctacaaaaaactttcgcctgtgttgaaaggcaagtcttctacgcaagcaggggcgcaagcataagtattccgagattatccgagaatattttcggaaactgttcaagcggcagcggcgacgcacctcgtccgacttctatcgtatagccgggcagattgttttcctgaatgaaccagtctttgtagcccgcataacccgagttttcgggtgtcgtttcgaccgaatatccgctgacggcggaaaaacgctgcgctgtctcaaagctgcacggcgggtcgtaatccgcgaatttccaatatattatctctccctgcgaatggtatgcgagtatcaagcgcggggagatgttttttgtgaattgcgccatggctctggattcgggtgcggagagaggataatcgccgacaaaatctctcggcgcgggcgaggtgaacccctgcgcgtattttatccgccgcgcctgctcccaccccgcggggtagttcaggttcagatccgttcccaagatattcgctttccatccctcgggaaacggcagcccgaaagtattcagtttttcggcgttttcgtacaatgtacttcccgcgggtatctgtcccgtgacaagatccacgccgtcgggatcgaccatcggaacaatgtatatcgaggcgctgtcaaaaacttctctcgggtcgtaatcgccgagcctgcgttccgttacaagcgcatgacagaacatttcaacgaacttgacgagcaaaagcgaggttatccattcattggcgtggtgcgaagcgttgtaggaaacgactttttcgccgcgtccgagccgaagcgaaacaaggtctttgccgagcacgcttttgcctattgacgaaaaagagaggaaaggataccgcgccgcaagcgagccgagcagaatgttcataacgtcggaagaaaagcgcagcgtcgtgggaacgacgaactccgaaaaaggtataagaattttttgtccgacaaacagattgtctgggtcggcgagatcgtttgcggcaagcagcattttcaaatttgtgttgctttttgacgctatcgaagaaagcgtgtctcccgctctgaccgtgtagtaataatttcccgtgaaatacggctcccacgagcgaggtccgaccacgccgtcgtctgaaagcccgagcgtggactgcaaggcggcgaccgccctctccgttgcctcgtcaaagacataatttacttctcccgaataaaatccgagccgtttcagaacaaattgcagaaacccgacaaggggttccgtgctgccgagataaagagtttgaagttccataaacgattcctccgttttagcctgtatattgttttaggctgaactgattcagcctatgaaatgtcggttgacgatgtttttatattcggtctgaatatttatatgcgttttccttttcaaaaaattacgaaaaatcacgaaaatagttctcaaattgctgtttacataagcagttttttatggtattatattatatatgaaaatgggtatatttacgttcttttgaacgtatctgctgcccgaaaaacagaggtcagaaattatgaagagattttttacatcggagtccgtgaccgagggacatcccgacaagatatgcgaccgtatatcggacgccgtgcttgacgagatactttcacacgacccgaacgcccgcgttgcctgcgaaacgtgtacgacgacgggtatggttcttgttatgggcgagataacgacccatgcggattatatcgacatttcgcgtatagcccgccgcgttctgcgcgacatcggttataccgattcggattacggcattgactgcgacgcctgtgccgttatgtccacaatagatgaacagtcgcccgacatagctatgggcgttgaccgcgacggtgcgggagaccagggcatggtattcggctatgcctgcaacgaaacgccgacgcttatgcccatgcctatttattacgcgcatgaacttgcgaaaaaacttgccgaggtaaggaagaacggcacattgccgtatcttcgtcccgacggaaagacgcaggtcacggttgaatacgacgacggcaaacctgttcgcatagacgcggttgtcgtttcggcgcagcacgacccgtccgtttcgcagaagacgatagcccgcgacgtgaccgaaaaagtcattgacgccgttattcccgcggaactgcgcgacgaaaacacaaaactttacatcaacccgacgggacagttcatcgtgggcggacctcacggcgacagcggtctgacgggcagaaagataatcgttgacacttacggcggctatgcctgccacggcggcggcgcgttcagcggcaaagacccgaccaaggttgacagaagcgcggcttatatggcacgttacatcgccaaaaacatcgttgcggcgggaattgccgacaaatgccagattcagatagcctatgcgataggcgttgcgcagcccgtttccgtctgcgttcagaccgagggctctcgactcggttataccgacgagcagatagcggatgcggtttgcgaagttttcgatatgcgccccaaagccataatcgaaacgctcgacctcagaaaaccgggatatgaaaaacttgcggcttacggtcatctcggcagagaagacctcggcgtttcttgggaaaagacggataagaaagaagcaatacttgccgctctcaaaaagttataaaccgtcgccgactgctgttcggcgcaacagaaaagtgggtgggtataatgaatattaaagcctatgcaaaattcaatctgacgcttgacgtgaaaaacaaacggggagacggttatcacgaaatttcgtctcttatgcaggagatatccgtttgcgacgacctttctattcttgtcaaaaacgcaaagaacggaaacgaagtcagcatcaagtgttccgatccggaagttccgtgcgacgaaagaaatacctgttacaaagcggtgttcgcgtttttctcgtatttcggaatcaaggacagacttgtaaaaataaatatcaaaaagggtattccgctccgttcgggtcttgggggaggctcttcggatgcggcggctgtcatcaatgctcttaacaagatattgaagctggacgcgcctgcggaagttcttgaaaaagtagccgcagaggtcggcgcggacgttccgttctttatcaggggcggaatgcagcgtgcggacggtatcggcgaaaaacttacgccggtcaagtgcgatttcagaccgtattttatcgtggccgctcccgcaaagggcgcagcgaccgatgaggtgtacgcgaagtttgacgaaatagacccgcagcgttcggacggaacgggcaagatactgcacgcgatgtcgttcgagctcaatccttatgatttcctttcaaattctctgcttcccgcggcgaccgcgcttgtgccggaaatagaggatgttctgacaaaactttccgcaacgtccaccatggtaaacatgacgggcagcggctctgcggtttacgccgtttacgaaacgtattcgcaggcgtttgagatacttcaaaaatacaaaaaagaatttcctttcatctccgcgtgcatctgcgtggacagagaaaaggaagcaaaataaaagcgaataagaatccccgttttccgcaggactgttttgaaccgactgcggagaggatttctatttgttgtttatgataagcgggaaaatatttttcgtcgcttaaaatgccgcgatatgcggcggaacggagttttttaacaatgcattacatgggtttgaatgaaataagagaaaaatatctctcgttcttcgaaagcaaggggcatttgcgtttgccgagctttccgctcattccgcagaacgataagagcatacttctcataaacgcgggcatgaccccgatgaagccgtacttcaccggtcaggaaacgccgccgagaaacagggtaacaacttgccagaagtgcataagaacgcccgacatcgactgcgtgggaaaagacgcacgtcatggcacgttctttgagatgctcggcaacttctcgttcggcgattacttcaagcgcgaggctatcacctgggcgtgggagttctgcacaaaagttatggagatgcccgttgacaaactttatgtgacggtatatctcgaagacgacgaagcgtatgatatatggacaaaagaaataggcgttgacccgtcccacgtttcgcgcatgggcaaggaagacaacttctgggaacacggttcgggaccctgcggtccctgctcggaaatttatttcgacagaggtgcggacaaaggctgcggcagacccgactgccatgtcggctgtgactgcgacagatacgttgagttctggaacgtcgttttctcacagttcaacaatgacggacacaacaactataccccgcttgaaaagaagaacatcgacaccggcatgggacttgaaagacttgcctgcatcatgcagggcgttgacagccttttcgatgttgacacgataaagaacatcacggcaaaaatttcggagatgtccgccgtcaaatacggtgaaaatcaccttgcggacgtttcgctgcgcgttataacggaccatatcagaagcaccacgttcatggtctgcgacggtgttcttccgtcaaacgagggcagaggttacgttcttcgccgccttttgagaagagcggcgcgtcacggcagacttctcggcataaaagagccgcatttcctggcggaacttgccgaggtcgttattcacgaaagcgaatccgcttatcccgaactgcgtgaaaaagcggcgtatataaagaaagtcatcgagcaggaagaagaccgtttcgaaaagacgatagaccagggtcttgccattctcggcgatataatcaagagagttaaggacgttgcgggaaagattcttgacggcgaagagactttcagactttacgacacgttcggctttccgatagacctgacaagggaaatagccgcagaaaacggacttgaaaccgacgaaaaacgcttccttgaacttatggcggagcagaaaaagaccgcaagaagtgcggcgaaaggctttgcggcttccgcatggaaagacaatgaagcgttggcgacgatagaaaagaccgagttcagcggatatacaaaacttgtggataccgcaaaagtgcttgcgatactcaaagacgacgaggcggtaggcgttgccgaacagggcgacgacgttaccgttgtgcttgacagaaccccgttctatgcggaaagcggcggacaggtcggagacaaaggcgtgctgactgcgggagagacttctcttctcgtgcgcgacaccaaaaaggcaaacggaatctatctgcacgaatgttccgttgcgtttggttctctgactgtcggcgatgaggtcaaggcttgcgtaaacaagagcgaacgacttgccacgatgagaaaccactcggcggtgcatttgctgcaagcggcgctgcgcgacgttctcggcgaccatgttacacaggcgggttcttacgttgacgcaaaacgcgcacgtttcgacttcacgcactttgaagcgatgaccgaagaagaacttgcgacggttgaaagacttgtcaacgaatatatactttcccttaccgaaatagatacgctcgaacttcccattgcggaagcgaaaaaactcggcgcgcttgcgctgttcggcgaaaagtacggtgagatagtccgcgttgttcgcatgggcgacatctcaacggagttctgcggcggtacgcacgcgaagaacacagcggaaataggtcttttcaagatagtttccgaaaccggcgttgcggcgggcgtcagaagaatcgaagccgtaacgggtctgaacgtgcttgaatatctgaatgaaaaacaacagaccgtttcgggcgttgcttccgtgctgaaagcatccgaaagcgaacttgtgcacaaagcggaaagcgtggttgcgcagaacaaggctcttgcaaaagaggtcgaggctctgaacaacaaactttcattcgccaaactcgaaggcgttgtcaagtccgcggaagagataaacggcaacctcgttatggttgcccgtatcgacgcttcgacggacgcgctgcgtgcgatgtgcgacgcgctccgcgataaatacgcgaacggcgttgcgcttcttgccggcgtttccgacggcaaggttgccatagcggcgggcgtcggaaaagacgcggtcgcggcgggtgtccgcgcgggagaccttgtcaaagtcgcggcaaagatttgcggcggcggcggtggcggaagacccgacagcgcaacggcaggcggcagagacgcttcgaaattgggcgaggctcttgcggctgtaaaggaaactctgaaagcgtaaggtgaaaaaaatgagcgattgcattttctgcaagattgccgcgggagagattccctcgacaaaggtatacgaagacgatgacgttttggcgttccgcgacataaatccgcaggcacccgttcatatcgttttcgttccgaaaaaacatctgatgtcctcgatgaacgatataaccgaggaaaacgcttatatcgtgggcaagataatgcttgcgataaaggcaacagccgaaaagctcggtcttgaaagcggctaccgcattatcaacaactgcggcagagacgcgggacagaccgtgcagcatatccacttccatttgcttgcgggtgtggatatgggcgaaaaacttgtataaacaggcttgaaaaagtcctgaaaaagggataaaaaggtgacgggtggcttcccgcaaccgagactgcgggagcgaccgacgtttgtcggtcgctctttgcaaaaaacagagaaataaggaaaaaaaaggaagataaaactttcagaataaccgaaacagacggcgggcttccgcttgtctgtcgggactgaacatattcagtccgtgaaagggatatattatgaaacgcttccttgttttcttgctgactgcggcgacgctcgcattttctctttgctcctgctcaaaactgcctttcggcagacctgccgaaaacgccgtgtccgtgaccgaacggacagaaagtccgacgcatacgggcggtgagggaactcccgaaaaagaagtcattcagaagggcgtaagcggcgcgtgggtatcgacggtggcgaatatcgactttccgtcatctccgacgcttggtgcggatgaactcaaaaaagagatagactctataatttcggacgccgaaacttacggcttgaacgctctgtttttgcaggtaagaccgtgcgcggacgcgatatatccgtcaaggatttttccgtcaagcgcatatatctgcggcaaacagagcggggaattgccgcttgacgttctggattattttatcgcggcggcgcacgcgaaaaacattgatgttcacgcatggataaacccgtaccgcgtgacctgtgcttcgtcttcgggatataacgaggacactttggcggcggaaaaccccgcagtgcttcaccccgaatgggtcgttcgccattcatggacggaaaacggcgtccgcaagtatgcgtgttttttcaatcccgcattgcccgaagtccgaaaacttatctgcgacggggtcgaagaacttatcgcgaattacgatatcgacggcatacattttgacgattatttttatccgtatgcggacgcggcatcgtttgacgacggcgagacttacgacctttacggcaacggtatgccgcgcgacgattggcggcgtgcgaacgtgaatgcgcttatcgaacaggttcatggcgtatgtgcgggcagggtcgtgttcggcgtcagtccgtgcggcgtttgggcgcggaaaagtgaaaagaccccgaacggtacagaggggataggctataccgtttccgcatattcggacgtttatgccgatgtctacgaatggatagaaaacggaagaatagattatgtctgtccgcaactgtattggcagataagtcattcctcggcgccgttctgcgttcttgccgattggtggaacgatgtctgcggcgaatacggggtcacattatatataggtataggcgcgtatcgcggcgcggagagcggagcgtattcatcgcccgacgaaatagcgtcgcaggtcgcttatgcgaacgggaaagaaaactgcaaaggcgttgtgtttttctcgtttcgcagtttgagaaagaattatgcggatgttcaggcgtccgtaaaagttgcatacgaagattttgcgggaggttgaagaaatgctgaaaaggcttgtcggattttgcgttgtgcttgttttgacattcgggctttgtctgcccgcgtttgcagaaaaagcgcttgtcggagacattgacggcgattgggtcgtgagcagttccgatgcccgtaaaattcttgaatacgcgcgttcgggcgaggagttgccagcatatataaaggcggttgcggacatagacggcgacggcaaaataaccgaaaacgacgcccgtcttgcgttgaaatatgccatagacggcaccgaacggcttgttgaggttgaaccgcccgacgaagagacttcggaggtcgaatatatgtgtctgacggtcggcgaaacctgtgatttgaacgcgttcggggatttttccgcgtccgcttggcgctcgacggatacctcggtcgccgcggtagaaaacggaaaaatagttgcaaaagccctcggttcctgcgaaatttccgcatcaaacggcaaaaaaacgcataccgtgcgtctgcgcgtttctccctctgtttcggacgaggctccgttgcttgttatcgacgtttccagccatcagggaaaagttgatttcaacgcggtgcgcgattccggcataaccgctgttctcataagacttggcataggaaactttgcaaaatacccgtcgcagaaagattcgcgctttgacgaaaacgtcaaagccgcctgtgaagcgggacttgatgtcggtgtttacgtttattcttatgcggaaaataccgaagaggccgccgcggaagcgaatgcgacgatagacgctttgaaagacctcggcggtatgctgacataccccgtttattttgactatgaagagttcgtgctcggcaaagcgctcggtacggaagtggttcggatgtattgcgaaatgctccgttcagcgggttggtattccgcatgctacgcaagtgccagcgtgttcttttacaacctcgacaaagccgctttgcgcgattacgatttttgggtcgcggcatacggtcccgacgacggcggaatttacgacggcgcaatatcgcgtttcctcggcaaggacgagtatgcgatgtggcaatatacgtcaaaaggttccgttccgggaattacgaccggcgttgacctcaacttctgctataaaagttttccgaaaacgataatcaacggcggatataacggtttccgccccgagggactgccgcagaccgttgttcccgttgtcgctccgtccgcaagcggttcggctcaggcgggcgcaaaggtttattcggacgcggtcatccccgacgaactgaaatattcccaaagcggagaggaataataatcaggtaaataaataatgcgagcggaagtgtcgctcgtatataaaaatgaaaagaaaagaggttttttctatgcccgtaggtgcaattatcggcattatcgctgccgcagtggttcttttgatcattctggcaaatctcaaaatcgttccgcaggcggcggaatatgttattgaatttctcggcaagtacaaagcaacatggacggcaggcgttcatgtcaaagtgcctttctttgaacgcatcgcaaaaagagtgacgctcaaagagcaggtactcgattcgccgccgcagcccgttatcacaaaggataacgttacaatgcagatagataccgttatatatttctgcatttttgacgcaaaactttatgcttacggcgccgtcaatcccatctccgcgctcgaaaatcttgccgcaacaacactccgtaacatcgtcggcgaactcgaacttgacggaacgctgacttcccgtgacacaataaacggaaaaatgacggagatccttgacgaggcaaccgacaaatggggtatcaaggtcaaccgtgtcgaactgaaaaatatcattccgcccgcggagattcagaacgcgatggaaaaacagatgaaagcggaacgcgaccgccgcgaaacgcttttgcaggcggagggacacaaggcagccgcgatcacccgcgcagagggtgacaaacaggcgatgatacttgccgcagagggtgaaagagacgcacgcatcgcaagagccgagggtgaagccaaggcgatatatcttgcaaagaaagcggaagcggacggacttgccgcgctgcgtgaagcaggcgcggacgccgccgttcttgaactcaaaaaatatgaagcgcttgttgcaatgtcaaacggcagagcttcgaagataatcgtgcctaccgacgcggtaaacgcgacaaaagcgaatgttatgttttccgaagttacggggctgggcgacgttaccaagcccgcacccgaggaaaagcccccgaaaaagcccgacccgtgctgcgactgacggcagaaaaaggtaaaagtaaaaacagaaacggaaaaactgccgcccgacggaaacgtcgggcggcattgactttttggaaacgttgtgatatactttatccatatattcaaaaacttattgccttttaatccgacgatggggcggtatactcagcatgaaaatgtttaaagggggcttgttgatgccgaaaataatcaaagacatgcattgttttatggcagaggcggagagatatggatttgaaacaaaaaaagagagaataaagatttatatcgattttttgcattgcaaatgccgttttcattgcagacgtgacgaatatttcttgttgaagtattatgtatacagagattggtacagaaaatattttttgacatattggcagagaccccattattgggcatatataaataaaaatcgtttgacattgtccaaaatgtttatgtacggaagacttaaagagtattacgggcgtgaactctttgcgttaaacgaacataccgccgaagaatttaccgattttgtgaagaaaaccggtaaggtttttgtaaaaccggacagaggttcctgcgggctcggcgcttccgtgcttgaatatgttgacgacgcgacctgtaaacagaaatacgaagaacttgtcaaggaagatatgatatgcgaagaatatatcagacagtgcaaagaacttgacgagctttgtccgacctcgatcaactcctgccgtataatgacgcttcgtgacaagaccgaaacgaaagttcttgccgcaactataaaaatgagcaagggagaatcgtttgttgacaatatgtacgcaaacggtatcggtgccgccgttgatgtgaaaacaggtgttgttaccactgtgggcagagattatgaggacaatgtttatatctatcatcccatgacgggaaagattattcccggaatacaacttcctttttggcaggagacgctttacatcgtaaaaaaagcccatgaagcatttcccgaaagcgcagttttggggtgggatattgcgttcactcccgatggaccgattattattgaaacaaatggtgctccggggacgaagattcaccagtttgcggataaagaaccgaagggcaagcctatcatggattacattgctgtaaaaagcaaccgtgtttacgatttgaaagaaaataacagacccaataaagatcccaacttacagggatattgggtaaaactcagagaagagaacaataagaaaaagtagccaaacaaaaattgttggctttcaatttgacgggtgccgtaaaacgtaagtttttacggtatccgttttttacatttgttttacgatggactagaagaaaaagtacacggctttcggatagttctcttcaacggggctttcccgttgagttcgttgatattaaatatgagactttcgttgaaacagtaaacataaaaatgtgaggtctgcacccgaaaaacggttgatttcgtaaaaaatatgcgcgaagttgtgcgatgtatgcttacgagtctgtgtgaattagtgcaatattgtttggatttgtcgttgacattcaatcgcaaaacaaacctgttttgcgaacagccatgtgcgagagagcggagcgaacgttcgcacggcatatataaatagtatacctttttcaaataacatatcttcaacggggctttcccgttgaaatcgcagacataaaaatatgggttttggattggaaaacggttgatttcgtaaaaaatatgcacgaaattgtgcaatgtatacatatagatgtgtgtgaattagtgcaatattgtttgaattaggcgttgacattcacatgaatatgtggtacaatattcacatcgaaaaataaaacattcacccgaatgtctcgggctgaaaagaggttgtttattatgaagagatttgcagcaatgctgcttgtcgtagcgatggcgtttgcttgtctgtttgctttcgcaggctgcggcaacaacgacaaaggaaacactaccaaaggttccgcggacggctccgaaacaggtgtcgcatcgggaacgttcaaactcggcggtatcggtcctcttacgggcgacgccgcgatttacggcactgccgttatgaatggcgctcagatcgcggttgacgagatcaacgccaaaaacggcaacgttaaatttgagttcaagtccgcggacgacgtttcggacgccgagacttccaccaacgcttacaacagcctgcttgactggggtatgcagatccttataggtcccgttaccacaggtccggctatcgcggtttcttcacttacatacagcgacagagtttttgctttgaccccgtccgcatcctccaccgacgttatcagcggcaaggataatatgttccaggtatgctttaccgacccgaaccaaggtgtcggcgcggctgactacatgtcggaaaatatggcaggcgtaaaagttgccgttatttacagaaacgatgacgcatactcgcagggtatccgtgatactttcgttaaggaagccgcttccaagggtatcgaagttgtttacgaaggcaccttcacaaaagattcttcgacggacttctccgttcagttgaccgcttccagacaggcgggcgccgacacgatattccttcccatttactatcagcccgcttccgttatcctgaaacaggcaaaagatatgggatatgagccgacgttcttcggcgttgacggtatggacggtattcttacccttaaaggctttgatacttctcttgccgagggcgttatgcttctgaccccgttcgcggcagactccaccgatgaactgactcaaaatttcgtaaagacctacaacgataaatacggtcagactcccaaccagttcgctgccgacgcttacgacgcggtttacgccgtatatgaagcgataaacaaggccggctgcacctctgacatgaccacagaagaaatctgcgacgccatcgttgcggttatgccgaacatcgtccttaacggacttaccggtcagggtatgacatggaagagcaccggtgaagtttcgaaagaaccgaaagctgttgttatcaagaacggcacttacgttcttcccgaaaatcaatgataaaagtgggatatatcccgcaaaataaaagagtttttatgtaaaagagaactttcggctgccgcgtgctgacctcccgcggcagccgaatcaggtgtattctttcaacgtattccctcgtatacggaaaaccccgaaacggcagtcatgggcgtggtatgcccgaacccttgtcgaattttgcggtttggcgtcttccgtatgcgacggaataccgtaatttatttttttacgcgcacgcgcgtgtatgcgtgtgtatattatataattcaacatttcggttgccgctcggcaacacctcgccaaaaaagaaaaaagaggtacttttatggaatttctctcgtatcttatcagcgggataagcctcggaagcgtttatgccatcatcgccctcggttatacgatggtttacggcatagcaaagatgcttaacttcgcgcacggagacgttatcatggtcggaggctatatctccttctttgcgtctgcgttcatcaccgaaaaattcacgtcattccccgcatgggtctcggcgatagtttcaatccttgccgccgtcgttgtctgcaccgtgctcggcattcttatcgaggggcttgcgtataaaccgctccgtgcggcttcgtcgcttgcggttcttataaccgcgataggcgtttcgtatctgcttcaaaactcggcgctgcttatctggggatccgacccgaagacatattcgtccgtcatctcgggcacgcttcatctgtttgacggcaaactctcgatttcctacatagcaatgttcaccattctctgctgtgttgtcatcatggttgcgctgacgctcttcacgtcaaaaagcaaactcggcaaggcaatgcgtgcttgctccgaagacaaaggcgcggcacagttgatgggtatcaacgtcaacagaaccatttcgatgacctttgcgataggctccgcgcttgccgccgttgcgggcgttctgctttgctcgtcatatcccaccctttctcccacgaccggttcaatgcccggtatcaaggcattcaccgccgccgttttcggaggcatcggttctattccgggcgcgttcctcggcggacttctgctcggcgttatcgagtcctttgccaaggcttacatttcaacgcagctttcgaacgcgatagtgttcgctgttcttatagtcgtacttcttgtccgtcccgcgggacttttgggcaagaacgttcaggaaaaagtataaggaggacgttatgggaaacaaaagattcaaactcaaaaaaacaaacgtctttgattatgcgacctacctgttcgttatcgtcgttttcgttatcgttaccgctcttaactccgcgggcgcactgaaccgctctcaacagggctggctcgttcccgcctgctgctacatcgttatggctatctcgctcaacctcaccgtcggcattatgggcgaactttcgctcggtcatgcgggctttatgagcgtcggcgcattctccggcgcgatagtctccaccgcgcttgcggactccgttcccgataaatggctccgtctgcttcttgcaataatcatcggtgccgttcttgcgggcataatgggcttccttatcggtatccccgttctccgtcttcgcggcgactatcttgcgatagttacacttgcattcggcgaaataataaaagaccttatcaactgccttatcgtcggcgttgattcaaacggacttcacatcatattcaacgctacgggcagcaaaaacgtcaccgacctcggtcttgaagagggcggaaaagccatcatcaaaggcgcacagggtacggtgggcattcagcgtattgccacctttacggcaggctttatcctgataatggttgcgcttgttatcgtgctgaaccttgttcgcagccgcacgggtcgtgctataatcgcggttcgcgacaaccgtatcgccgccgaagcctgcggtataaacgttatgaagtacaagatgatagcgtttacgatatccgccgcaattgcgggtgctgcgggtgcactttacggtcttaactattccggcataactgccgcaaagttcgatttcaacacatccatactcgttcttgtattcgtcgttctcggcggactcggcaatatgctcggctcggtcattgccgccacgctcctttatcttctgcccgaagtcctgcgcgggttctccgattaccgtatgctcatatatgcggtcatccttatccttgttatggtcttcaagaacaacgaacaactcaaattcctgctttcaaaagcggtatcgccgataacaaacctgttccgcaaggcaaagaaaggagagaaacagaatggataagtttcaaaagggaaaaatggttcccgttccgtctcattccatagtgcccgaaagagacgtcaacgagactcccgctctcgaatgccgacacctcggcattgatttcggcggacttcacgcggttgaggatttcaacttcacgataggtaaaacggaaattgcgggtcttataggtcccaacggtgcgggcaagaccacggttttcaatcttcttacaaaggtttatcagcccacacgcggcgttatcatgataaacggcgaggacaccgcgggcaaaacgaccccgcagataaacaagatgggcgttgcgagaacgtttcagaacatcagacttttctccaatatgaccgttgaagacaatgttaaagtaggtcttcataatcaggtcaaatacagcacggcggagggtattttccgtcttccgcgcttctggggcaaggaaaaacaggctcatgaaaaggctatggaattgctttcgatcttcggcatggaggatatgcacgactggaaagcaggttcgctgccttacggcgcacagcgcagacttgaaatcgtccgcgcgcttgcaacaaatccccgtcttcttctgcttgacgaacccgccgcgggcatgaaccccgccgagaccgtcgatcttatggaaaacatcgtccgcataagagacgatttcaaaatagccgttcttcttatcgagcacgatatgaaactcgttatgggtatctgcgagggtatctgcgtgctgaacttcggcaaagttatcgcaaagggtaccgcggaagagatacagtcgaaccccgttgttatcgaggcgtatctcggaaacagaaaggagaattgagagtatgtcggatataatgcttaaagtcaacgatatcaacgtttattacggcagtattcatgcaatcaaagatatctcctttgaagtacgcaagggacagattgttacgcttgtcggcgcaaacggcgcaggcaaaagcacaacgcttcaaacgatttccggccttcttcattcaaagaccggttcgatagaatttctcggcaaaaaccttgcgggcgtcgcaccccacaagatagttgaacacggtttggcgcacgttcccgagggacgccgcgtatttctccaaatgagcgttgaggaaaacctcgaaatgggcgcatacacacgcccccgctcggagatagacgacggtatagcggacgtatattcacgtttcccgcgtctgaaagaacgccgcaagcaggtggcgggtacgctttcgggcggcgaacagcagatgcttgccatgggcagagcgcttatgtccaagccgcagttgcttatgcttgacgagccgtcgatgggtctttcgcccattcttgtcgatcagatctttgacattatcaaggaactgcacaacgcgggcacaactatactgcttgttgagcagaacgcgcagatggcgctttcgatagcggacaatgcttatgttctcgaaagcggcaagatagtgctttccggcacgggcgcggaacttcttgccagtgagcaggttaagaaagcatatctcggcggttaacggggatgtaaaaaaagcccagaccgcaaaaaaggctggaaaaatacaaaaaaagcaatggtctaaaagataaataaaaagactcaaaacagagatttttgtgttttctttcataaataatggtttatacgccttttttgctactggcgaatctcgcctctcgatgtataaacatacaccttcgggttcgattcacccattctgaacatttttccctatccccaagggatgtaaaaaggctgaaaatataataaataacacgcttaaagacaatgaaaataccgaagttgagttaaggtcgcacaaactcaacttcggtgttttgcttatttttgacaaaaaacgttttccgggttgacaaaaaaatgcctttgtgttagaatagatgggaacaaggaagttcagagggtatagcctcatagagggagaaccggtgtttgcgtttgcgacaggcggttttcccttgtgttgcaccccgaaaaaattttatatatctttgaaaggttgatttccgacatgaacaatccgtacgagaatatgctgagcgtgcttgaagacgcggcaaaaatgatgggactttctcccgacgagtacgttatgctcaaataccccgaaagagagttgaaagttgccattcccgttgaaatggatgacggtcacatcgaagttttcgagggctatcgcgttcaacattcctccgtcagaggtccttacaaaggcggtatccgtttccatcaggacacggacatcaacgaagtcaaggcgcttgccgcttggatgagtttcaaatgcgccgttgcgggcattccttacggcggcggcaaaggcggtataaccgttgatccgagaaaactctcgaaaggcgaacttgaaagactgacgagaaaattcaccgagaagatcgctcccgttatcggtcccgagaccgatattcccgcgcccgacgttaacaccaacggcgagatcatgggttggataatggacgagtattcgaaacttgccggcaaacagtgtcccggcgtcgtaacgggcaaacccattgcgataggcggctctctcggcagaacagcggcgaccgcaaacggagttgtaatgactgccgaaaacgcgctttcctacctcggcaaagcgggcacgcataacagaattgccgttcagggactcggaaacgtaggcggacttaccgcgcagatcatgtatgacaagggctataagatcgtctgcgtcagcgacgtttacggctgtgtttacgacgaaaacggacttaacataacggaaatcagaaactatatcgcttccggcaaaacgctcaatacctacacgggcgcaaaacagcttgttcgtgaagccgtgctgacctgcgactgcgacgtgcttattccgtgcgctctcgaaaatcagataaccgagaaaaatgcggctgacgtcaaagcgttccttatcgttgagggcgcgaacggtccgacgacttatgaagccgataagattctcgaacagaaaggcattcccgttgttcccgacattctcgccaacggcggcggcgttgtcgtttcctacttcgaatgggttcagaacctctccaacttctactggtcggaagaagacgtaaacgaaaaacttgcacacagaatgaacaactctttcgaagccgttacaaaggcaaaagagcagtacggcacaacgttcagaaacgcggcttacgccgttgcgataggcagaatcgtggaatccaccaagatccgcaagccgtggcactgattatatctgacaaatgaaaaatatgtccgcagagaaaacctctgcggactgttttttgctgaaagtttttaaggactgttttttgtctcatcgaaaatttttacgaacgttttatctttcaaaaccccgaaaaatgcctgtttttgccgaaacaaacggcaaaaatctcgatttgtgtatgtttgacgcgaaaaaagatctcgatttgtgttgttttagtctttacaaaaatctcgatttgtgttataatatgcgtatagaaaatctcggtttgtgtatattttatatgtataaaaatcttgatttgtgtaaaggtgtaattaaaaacctcgattttatcatattttggagatgtatatgcgcagaaaagcatacgatagtttgttggcgtggaagaacgggtctgcgggaaagaccgcattgcttgttcagggtgcgcgccgcgtcggaaagagttatatagttgaagagtttgcaaagaaagaataccgttcctatatactcatagatttcaacaaggcgggggaacaggtcaaagatcttttcaacaacgatctgaacgatatgcgttcattctttttgaaactgtccgcattgtacggcacatctttgcatgaaagggaatctctgataatttttgacgaggttcaactctttccccgcgcgagaagcgccgtgaaatatcttgttgcggacggtcggtatgattatattgaaacaggctctctgatttccattcgggaaaacgttaaggatattctcattccgtccgaggaagacaggcttgatatgtacccgtttgatttcgaagagtttttgtgggctctcggtgatgagactatcatgccgcttattcgggattcttttgaaaaaaaacgtccgctcgggcaggcattgcacagaaagacaatgaatttgttccgtcagtatataacggtgggcggaatgccgcaggcggtagaagcgtttgtcagaacaaacgatctttcggaagtcgatcgcgcaaaacgcagaatattgaatttgtacagagacgatatacggaagcacgcaaaaggatatgagatgaaagttgaggcgatatacgacgaaattccgtctcagctgaaaaatcagaaccgtcatttcaagatttcatcgcttgaaaagggggcacgtttcggtgaatacagagatgccatgttctggctctccgacgcgatgatagtcaataactgttataattcaacggaaccgaatgtcggtttgaatatgaacagggacagaactcttttaaaatgctatatgtcggatacggggttgcttgtcagtcatgcctttgacgagaatcgcattatgggagaagaaatatataaaaaacttttgatcgacaagcttgaagtgaatatgggcatggtaactgaaaatgcggtggctcaaatgctgacagcggcgggacataggctttatttttattcaagcccgtcccgaaatcaggcacaggacagaatggaaatagattttcttatttccaagagccgcgtcggaaacagacataatatcagcccgatagaagtaaagtcgggaaaaaattatacgttgtcatctcttcggaaattcgtcgcaaaatacggcgaacaactgcacactccgtatgtgttgcattcggcggatttgaaaatcgaggacggaataacgtttctgccgttgtacatggcgtgtcttttataaaaataaaacagcgttcggtgcctttatcggagccgaacgctgttttttcttgttgtgttgttataccctgaccgcttggagttttgctctgcggagagaaacgcccatgaaagtttttgtttcaaattcggggttctcgggtttgagccaaagcgaatcttttgcgtaatcgaggtggcggacaagcagttcgtcacccaacgcgacaagcgcgaccgttcctacttcgccgagtttttttgtttctctgaaaagaacgtattcgttttctttgataagcggttccatggatttatcgggcatacggaaccagaacagtccctctgcggcatcttcgccgagttccgtttctttttcggacgagggttcgccgtccagatattcgtcagccgtgtcgtatacgggaataagcattgtttttatacctccgagcgtttgctttcgtttattgtatcacatcggagcgcataattcaatgaatatttttcaaaaaatgcactctcggaggtttttcctttctttttcgtcttgatttttatataaatatatgctaaaataaaatgaaaaattataaataatcacaacaccgacattgaaacggctttttgttcgggctgtctatgctcggttatgccgaatatattccgacagcggaaaggaaagggaaaacgcaatgaaacttatacttgcttcggggtcaccgagaagaaaagaacttttgacacgcgcgggcgcggaatttgaagtctgcgtttccgacgttgacgaaagcggcgttttcggcacgcccgaagaagttgtttccaaactttccgaaatgaaaggtgcggcggtgttcgcttctcataaaaacgattgtgtgctttccgccgacacggtcgtagctctcgacggcgagatattcggaaaaccgaaagacgccgacgacgctctgcgaatggttgaggcccttgcgggacgttcgcattttgtgtatacgggtgtttgcgttatgtttgaaaagaacggtaagcccgttgttgaaaagaacgtcgtgggtacggaagtgttcttccgcaacgcctgcgaagaagaactcaaagcgtatgtggcaacaggcgaaccgatgggcaaagccggcgcttacgcgatacagggcaggggcggaaattttgttgaaagaataaacggggactggtcaaacgttgtcggacttcccgtttgcacggttattgaaatgcttgaaaaagcaggaatcaggatttggtgaaaatatgctgttcagtttcagtttgtttcataaaacgactctcggaatctctctcgggtcgtcgaatacatatattgcgcgtcacggcaaaggcatagttctcggcgagccgtcggtcgtcgcgacggatatttacaacgaaaaagttgtcgcgataggcgacaaggcaaaaaaaatgataggcagagcacccgaaacgataagcgtcgatcgccccataagcggcggcattatctccgattttgacaagacggtcgcaatgctttgtcagtatgtctcccgcgttgtgcagacaagaataggcataacatcagccattgttgttcccgcggcggcgtcaagtgttgaaagacgctccatgcgcgatatggcaaaagcggcgtacggctcccgcgtggtgcctgtggacgaacccattgcggcggcgctcggctgcggacttgacgttttcagcggacgcggccacattatcgtggacatcggcggcggcagaacggatataagcgttgttgccaacggcggcgttatgcttgcgcgttctctttccgaatgcagcggcacatttgaccgcgacatcatcaactttgtcagaaaaaattataacatacttatcggcgacggtacggcggaggacgtcaaaaaacaactcggctgcgcttcggacgttaaaaacatggaactgatgaccctgaacggcagacatcttatttcgggacttcccgaaaacttcgtgctttcaagcgaggacgtgcatcaggcaatcgcatcaagcgtccgcgccatagtggacggcattatgaccgttctcggcaagatcccgcccgaaatagcgtccgacctgatacgctcaaagatacaccttgtcggcggcggcgcgctgatgaaaggctggacggaacttatttacaaagaaacgggcatggaagcggtagttgaagaaaacccgctcgaagcgacggctgtcggcgcgatgagagccgttcctatggcaaagaaactgcgcaattacgaaaactcgacgctcggaaattaagggagaataattttgaacaggaactttttcaaaaacaaattattcatcgttctcgtctttatcggaatatatcttgtcggctttatgttcagcgcattgctcggcagcgcaaaaatgccgcacgagcagtttgtgggctttgtgatgacgcctttcaacacggcgggcacggctgtcaaaaactttttctcggatatgttttccgcgccgttccgttacgacgaccttgaaaaggaaaacgaagacttgcgcgggcagcttgcgcaggcgcgtgccgaggctgatgagaacgcatatcttaaaatcgaaaacggaaatctgaaaaaactgctcgacatgactgacggcgagcagacgttttcttacgcttccgcagatgtggtggcgcgcggtacggacggttggagcgatactctgaacctgaacgcgggcacatcgtcgggtgtcaaagagggggacatcgttgtttcctgcgacggacttgtgggcgttgtttcctccgtcggtccgaattggtcaaaggtcaagacattgtttgacaccgaactcagcgtgggcgttatggtctccaccacccacgactgcggcattctttccgcatccgccgatctgagcgctgagggtgttgccagactttcttacatagacaaaaacagcgttctcggacgcggagacagacttgtcacatcggggctcggcggcgtttttccgaagtcgatacccgtcggtacagtgacggacatggttcgccgcgacgacggcacggtatgggcaaaagttgccccgcatactgatatttcttccgttgagcgcgtttacatcataacagagatcaaggacggagcagcacaatgaaagtccgcattttgctttacagcctgtttctgacgcttctttatatgctggcgtatatcataaccccgctccgcttcaacggcgtcagtccgtcgtatctgctgtgcgcggtggttgctctcgggctttttgaaaacgagtatttcggcgcgatatacgggcttgttttcgggcttatttcggacttggtcggcagcggcgttttcggcttcaacgcgcttttgttcgcagccgtcggctataccgtgggctatcttgccgagaaccgaataagttcaaatctgcttgcctgcgaactgatatgcgttctctgcgttttttgcagggatacggcgcttgctctctggaacaggatattttacggcgcggattttttccccgcgctgctcaaaacggtgcttccgtcggttctgctgacggctgttgtcgccgttgtgatatacttcgttgtcaagctgataggcacaaaccgcaaatggagaaaatacaatgaaaaaatacggtaaaaggcttgtt

SEQ ID NO: 2019 - DNA, 32759 bp, Unknown
  16S sequences of unknown bacteria
ttttctcttcatgaaaatcggcgggtacggaatctcctaaaccgacgcccatacaacaagggggcccgaggcccccgggagtttgggtggctataaaatcatacgtttaaaactgcccaaaattccggggccgcggccccggatatggcactggacataaatcaatcgatacagtccaatcccacccgattttccgccggacgcaggaaggagatcccgccatgcacacacttcagccactggtggtggtggcagggcccaccgcttcaggaaagacggcgctggcggtggaactggcccggagactggacggtgaagtggtgtcggccgattccatgcaggtttatttaccacttcggatcggcaccgcccgtcccacggccgaggagatggagggaattccccatcaccttctgggtttcctgcctctttgcacgtcctacagcgtcgcgcagtacgcggccgatgcccacgccgccatcgcccgggtgggagagagagggaggctccctatcctctgcggcggtaccggcctctatatccaggcggtgacggacaatctcgttttccccgagagggcgggggatccagccctgcgcgccgccctgcgcggacgggcggaaacggagggcggcgaagggctcctcgaagagctgcgggccgtcgatccggacaccgccggccgcctgcatccgcatgatgtcggccggattgtgcgggcgctggaggtatacgccgtcaccggacggaccatcaccgaacagaaccgcctgtcccggagggacgggccgcgttaccgctgcgccggtctgctgctggatttccgggaccggcagatcctgtatgaccggattggacgccgggttgaccggatgctggagcagggcctgctcgaggaagcggagcgggttttgtcctccgaggacgcaccgacggcgatgcaggctatcggatacaaggaactcgccccctatttccggggagaaatccccctgtcggacgcggtggaaaaactcaagcaggagacgcggcggtatgcgaaacggcagctctcctggttccggcggatgccgctggcaccgttgtatgtggacgaaatgccggatggaagggctctcgccgaagaggcggaacggattgtcgccagtgtgctggcctatgaaaggaggacgccatggataccttcctcaaacgtctgatcaccgtgttggtgtccctctttttgcttgtatacgtgggttttcaggcctatcagatcctcaacaccaccatcgaggtcgagacggtgggcagttacaaggtctatgaaacgatcgagaccaaaggggtggccatccgcaatgagacggtggtcagccaaggggcggacggctacctgttttacacgacggaaaacggggggcgggtggccaaagacggtaccattgcccgcgtgtttcccagcgaaaacgatgcgttttcgcagcagcagctcgatctgctggatgaggagatcgaaaccctgcgcgccatcaatgcccagggcacgtccaaccgggcgaacctcagcgggatcaacaagcagctgaaccgggcctggctgtccgctgtcgaaggggcgcagtccccgtccttcctcaatatgccggagcttcgcgccgatctgctggccctgctcaaccggcagcagatcaccatcggccgggtggaaaatttcaacgaccgcctcgcggcgctcacgagcgcccgggacacgctggccggttccttttccaaatccacctcggaaatccggtcccccatcgcagggtacttcgtcagccggatcgacggctatgaggccagtctgacggccgacaaagcggccgatctgacgccggaggaggtcggcaaagcactggccggatccacggcgggcacggcgtccgggatcggcaaggtggtgggagattacgattggtatctcgcctgtgtcctgccggtcgaacaggccgcgcagatgaaggagggggcggagctgaccgtgcgcctgccctttgtgctcaaccaggccatccccgtccgggtggcggcgaccaataaggaccgggcgggacaggtggcggtgattttcgagtgctcccagatgtccaaggaactctcctccatccggatcgagcaggtgcagatccagctcaaggagtatgaaggcctccgggtgcccgacgaggcgatacagttcaacgacaagcaggaatccggggtatacgtccgggtgggaaacgccctgtccttcaaacggatcaaggttttgtaccacagcgagcatgaccggtactccatctgcgaacagaccgatgaaagcggatatctcaagctgtacgacaacatcgtggtgggaggcaaggatctgtatgacggaaaaatcattcgttgaccgcccggaggacggagacagccgttttgtgctggacaatctcggccggatcgaggagcggatcgccgctgcctgcgccgcggcgggacgaaaacgggaggacgtcaccttgctggccgtgacaaaaacggtgccgcccgcgcggatcaacgccgctatcggggcgggggtgacccatatcggggaaaacagggtgcaggaattcctcggaaaacgggacgcgctgcgccttgacggggtcgatgtccatctgatcggccatctgcagaccaacaaggtccgccagatcgtgggccgggtggggatgatcgagtcggtagacagcctccggctggcggaggccatttcgcaggcctccctgcgggaagacaatacaagaatcctgccggacggatatactgaggtgctcgtcgaagtcaacatcgggggggaggaacagaagacaggggtggccccggagcggctggaggagctgctgtatgccatggcggcgctgcccggaatccgggtgcgcggattgatgacggttccccccattctgaccgctccagaggagcagagacgggtcttttcacagatgtataaactgtttattgacattaggggcaaaaacatagataatatacgtatggatatgctgtccatggggatgtcgtccgattatgagcaggcgattctggaagggtcaacccttgtccggatcgggtcggcccttttcggcagacggctataaaacgtgtataataaaacaggaggagcaataccatgggactgtttgataaactcaaaggcattattgatccggaaatcgaggacgacttcgaggaggaacaggaggagaatatggattttgtctccaaggccaccgaaacgccggaacagtttgcggcggataatgccaaacgcagcaacaaggtcgtgaacatccacgccactgcgcagctccaggtggtgctcgtcaagccggagcggtttgaggatgcgagcgccgttgccgaccatctcaacgccaagcgcaccgtggtgctcaatctcgaatcggccaacaaggacgtggcccgccgcatcctggatttcctcagcggcgtggcgtacgccaatgacggccagatcaagaaggtcgccaactgcacctatatcatcaccccttacaacgtcggcatcatgggcgatctgctcgacgaactcgagaacaatggcctctatttctaatacggcttcggaagacgcgctccttcgcgctcgtgtggaggacgccgtccgcctgtgtgagatccgctcgtgtccccgcttcgttggctttctggatgaacgccagcagacggtggcgcgggccgtcttgcatcattgcagaggtgttcccttccttttctggggcgggtatgaggatgccgaacgtaccctgttggggctgtttccctcttttcaggagccggaaccggcggggtttcccctgctggcgctgggattttcctatcggcgggatgtcggcctgacccatcgggactttctggggaccctgctctccctcggcgtcaagagggagacggtcggggacatcgtctgcgggccggggctggccgtagcctatgtgcaagaggagctcgccgcccatttcgccgcttcggtggagaaggtgggcggggaaggggtcaaggtgctctttccctatgaaggagagctgccgggcggccgggagtttgaggagaggcgggataccgtggcctccccccgcctcgacgccgtcctcaaggtgatgatcggatcctcccgcgaggaagcggcccgcaggatcgcggcgggcctggtatcggtcaatcacgccccctgcctgtcggccagcgccgcggtgaaggagggggaccgggtctcggtgaggggagaggggcggttcctggtggacgcgctcggcccgcctaccaggaagggccgcttgtttatcaccgtcaagaaatatcgataacagaacggactgtgaacaataaggaggtattcccatgtatacaccgcaggaaatccgcagtattgaattcaccaaatccctgggcggctacaaaacgtcggaggtcgatgagttcatcgaccgctgcgccgacacggtcgaagcccttctgaacgaaaaaaacgagctttccaaaaagctgcaggtgctggcggataagctggtggaataccgcaacgacgaggacagcatccgcacggcgctgctctctgcgcagcggctgggcgacaccgtggtgcgtgaggccaaccacaaggcgggcctgatcctcgacgacgccaatatcaaggcgcagaaaatcgaggaaaccgccaaacgcaaaatcgtggacgaggaaagggagctcgagcgggtgaaaaaggaggtctctctcttcaaaaaccggatgatgtcgatttaccgggagcatttgtctctgatcggcatgctcccggaggacgaggccgcttccgaaaccgaagggaacgagacgcccgccgccgaaccggaggcggcgccttccgcggcggaagagccgtcacggccggcggcggaaagtactgtccctgcggcggctccggcagcctcggaggcgccggctcccatcgcggttcccaaagcgcccgataccgtggcctatgagcagacggtggccgcgttccggatgaacatcccgatcctcgatgaagaggggacggagcctgcggcggagcccgcggcggcggtgccgaagccgtctagccgcttttccgatctcaaattcggtgaaaactacgacatttctcaggacaccgatgaggagccgggattttttaagaaaaaaaggtccgaacgctgaccgtataaaggagacacacccagatgcaagaacaggattacaacaaaacgctgaacctgccggtcacggaattccccatgcgggccggcctgccccagcgggagccggggatgcggcaggattgggacgagaagcacctgtatgaagagctgatgaaaaagaacgagggcaaaccgctgtatgtgctgcacgacggcccgccctatgccaacggcgatatccacatcggtaccgcgatgaacaagatcctcaaggaccttatcctgcggtaccgcaatatggccggctatcaggcgccgtatgtgccgggcttcgacacccacggcctgcctatcgagctcaaggcccgggccaaggcgggaggggatctgtccgcgctcgagccactggcgctccggcagatctgccgcgagtttgcgctggcatatgtggacggtcagcgggatcagttcaagcgtctgggcatcctgggcgactgggagcatccctacctgaccctgcgtccggaattcgaggccaggcagatccgggtgttcggggaaatggctctgaaggggtatatttataaaggcctcaagccggtccattggtgcccggaatgccaaacggccctggccgaggcggagatcgagtacgccgaggacccgtgctattcggtttacgtcaaattcccggtcaaggatgacaagggcctgctgacggcggccgggatcgacaaggacaagacctccttcctgatctggaccaccaccacctggaccctcccggccaacgtggcgatctgcctggggccgaaattcacctaccaggtggtgaagagcgaaggggagaatttcattctggcggccgaactgaccgaggaggtcatgaagctggccgggcgggaggagtataccgtcctcgcgtcctttaccggtagggaactcgaatctatgacggcgcgtcatcccttcctcgaacgggaatccctcatcatcctgggcgaccatgtcactctcgagagcggcaccggctgtgtgcacacggcacccggccacggcgtggacgatttcaatgtctgccgcaaatatccggagctgcccatcgtcgtgccggtcgatgaccggggatttatgacggaggaggcggggccgatctgcgcgggaatggcgaccggcgacgccagtaaggccattgccgcgcggatggaggcggacgggaccttgttcgccatgaagaagctccagcaccagtatccccattgctggcgctgcaagcagccggtcctgttccgcgccactgatcagtggttctgctcggtggagagtttccgggatcaggtggaggaagccatccaccaggtcaaatggcatcccgcctggggggaggaacggatggccggcatggtgcgggaacgcaccgactggtgcatctcccgccagcggctgtggggtgtcccgatcccgatcttctactgcgaggactgcggcaaaccggtcatcgaccggtcctttatcgacgcggtctcggagctgtttgccagggagggatcggacggctggtaccgtcacagcgcggacgagatcctgcctgacggggcggcgtgtccctattgcggcgggcgtcatttccgtaaggaaaccgacaccatggacgtgtggttcgactccggctcttcccatgcggcggtgctcgacgagcggcccgagctcaaatggccggccgacctgtatctcgaaggcgccgaccagtaccggggctggttccaatccagcctgctcaccgctgtcgcctggcggggccgcgcgccttatgaggccgtgctgacccacggctgggtggtggacggagagggaaaggcgatgcacaaatccctcggcaacgcgattgcccccgatgaggtcatcaaggattacggggccgatatcctccgtctctgggtcgcctctctcgactacagggtggacgtccgtctgtccaaggatatcctcaagcagctctccgaggcctatcggaaaatccgcaacaccgcccgttatatcctcggcaacttgtccgattttcggcccgaccgggacagcgtgacggaagaccggctggaggagatcgaccgctgggcactgacccgcctggatgagctgtccgccggggtgtgcgaggcgtacgagagcttcactttccacgaggccttccatcggatccatcatttctgcgtggtcgatctgtcgaatttctatctcgatgtgctcaaggaccggctgtatgtggaaaaggcggacagcgtcacccgccgtgccgctcaaaccgtcatctaccgcatcctgcatgccctgaccaggctggtcgcccccatcctcgcctatacctcggaagaaatctggtcctatctgccccacggtgaacacgacgatgcccggtccgtccttttcaatgatatgcccaaagggggggctgtccgggataaagcgttcatggaacgctgggagcgtatccacgccctgcgcaacgacgtgcagaaggcgttggaagccgcacgggcgcagaaagtgatcggcgggtctctggatgcccaggtgacgctgcactgtaaaggggagctcctggcgttcgtgcaggagatccgggaattgctgccttccgtgctgattgtgtcgaaggtggacgtcaccggggaaggcgaaggagatgccgcgggcgagaccgaaggcctgcgtgtgagcgtggcccatgcgcagggcggcaaatgcagccgttgctggacgtacagtgaaaccgtgggacagcagccgggccatgcggagctctgtgcgcgttgtgccgccatcatcgagtaggagccgtgcagcttatgtttcaattgatcgtcattctcctgatcgccctgctcgtcggggtcgaccagttggtgaaatgggtggtggtccggacgatcggggacggggtgcctgttcccctgatcgacggtgtgctggagttccattacagcgaaaaccgcggcatcgcgctcgggatcgggcataatcaagggccatggatgcggtgggtctttgtcgccgtcaccgcgctgattatggctttcatcctctatatgctgctctcccgccgtttcaaagcctataagctcgtcaccgtcagcggcatcctgatcgtcgcgggcggtgtcggaaacctgatcgaccggattttccgcggctatgtcgtggattttatctcggtaacgtggatcgggttcccgattttcaatattgcggattgctgcgtcgtcatcggcgcggtcctgctgctgattttctttttcttcatttatgacgacaagccggcggcgaagctgccggccggtccggacggaaaagacgtatccgccgcgtcgaaggaggctgccgatggaggacaaattgctgacgattcctccggagatggcgggaaaacggattgaccaggcggtgtcggaactgctcgggagccctcgttccgccgtacagaaatggatcggacaggggagggtgacggatccggccggccggttcccttatggtaagaacacccgtctcaagggcgaggaaacggtcttggtccaaatccccgatccggtggtatatgaggccaaggcggaggatattcccctcgagatcgtctatgaagacagcgacctgctggtggtaaataagccgaagggcctggtagtgcatccggctcccgggaaccccgacggcacactggtgaacgccctgctggcccattgcggggagagcctgtccggtatcaacggggtgctgcggccggggatcgtccaccgcatcgataaaaacaccagtgggctgcttatcgtggccaagaacgaccgggcccatcaggggctggccgagcagatccaggcgcacagcttcaagcggctgtatgaggccgtggtacaggggcatttgcggcaggcctccgggacggtggaggcgccgatcggccgccatccggccgatcggaagaagatggcggtggtggagcggcattcccgtccggccgtgacccattaccgggtgcttacgtcctatccgggctatgatcacgtggagctccgtctcgaaaccggccggacacatcagatccgggtgcatatggcctatctcgggcatccagtggcgggggatacggtttacggcccgtccagacagccgcccggactggacggacagtgcctgcatgccaggacgatcgggttccgccatccggtgacaggggcgtatctggaatttaccagcccgctgccgccctatttccgcgatttcctcgcgcggctgcagacgctttgacaggctggggctttcagcgcgccgaaaaagtaagggacgcttttggatgaaaggggccgtgtcgcggcgccccgcgttcttttgtaaagcaagggccggcaggtcttatacaatgccttggaagggctgcatcgggggcgggtgtctccggatgtagccaggatgaacgatcccataaacgatggcgtcgattaaacgtttcgcttttgatagactgagccccgggcctcccataggcccggggctcagtttgtatcggagtgcggatcccccgcgtgaaagccactcgaccgcaggcgtccggagcttttttgccgtcttatcaccccgccgattaaagcggcatattctgccaatactacgcatagactttgtatgaaaggcgggaaacacatggatttcgcaatcaagcgcgtcctgctgaaaccggaggaccagaccgacaacacccgggaggcaatccgggaggtttgccggcagctggaaaacgtccaggcacgttttgagatggaaaacgacagcgatctgatagaagcgtgcatttatgaaatggaatctctgagggcccgctaccggtatttgctgcggcaggcaaaagcgaggggaataccggccggcgcggccgtacaggaaaaaaacggctaaatggaggaaccggagatgagtcttgggctgagcatcgtagtaggggcggtgggggtttgcctggtcttagcggtagccattgcgctgatccgctccagacggccggtgagagggctgatcggcagcggtgcgcaggggctttgtgccctggcggccgtcaatgtcgtcggcgcgtttacaggggtatcgctaggcctcaatctactctccggattgtgctgtctggtgctgggtattccgggggtggtggccctcctggtgctcaagctgatatttgccacctgattccggcttccccttccggcatggccggaaggggtttttgctggttggacaaaagcagcgcggtggggcatagcccaccgcgccgcttttacgtcggaacgctcagtcaaaatagacagccttacccgttttggaagaggtgtagatggcctcgaggatttcggtgaccaccagggcctgctcgggcaggacgaggggattcgtgtcgttgaggatcgaggtgatccactgggagcactcgagttcggcgggatcggccgccgacgcgccatcatagaaagccacgccgccggcgttcagatcgacctgctccaccacctgacgtcccagatggatccggttaaaccgcaggccgtcgatcatgtcggcgccgcccatcgtgccgcacagggtggtctgggcctcccggacatccagcagattgatggcccagctggactcgaggatgatcgccgcgccattctccatcgttaccatgccgaacgcggaatcctccaccgtgaactctttgggatcccaatcgccccaggcgttgccgctctccttctgatcgcccagttttttgaacgcccggcccagtacagccttgggtttgtaattgtccatcatccacagggtcagatccagggcgtgggtaccgatatcgatcagagggccgccgccctgttcgtattcattgaggaaaacaccccaggtgggtaccgcgcggcggcggatggcatgagccttggcgaaatagatgtcgccgagctcaccctcctcggccgcccgcttcatcagcagagaatcgggacggaagcggttttgatagccaatcgtcagctttttaccggttttcttcgcggtttccaacatcagacgggcgtccgccgcggttttggccatcggcttctcgcacatgacatgcttgccggactccagggccgccacggtgatctcacagtgggagcggttgggggtgcagacatgcaccacgtcgatggatttgtcggccagcagctcatgataatccacatagacctttgcaccttcggctccgtatgtagccgctgcctgctccgcccgttccacgatcagatcgcagaacgccaccagttccacccggtcgccctgcttctgcaaagagggcaggtgcttgccgttggcaattccgccgcagccgataacgccgaccttcagttttgccatcttttcttcctccattttctcaatttgtcaatttggatgccggctatgccggaaaacctgcaatttcattatatcgatttgtccatccggccgcaatgcctttctttggcagtttaccaaactatatttcgcatctggtccatattgcgtccccaaacaggcatggccggcaaaagaataacccccacggccggaccgcaccagccgcgggggttgctgtatggtgtgcggagccgggccgctactcttcggtaagctcctcatagagccggtcaatcccctttcggaggatatcggaacggctcgtctgcagaatccggcagcagatgtccagcttatagacggagcggacgtccatacgggcgcgcacgacaaattccttttgattccggtaagtcttccacgtctttttttcctccaccgaagaatccctctcctttgtctctgttctatttccaccctaaccccgatgccgccggttgtcaagtgaatatgtttcactatttaaatttgtcattgtcatataatcggagaagagggtaaactattcgccgaattgccgccgaaaaactaggaggagaagcgggaaaaagggattctcatccctttttttcctcctccgccgacagataagcgccggcttggaaggcggctaccgcgccgtcagccgtggccgtgacgatctgacgcagcggttttgtgcggcagtctccggcggcaaacaccccctgcaccccggtccggcagtcttctcctgccaggatatagccggccttgtccagccggaccggtggtgaaaacatccggttttcgggttcatatccgatggcgatgaaaatggccgaggccccgaccggcgtgacggtacccgtttttccatcctttatcaaaacggcgttaacggtctcgtcgccacgaatctcggttacggtcgcgttatagagaatccggatattcgggtggccttgcaccgctttggccaaacgcctctccccacggaaggattcccttcggtgaaccagcgtgacgctgccgcatatcttggcgagatacagcgcgtcctccagggcggtgtttcctccgccgaccagtacgacatccttccctttaaagaaggcgccgtcacaggtcgcgcagtaagaaacaccccggccggcaaattcttcctcgcccggacagccgagatgacgccgtttcgccccgttggcgaggatgacggcccggctctcatactctccgccggaggttaaggctctcttgcgttccccctccagcgtcagctcccggacctcctcaaagcgcacctgcgcaccaagctccaccgcctgttcatacatgttttgagacaagtctggtccggcaatgcgcagcacccccggataattttccacctcaggggtaatcgccacctgtccgccgtaaaaacccttgtccaagatcgtggccgtccacccggcccggcagacgtagattgccgccgtcagcccggccgggcctgcgccgatgatcaggacatcactcgactccgccattcggatttcctcccttgcccgtacctttccttccttctagtataagcggaagaggagagaaatatgtttctttcatattagcactctagcgaatagagtgctaatatttatattttgttcatattttatcgtaaactttgtcataaattccgggtaaactaaaagacgttaagagatcaagacagatggagggtgaacccgatggggcacaccgatgcagagcagaatcaaacagatcctattaaatggaggtatgtcgtatgtttgacctgattccttttggacgcaatgaacgcaacctgtttcaatatctggacaatgtcgagaagagcctttttgacggcctggacacccgtgtctcccgtttccgcaccgacattttggacaagggtgaccgctatctgcttgaggccgaactgcccggcttcaaaaaagaggatatccacctcgatctcgagggtgatatcctgaccatccgtgcggaacacacggaggaaaaagaggacaaggacgagaaaaggcaatatgtccgccgcgaacgccgctacgggtccttctcacgcagctttgatgtctccggcatcaaagcggaccagatcagtgcgtcctatgagaacggcgtactgaaactggagctgccgaaagacgagccggcttcgcttccggcctcccgccagatcgaaatccgctaaccaacccaaaacgcccgggacatcccttcggatgtcccgggcgttttgatgtgtcagaagccggtttttttgagctgataggagagggtcatcaggctgtcccccaaatggacattctccaccacggccccggggtgataatagctgatgtcataatggctgaagttccaaaatccccgtacccccacctcgaggaggcgttccaccagctcgggggccgcctccttcgggatgcagaggatggccacctcgggtttttttatacggcagacgttgtccaaatttttaatgggctggacctccatcccccggacggttttcccgatcagttccggggagtcgtcaaaaatcccgaccagccggatgccgcggttctcgaaatccatgtggttggcgatggcccggcccatgttgccggcccccagcaggacggtgtccgagagccgatccatcccgagaatatggccgatttcggtataaagctgttccaccatgtacccgtaaccctgctggccaaagccgccgaaacagttcagatcctggcggatctgggacgccgtgaggcccatgcgctgggagagctcccgggacgagatacgggtcacgccgttttccttgagatcgtacaggaaccggtaatagcggggcagacgccggatcaccgacatcgagatcgtgtctcccttggccatatcctgtcacctcctgattgtgcgcatcgttgttcagccctgttcccgggtataattgagcaagccgcccgcgagcagcatctccacctggcggcgggaaaaagcggcggccagagggaactcctccccagtcgtccggttcaaaagcactaccggttcccccttgtccaaacggcggcggatatcgggcaggcacagctcgtcgccgaacgagatacggtcgtaatccgcctcattggcgaaggtcaaggggaggatccccgcgttgatgaggttggccgcatggatgcgggcaaaggatttgacgatcacggccttgatcccgaggtaaagaggcgccagcgccgcgtgttcccgggagctcccctggccgtagttgaccccgccgacgatgatgccggtcccctccgccttgcagcgggcgggaaattccgggtcgcaccggacaaagcaatgctccgaaatggcggggatattggagcgaaggggcaggatcttggcacccgccggcatgatgtggtcggtggtgatgttgtcgcccaccttgagcagcaccttagcctcgatggactccgccaggggcactgtcgccgggaaaggcttgatgttgggcccacggaggatttccacctcgtccatgtcctctgccgggacgggagggacgatcaagttgtcgttgatgaggaaggattccggcatcccgatcttcggcatctccccgagggtacgcggatcggtgaataccccggccagggcggacgccgcggccgtctcggggctgaccagatacacctgggcgtcggccgtacccgaccggccctcgaaattgcggttgaaggtccgaagggaaatgccgccggaattgggagactggcccataccgatgcaggggccgcaggcgcattcgaggatgcgggcacccgcggcgatcaggtctgcgagggcgccgttttccgcgagcatgcccagcacctgcttggatccaggcgcgatggacaggctgacgtccggatggacggtcttgcccttgaggatggcggcaaccttgagcatatcgtagagggaggaattggtgcaggaaccgatgcagcactgatctaccttgatcggcccgatctcctccactgtcttcaccgcgtcgggagaatgagggcaggcggccagcggccgcagggcggagaggtcaatgttcaccacttcatcatattcagcgtcgctgtcgggggccagggccacccagtcagcctcccggccctgggccttcatgaacgcccgggtgatctcgtcggaggggaaaatcgaggtggaggcacccagctcggcgcccatgttggtgatggtcgcccgctcgggcaccgacagggtcttgaccccatccccgccgtattcgatgatcttgcccacgccgcctttgacgctcagcaggcggagcacctcgagaatcacgtccttggccgcgacgaaaggccgcagccggccggtcagattgacccgtaccatttttggcatggtgatgtaataagggccgccccccatggccacggccacatccagcccgccggcaccgaaggccagcatgccgaggccgccccccgtcggggtgtggctgtccgacccgatcagggtcttgcccggaatcccgaaccgctccagatggacctgatggcagatgccattgcccggacgggaaaaatacaggccgtgttttttgcacacgctctggatataccggtggtcgtcggcgttttcaaagccggtctgcagggtattatggtcgatataggccaccgaacgttcggtttttacccggggcacacccatggcctcgaattccagatacgccatcgtcccggtggcgtcctgggtcaacgtttgatcgattttcagcccgatttcgctgcccggcgtcatctctccgtccagcaggtgggccttgatgagcttctgtgcgagtgtgtagcccatgcggaattcctcctaatttcttcgtctattccttattatgacggattgttcaagatttgtcaatcgggaaactttatacaaagtttcgtcgaatcccggcgtaagccttgattctttcggggttttagggtatactatacgattgaatagtcctgacgggaggtggccggtttgggggaaaaggcacggatctgcctggcttttttcgtcctgtccgcattctgcctcgggggctgttccaccattcctcatcctcccgagccggagccgtccgcggcgagcgagcctcctgtttcggcgccgccggcgctgccgcccttcgccctgagtttcagcaaggaggactccctgcatccgtataaggcccagagccgcgccaatctcgacctcgcctccctgctgtacgaagggttgaccgcggttggcggcgattatgccgtccggctgaacctggcggcgtctatcgatgagggcgagccccttcgcccagtcgtcgccattcgctccgacgcgcacttttccgacgggtcgccggtgacggcggcggatgtcgccgcctcgtttgcggccgccaaaggcacggcggccttcggccctctgctgaccaatatcaccgccgctgcggcccagggaaccgaccgggtggcgttcaccttggcgtcccccgacccccggtggcaggcatgcctctcttttccggtggtcaagcagggagcggaggacccgcccctcggttccggcgcgtatgtgtataacgccggagacgataccctcacccttcgtccgggacgcggcggcacgatcacgagcatccgtctgcgggatttccccgacgccgatgctatgctgcatggcctggaaaacggttcccttacctttttctacagtgagctgtcgggcggggagatcccccgtacctccagcgccacggcggatgtcccgctgcctgacctgctgtttttgggggtcaacgcccggcacgacgccttgaaaaaaacggaggtgcgtgccgcactctccgccgccctgagccgcgaggagctcgtctcgggggcgctgtccggccggggagccccggcgctctccccgtttccaccccaatgggcggaggctgcggatataaaagtactgggcgcggcggaaaatatcgcctccgctgttgcacaattggagcaggcgggttataatactaccgacagcgccgcgggactatccctcgagctgctcgttacgcaggggaaccctttccggaaaaacaccgctgatcttgtcgcgcagcagatggcccgggcgggtatcgcggtgaccgtgaccgagctgccgtttgccgagtatgaaaaccggctgaaaaaggggcagttcgacctgtatctgggcgaggtccgcttgagcgcggatctgcatctgcgttccttcctcacccccggcggggccgcggcctacggccttgcggcggaatcaccggcggctggagcctataacgcgtatctcgcggggaacgggactcttcaggggttctgtgatgccttcgccgcggatctgccgtatatccctctgtgctggcgccaggggatggcggcttttcaccgcagcctgtcggggcttatcccccacgcgtacgatgtgtacagcggctttgagagttgggtctttgcctgaccgccgcgcaatccttttccaaagcgtccctcgccaaacctgaatagaaaggcgtgtgttatagcatgatccgaatcgaaaatcatctggggaccatcgaaatatcgcaggaatattttgcctatcttgtgggtaacgccgcgtcctcctgctatggtgtggccggtatggtcaaaagcggcaccaaacaggggctgcgttcggttttttataagcgtcccttcgcggacgagggaatccgggtgcgcagtgagaacgacaaactcatcgtggacctgcatatctccgtcatatacggcatgaacatatccgccatcgccaagagcatcgtcaacaaggtgcggtataccgtggaggaagccacggggctggatgtgaagaaggtcaatgtctacgtggacgggatgaaaaccgaataatcggggtgaaccgctgcggcgttcacgccgggcgcgtacctgtaagggagtgctgaaattgatacaaggtaagatattgcgggacgcgatgatctccgcgtccaactgcctgagccagaaaaagcaatcggtcgacgagctgaatattttcccggtccccgatggggacacgggtaccaatatgtctatgaccctgtccgccgccgccagggaattggcccgcctgcaggatcccaccgtcagcgaaaccgccgataccgcctccgcggcccttctccggggcgcccggggcaattccggggtgattctctccctgctgttccgcggcttttccaagggactcaagggtaagagcgaggcaagtggcgccgatctcgcggtggcgctcggtatgggggtggaagccgcgtataaggccgttatgaagcccaccgaggggactatcctcaccgtcgcccgggaggcggccgaaaaagcgattgccgcctcgtccaaggatccgtcggtcaaaacggtgtgggccgtcatctgcgacgaagcagaagcctccctcgcccggacacccgatctgctgccggtgctgaaaaaggccggtgtggtggatgcgggcgggcaggggctctgcatcattctgcgcgccatgcaggacgtgttcgggggcggcgccatcgtcgagggggacacccctgccgaagcgcccgcagcgggtaaaggcgtcagcgccgccggttcctttgaggcggacatcacctttacatactgcaccgagttcatcgttgcacgtgataaagggaacgaccgcgatccgctccgcctgcgcgcctatctcgaatccatcggcgactgtgtggtggtggtagacgatgaggagatcatcaaggtccatgtccacaccaacgacccgggcaaggctttgtcggagggtgtgaaatacggccagttcgaaaccgtcaaggtggagaatatgcggatacagcacgccaacgccggctgggtcgacaccgagggcgccgacgagccgaaactccttgaacgggtggagccggaggaggaatacggctttgtcgccgttgccgcgggggagggcctccgcaccctgttccaggatctcggctgcagccaggttgtctcgggcggccagaccatgaacccctccaccgacgacatcctgaacgccatccaggcgactcccgccaaggtggtgtatgtgctcccgaacaacaaaaacatcatcctcgcggcggaacaggccgtcccgcttgccgaccgcaaggtgcatgtgctccagacccgcaccatcccccagggtgtcgccgccctgctgagctttgacgccgacgcgggtgtggaagagaacctgaccgtgatgatgaaggcggccgacaatgtgtccaccggttccgtcacctttgccgcacgggacagcgatttcgataaccactcgatcaaagagggcgaaatcctcgcgctggaaaacggcaagctgatgtttacggataccgatatccatcacgctgccgtcaaactggccaagagcatgatcaattcccgccgcatctcgggccgggaggtcgcgttcatcaccctcatgtatggcgaggggatgaccgaggaagacgccgaggccgtccgggatgccatcaccgccaaggcgggcgacaacgtggacatcaccctggtcgacgggggacagccggtgtattactacttcatttccatcgaataaggggccggttcggcccaaaaaccgcaggggcgagcccatgcgtgcgccgtgcggcgccgcgggcccgccctgtttgcgaaaagggggcgggttcagggcctgccccgcccgcagtggatggagggcttacagcacccctgcctccagaaacgagaacgcccgggcgtcgcagtcgatccgggcctgtacgccatagggcatcgggcattgcggagagatatgcccaaacggcaaaccatataaaaccggtagatggggacgtccgtattcctctcccaccgtccggcggatccgcgcggcgtgctcctcaaacccgcgcttttcaccgatccgcccgatcacgattccccgcagccgctccagtgccccgcttttccccagccagtccagaaaagcatccagctggcccggcgaaaagaaggaggggatatcctcgaggaagaggatcgcgccggcccagtcctccgccttcggtgccaagggtgtgccgtccagctccatcaggccggtgtgcccgccgagcaggaccccctcggcccgcccctctccctggatcagttcgtaaccggggcagggcgcataggggcggacatcctccggattctcgtaaatgggcgggcggcaggtccagcttccgggcacctctaccggccccgcagccccctccatcagcgtccggcggaaccagcggacggtgtcgggatgcaggccctggggatcggccaggggggagaggaggttggggccgtaaaacgtggacagccccgcccggcggcaaaacagatgaaggttgaggacatcggaataccccatgaacaccttggggttccgccggaccgtttcctcatgtagatagggcagcaggcggtggctgtcgttgcctccgacgttggcgaggatcccccggacttccgggttctcgaaggcccacaacagatcctccgcccgcgcctccgggtgacggcgcagatagtccgaacccttcagtgcatgaggtgccggtatcacccgcagcgagaaagcttcccggagccttcggacgcccagctcgtaccgccagatgatggaggcgtcccccgcccagccgtggcaggggctgacggcggccacggtatcgccggccttcagccgcggtggcttctgcagcatcccgatcccccctttttatcccagtatacacgcgcacgccgatttgatcaagagaagaggaggcatcggccatggaaatccatatggacacccccgtccagttcctcaagggagtgggcgagcggcgggcggcgcagtttgcccgtctcggcgtgacgacggccggtaccctgctacggcattatccccggcaatacgaagactggaccgccattgtccccatcgcctccgcaccggtgggcgagccttgctgcatccgcgccaccgccatggcggcgccacaggagcatcgggtgcgcaggggcctgtccctgtaccggttcaccgcctcggacggagtgagcctgctccatgtcaccctgttcaacaataaatatgcagctgccaagatcaagaaaggggaggactatctcttcttcggcacggtgaccggcgggttccggagggcggaaatggcatcgcccctcatcgagccggccgaggggggagcccggatccgcccgatctacccgcagaccgagggcctgacctcccgggtgatcgaaaccgtggtggccaataccctcctggcgctgggcaatgagctggacgatgatccccttcccttttccctgcggcaggcgcatcagctctgcacccgccggtatgcgctcgacaacatccattttccggccgatcatcgggcgctttcggttgcgcggcgccgcctggtgttcgaggagctgctcctgctccagcttggccttctgcggctcaagggccgttcccggggcaggaccggggcccggatcgagagggatgcgtcggcggctttctggcctctgctccctttttccccgaccggagcccagcggcgcgccgtggcagactgtgtccgggatatgcagagcggcgcgcccatgtcccgcctggttcagggggacgtgggcagcggcaaaaccgccgtggccgccggcgtggcgttcactgtgatccaaaacgggttccaagcggccatgatggcgcccacggaaattttggcggaacagcatgcccggtccctgacttccctgctggaaaaaggaggaatccgggtcggtcttctgaccggatccctggccgcggccgagaaacggcaagtgctcgccgacacggcagagggacggatccagtttctggtcggcacacacgcgctgctgtcagaaggggtgtccttcgcccgcctgggcctggtcatcaccgacgagcagcaccgattcggagtggcgcagcgggccgccctcgccgccaaaggggaaaacccgcaccttctcgtcatgtccgcgaccccgatcccccgtaccctggccctgatcctgtatggggacctggacgtttcggccttagacgagctgccccccggccgccagcctgtggccacattcgccgtgggcggtgacaagcgggaaagagcgtacgcctatgtccgccggcacctcgatgagggccggcaggcctatgtcgtgtgtcccctggtcgaggatggggagaccgatctcgcctcggcgtcggcgtattttgaaaagctcatggcgggaccgctgcgttcctactcccttggcctgctccacggccggctgaaagcagctgagaaggacgccgtgatgcgggattttgcggcgggccggatccaggtgctcgttgccaccaccgtcatcgaggtgggggtggatgtccccaatgcggtgatcatggtcattgaaaacgccgagcggttcggcctcgcacagctccatcagctccgcggccgggtgggacggggccgccacgcgtcgtcctgtatcctgatatccgatgcgaaaaacgaggaggctgtacggcgcctgcgggtgatgtgccagaccaacgacgggttccgcatcgcggacgaggatttaaagctgcggggtcccggcgatttcttcggcagccgtcagcacggcctgccgaacctcaaaatcgccgacctaatgggggatatgcctctgtttcaggaggcgaaagaggcggccgagtgtttgatcggcgaagatccggggctggaatcacccggcagccagcctctccggtcggaagtcgtccggctgttcgagcaggtgggggagcaggggctcaactgatttttcgtccgaataaccaccctacccttttcgaaaacccggcccggcaaatacttggccgagttttcgaaaaacctgttgacaaaccggctcgttttgcttataatagacgacgttgcagcctgctgttccgccgtttggccggcgcggcagatgtcaaaagtggcccggtagttcagctggttagaacgctagcctgtcacgctagaggtcgacggttcgagcccgttccgggtcgccacttgctgctatagctcagtcggcagagcgcgtccttggtaaggacgaggtcaccagttcgaatctggttagcagctccaaaacaaaaagcacttcattacgaagtgctttttgttttggaagacgatgcaaggttgccatattaagaggagtttttgaagaaaatacttagaatttgaggtatccatgaccccacacccgtctaaacggcggctgtggggtttggttacttacgaatggctgtcgggattctcatggatatgtctcggccgtcccatggggaacgggcagagtcccgagtcccgcagctgctgcatgtgctcacgcatctgtccggtccgttcggccaccttgtctgcctctaggatgccgtcatctgcaagcccttgcagaagctggatgtctgcgttcatccgggcttcagcgagcttgtaaagctcctgtttctgttcgtcggagagggcgttccatttttcctgaatggcttccctaaattcccgcatcctggccagccgggctcccggttcttcttccgaagaggcgggagccccctgcgaaacaggcggctcagggatgtttttttcggctgcgaccccaaaaccggagaagagcacggccgtgagcatcagagagccggccaaacctgccattttgattttcaggctgttttttcccatatccgcatccttctttctatctgatttcatgaaaaacgcgcgggctgtcatcacctccttctcacatagtatctccggatgtccaggcgtttttctgccagccattttttcatacaagttgcccgtcatggctgcatttcaagggaatctattgaaaatttgtcaaaaacacgctaaaatgaaagaaaaaaggagggattacaatgccctgtgacaatcggcggccttgcccgtgtacctatccgggatgtcctcgccatggacactgctgcgcctgtgtggcccatcatcgggacaaggaaggcgggattcccggctgctttttcaccaaagagggggaggcgctctggcagcgggatttcgagacctttgcgaaagaccgcggtgtcaaacggccgtgaccagggccctgacacccattgaaatgtctcagagcctgtgatcgtacagagggtgaaaaaacacttggacagcgttttgggcggggcattgcgatcgctggcgtctctgcttcaaggctctgtcttgtttggattatgatcggcaacacgatgggataaacggttcattcattgaaggctctccttctgttggcttgtgcggtggccagtcagaatgggaggtcggtcaacaaggagatcgaattccggatgcgcgaggttatcagggcgtatgaaacggaacatggccccatccggctggagaaagacgcacgataacgacgaaatggttacagacccgggactggatatccgttcccgggcttttcttttgctatagcgggcaacgaaaaaaacaccctggctcccgccagggtgtttttttcgcgcatttgccttacagcgccaattcataaatggcatggacgtcccgggtatggagcttttggaactgtccctgagggcctttggcgcagcatttctccgccatctccaaaaggcggctgtcgtcgatgccggcctccccgagccggaccggcatcccgatggaccgcaggtaggcttccagacggcggatcccctgcagcacgatctgttcgggctccgcaaaagccaggtccacgccgaacacccggaccgcaaactgcacgaatcgggacatatccgcgcgataaacgtatttcatccatgccgggaagacgatggccagacccgcgccatgggcgatgtcgtagagcgcgctgagctcatgttcgatctggtgggaagcccagtccccgatccggccggtgtccagcaggttgttgtgggcgacggtacccgcccacatcagctccgcccggatatgataatcgtcggggcgttcgagagccaaaggggtgtagttgataaccgtgcgcatggtggcctccagcagccggtcggtgagatccacgtgatctacccgggtgaaataccgctccatgaggtgggcgaggatgtcggtggcgccgcaggctgtctgatagggaggcagggtgcaggtaaaagccgggttgaggatggcgaaacggggaatgagtgcctctccggcacaggagcgtttgaacaggccctcctctttggtgatgacgcagctgtcgctcgattcactgcccgccgccgggatggtgagcaccacgccgaccggcagtgctttttccaccggaacgagccgctcgaaaaagtcccacacgtccccgtcggcacacgcgccgagcgcgactgttttggcggtgtcgatgacgctgccgcctccgaccgccagaacggcgtcgagccggttttcacggcagagacggatcccttcccgcaccaggccgaggcgaggattgggttggacgccggcgagttcggtcacctcgacgccggcgtccgccagacaggccaagaccgtatcatacaggccgctgcgtttgatggagccgccgccatataccagcagcacccgccggccgagcgcggccatccgtttcccgacctgttcctccatcccctttccgaaaaggatgcgggccggattataaaattcaaagttgagcatgacaaatcccccttatgttatccaatgacatagaacaggatacagaaataatggagaacggccccggccaatacgaagaaatgccagaacgcgtgcatgaaccggacgccttttttgcggtaaaacaggacaccggcggtgtagaacaccccgccgaggatgagcaggatcacgccgggcagggccatccgccgcaccaggggcacaatggcggcgatgacgcaccagccgctcgcgatatagccgaccatcgagatttttttgaaccgctccacactgatggagttcaggacaatcccgacgacagccacgccccagaccacgccgaacaccgtccagcccacccagccccggagagtgaccagggtaaaaggggtataggtcccggcgataaggaagaaaatggaggtatggtcaaagacgcggaatacctttttcgccgtgggattggtcagggcgtgatagaggcaggacatcaggaaaaggaagatcatgctcgcgccatagatggctgagctgactacctgccagacgtcgttggactgcacgagcaggacgaccataccggcgatggccatgccggcgccgacgccatgagtgatggagttggtgatctcttctccgagagtatagaaaggcgtttttttctcagggccggtattggatggcatggcgttctcctttcaagaggggttatgcgtcggttttgcggaagcggcggaccagggccccaatgcccttggcgatctccacaaccgccagcggtaccagggcgagcccggcgacgataccccaggcggtggcgctcagggttgtcacctcaaagacgttttgcagtacgggtatgaacagcacgacgagcatcaggaaaagggaggcgaaaaatgccccgaccatatagaggttggtgtgaaaacccacccggaaaagggagtgggaggagcggacgttgaaggcgtggacgagctgggagatggccagcacggcaaaggccatggtctcaccgaggacgatgttgtcgtcggtgggggcggcgaagaggcagccgaagaaaccatccccggccggatgcaggaaccgggaaccgatcgcgtaggcgaccagggagagcagcccgatgagcataccctgcagccctgcccggattcccataccgtgagcgaagaggctttcggtcttggcacggggacgccgccgcatgacgtctttttccaccggctccatgccgagcgccagggcaggcaggctgtcggtgaccagattgatccagagcagctggaccggcatgagcggcgtttccctccacagcagtatggccaggaatactgtgaggatctcgccaaggttgcaggagaggaggaactggacggatttgcggatattgtcgtaaatcccccgcccttcttttacggcggtgacgatggtggcgaagttgtcgtcggtcagggtcatgtccgccgcgcccttggctacgtcggtgccggtgatccccatggcgcagccgatatccgccgctttcagggcaggggcgtcgttgacgccgtctccggtcatggagacgatttcgcccgcctgctgccaggccttgacaatccggattttatctgccggtgtcacccgggcatagacccggtaacgccggatgttttcatacagctcctcgtcgctcatggcggcgagctgagcgccggtgacggcttcgccgtcgtcgtggaggattccgagctggcgggcgatggccgaggcggtgaccacatgatcgccggtaatcatgaccgtgcggatacccgcggcgtcgcattcgcggatggcgtccacggcctcggggcggggcgggtcgatcatcccgacgaggccggcgaaggtcaggccctgctcgagatcctccggccggcagtccatcggcacttcgtcgatggtcttataggcgacggcgagtacccgcagcgcctgccggcccatctcctcgttcgcggcggcggccgcctcgacgggtccggaaatacaccgttcaaagagcacatcgggcgcgcccttgacgatgacgatgttctgcccctcgatcagatggatgacggtcatcagcttgcggtcggaatcgaaggggatttccccgagccggggatgctccgccgtaagctcggccttatcgagtccctggtgcagggcacaggcgacgatggcggtctcggtgggatcgccgatatgcacctctttgccgtcctttacttggacagtgccgtcggtgcagagggtggccagccggacaagagccagcgcgccctcggacagagggctgcccagatcgtcgatcatgtgcccgccgcagaacaagcgggtcagggtcatgcggttctgggtcagggtgccggtcttgtccgaacagatgaccgacgcgctgccgagtgtttccacggcgggcaggcggcggataatggcgtttttggccaccatccgctgtaccccgatcgccagcacgatggtgacgatggcgggaagcccttccgggatggctgcgacggccagggaaaccgaggtcatgatcatatcgatgaccgggaggcggtcgatcaggccgacgacgaggatgacggcacagatggccagcgccagaaagcccaaagttttgcccagatgggcgaggcggttctgcagtggcgtgacggtttcctcttcctcttccagcatggaggcgattttccccatctcggtgtgcatgccggtctccaccacgagggcccgggcgcggccgtaggagaccgcgcagccggaataggccatgttcagacggtcaccgagaggcgcaatgtccggaatctcgacagcggcatccttttccaccgggacggattcccctgtcagggcggattcgtcacatttgaagctggcgctggacagcagccggcagtcggccggaaccagatcccccgcctcgatgtcgacgatatccccgggcacaaggtcggtggaggggatgctccgcatctcgccgtcccgcagtacctttgccgaaggggaggacatgtttttgagtgcctcgagcgccgcctccgctttgctttcctgaatgacgccgagcaggccgttgacgatgacgatgaggacgatgacgatcggttcgatccagtcggcctcggctccctggatgaaattgtaaatactgagccccaatgagatcagggccgcgatgagaaggatgatgatcatgacatccttcatctgatccaaaaaacgctgtaaaaaggaccggggctttttttcatttaaccggttggagccatgctcctgcagtcgaacggctgcctcgctgtccgacagcccctgcgccaaatcagtgttcagttcccggaccacatcgtccagcttgtcgctgtaccagatcacggaggaccctcctttgttttgataaacctttttaaacagtattatactgcaaaaagggaaaaatgcaaagattttcctcgcatgatgaatgaagaatgtttgtgaatagggagatcgtataaaaaaacttgtgatcccgtgcggactgtgggataatacatctatataggcagaggcggcgggagtccccttgacgcttcgtttccgaaaaaaacgccggggagggataaagatgtttgacctgtcgcgttggccgtccatacgggggatcgctttatccggtgatcttcaatcggacgccacctgttttttggtttcaaacggcaaacgggaaacggcggctcattgtatggccgtcgggaacacaagtggggaaatcgccgctcgcttcgggctggatatatccgtggccacaaccgccgcatggctgcacgacatatcgaacgttctgcagccgtccgatatgctcgactatgcgcttgatcggggttgggcaattgacggttccgaacgccgatatcccttcctcctgcatcagcgcctgtcggaggtattggcgaaggagctctttggcatcaagaacggccttattttatcggctgtcgagtgccgcgctccgctatatcgatttcgtgctggaaaacgatcggtttctttgccctcatccgtggcttgtggaagccaaaagctggctcgaacagggcggctgattctttggctttcgacatggcttttacctgcggggacgctactttgccactaccatattcttgacggacccggataggtggggtatacttgggacaaacgcgggagagcggggggatcgcatgccggagcgggcaaaccaaacggatatcgcggttgtgggcggcggtgcggcggggctgactgccgcggtcctgtgcgcccggtcagggcttcaaaccgtggtgctggaaaaggcgccgcgggtggggaaaaagctgcttgcgaccggcaacggcacctgcaacctgaccaacctctccgcctcgcccgcccgatatcacggcaaaggggctgctgatttcgtgcggccggttttggaagcctatccgccccggcgcatcatgcgttttttcgaggaactcggccttgtctgccaggtgcgggaggacgggcgggtctatccccgcactgcccaggcgtcggcggtgctcgactgcctgcggctggccctgtccgccgccggcgccgaggaacggaccggatgcccggtcacagcgatccggaggacggcgggcggcttccgtctggatacgggcggcggagttctgaatgcccgcctggtcctcgttggtgccggaggggcagcggcgcccgccctcggcggggggacggacggctatacgctgctcacggctttgggccatacccgtaccccgctgtctccctccatcgtgcaggtgaaaaccgacccggcggccgtgcgtgcgatcagggggatccgcctggacgccgccgtttccttctgcctggatggccgggcgctttcgcaggagacaggggagctgctttttaccgaatacgggctgtccggcccggcggtgatgcaagcgtcccgtcctgtcggggactgggagcggaggaaggacggccggatgacagcggtgctcgatctgctgcctgaaacagaggaaaaggacgtgtatgcctgtctcaaacagcgccggagtcttcccggacggacactggaggagtttttcaccggccttcttcacaaacgggtgggacaggctctgctgcggcaggctgggatcggcccctttacccgtccggcgtccgatctgaacgacgggcagacggcggcgctggcgcgtctgatcaaacgatgggaaatcccggtcaccggtacccagggaatgggcggggcgcaggtcaccgccggagggatcgccctggcggaggtggagccggcgacgctgatgtcccggaaggtgccgggcctgtatctggccggagaggtgctggacgtggacggggactgcggcggtttcaacctgcagtgggcgtgggcgtccgcccatgccgcggcgtcggccatgcgggaagccgttcggactggaaacgaggggatgggatgatccgcttgagcgggcttgccatgccgctgtcttatacggaggaaactctgcggcggcgggtggcgaaggaactgaaggtgccgccgtccgttatagccgcgctgcgggtttaccgccgttcggtggatgcccggcacaaagagaatgtggtatttcagatcactgtggacgtgacactcgggaccggggagaccgcggcggcgtcgcgttgccccggtgcgactctgcttgagccgccggcccggacattccctctgcctcatcccgtatccctgggggatgagccgccgcccattgtggtggggagcggcccggcgggactgtttgccgccctggcgctggcccgggcggggctcaggccgatcctcctcgagcgcggccgggacgtggacagccgccgggcggacgtggagcgtttccggacgaccgggctgctggacaccgcctcgaacgtccaattcggtgaggggggcgccggcaccttttcagacggcaagctgaatacggggatcaaaaatccccgctgccgttttgtccttgagcagcttgccgcctgcggcgcgcctgaggagatcctgtggcaggccaaaccccatgtgggaaccgaccggctcatcgacacggtacggggccttcgggaagagattcaaaaattgggaggccgggtcctgttccgccaccgggtcacggatatcctgacagaggctggccggctggccggccttttggcagacacgccggctggccgggaggaattcccttgccgccgggtgattttcgccgtcg

SEQ ID NO: 2020 - DNA, 5594 bp, Unknown
  16S sequences of unknown bacteria
caccgccgaaaaaggagaattacgaagcggtttatgctcatggaatcaggatttcggaagatgtggcgcagacacttgaaaatctgtactatattttcaatcaggcgcgatccgaggacttcaaggggcacagcctgtcggtcagcgacatagttgcgctgaagcgtgatggcgtggtatcctattactactgtgacagcgttggcttcagagagcttgcggatttcggtagggaatccatattgaaaaggcttgaatgcaattgcaaggctgatgaaaagaaaaagacaaaaatgaggagtgttgaacgatgaaactcactttcgatgagcggatgctcatgacactatatagcaccgggacacgtggagggacggtcaggaatcttaaaaatatgcgtatgtgcatatctcatgacgaaacctttctcagaaatctgacagattcggtactctcaaaactcgaccttatgacagaagatgagttcgaagacgctattttcaaaggattggaggaactgaatgccgactaaatacgagactttcgcggagcttgccgccagaaccgagcggatgcttactgatagcaccgaaaactggaagtcatttttggcagcggcggcgagactttataaatatccgtaccatgaacagctcctgattttcgcccagcgtcccgacgcgaccgcctggctttttatgtcgaattacgctcagccggggataatcttactctcaccgcaaagtctgagttaaagtccgaactgcggcaggcgtcccctgttcgcctcgaacatctcgtcgaccatatgccttatctcctcaagcgagcagaccgcggcggtcagcgggtcgttgacgcaggcgtgatagattatctccctgtctccggcgatgcagccctctacggctaactcctcgccctgcgcggttacagtgttcagcgcggcgatctggcgcgggagctttccgacctgtatcggctggagaccccgctttgaggcgacaatcggcacctcgacgataacatcctccggaaggttagatatcagcccgttattgcggatattccccgcgaactcgaacatctcgccgtcgcccagaatcgagttgaggatatacgcggcaaactcctgaccgcgcgccagactgacgttgtcctgcgcgagagccttctccatatcggcttctctggtcgcgtcgcgcttggttatccctctcaccgaggtggcgtatgagtccggaatgtacctgtctataagctcctgacgctttctgaaccacgcgttgtactcggagttgtgtccgctcgactcggtcacaaagtagccgagtcctttcatcatctcaatccggacagcctcggacttgtagatctccggcttttctgccgccttccggatctcggggtagacgtccttaccgttgaccttgaactcatagtagaaagcctgatggtttattccggcgcacttgtaggtgacgtccttcatgtcagcgccgatccatttggcgagcatcgcggcagtgccctgaacgctgtggcagagcccggtcagctttactccgcagtgctccatatagctcgtgaccatgcacatcggattcgtgtagttgagaaccaccgcctccgggcagagctcgagaatatcgctcgcaaactccttcagcaccggcgcgcttctgagaaatctgaagattccggagggtccgcgcgtgtcgcctatgacgacgtccacaccgtatttcttcggtattgtgatgtccttctcccacgtgcttatctcaacatcattcctgattgtgattattacggcgtccgcgcctctcagcgcctcccggcggtcaaatgtggattcgactgttccggcgtatccgcccttgtcgattacgcgctggatgaacttctcagccgccttcatatactgcgctccggcaggtatgtcgacaagctttatatgcgagtcggcaagcgccggaaaagtgaagatgtcccgggctatcgctcttgagaagttgtagcttccggctccgataatgacgatgtttttcatgtttgctcctttttattgatccgggcttcgcgaaagctgccctgaatcagcgtttatccccaaaggggttattttctcagcgcgtccgcggtctccttcagcagggtgtctatgctgtccttgttggcggcgacagccgaggagagatccttgctgccctccctgaacagactccgcatgaagttgtcgcggatctgtgagcaccagaacgtgtcgcccagatcatagacgcgcgtatccataataaggtcgaacatacgcgaggactcgtcgtcgcgcgtgtacttagtcttgagcgcgacctcgaaataggcgggaattatattcgcgtgcgcgcttgaagccagcgcctcaagcatgagccccgtgaactcggtgtccgtcgtggtgaccgggacgatgaatatccgtccgccctcgactctggagtaatagccctcctgcgcctcgtcccacttcggatgcggaagtacgccgtagtctatcttcatgtcgcggtaatatccggtgcccagaagcccgaacgaggtcgtctgaaacagcgcgttcccgtcgctgaacatcgggtcgagattaatgttctgatccttgatgccgcctgtgtaccacgcgtcgttcgaccacgcaaggtcgacaatcctgccgtatacctcgagaaatatctcgtcgttcgccattgagaagtacgggaggtcgtccttgtccttctttatcgaccgcgctcccgcggcgatccacatggtcggcgttatctgctttgcgttggctgaccagccgtatctgtcgttttcgtccatctttgagtcgccgttgagatccgccgacgtcgcgacgcacatcctgttgaacgcgtcgaaggtccattttccggagtccaccagggtatacggattctccagcttcagctcgtccaccagcttcttgttgaacgccagcgcgtaggtatagtcatagaccgagagattgaagtcgccgtatgccagccactgctctcctcctatccttatcgagtcgttgatactccgcgcccagtaatccttgtcgagatccacattcggaagctccgcgtatgagatcagcgccccctgaaccgcctgctcaagcgcgtagcggtcggtcatcgacattatgtcatactcgtgctcaccggcggcgagcagcttcactacggtgttgttggcgtccgagagcgggataatctgctgcgctatgaccacgtcgaagcgctcctcgacagcgcggttcgagtcatatatcgcgtcgttcaaaaggtctccggttgtctccgcgacgtcaagatagccgatgtagtttgtggtctctgtcgagagaaccctgaattttctgccggagaacctgagctccgggagttcgtccctgtctgaaggaacagattcaatgaccgcggttgacacggaatccgtatcggatgtggtctccgtctgatcagtcagcgcgccgcaggacgcggactcagccgctattacagccgtcagaagcaatgccggaatatgccttttactcatttatgtaagttcccttcttaaggataagccggcgggagtgttcccggctcatccgatgatttgtgcatttattgtatcacagcttccggcaaattaccatagataaaactgtcaggaatacatggatatttctgctgaggatgagaaaagcgagcccgcgttcttttctagaagctctcgcggacgcgctttctgaattcgctcggggagactccggtgtattttttgaatatccggctgaaatagagcggatcgtcataaccgacacttgcggagatgtcgctgacgcggacattcgtctcgccaagcagatactttgcctgcgagatccgcacgctcatcagataacgatacggcggcatgccgaactgttcggtgaacagatggatgaaatatgactcgctgatattgagcattttcgcgtacgcggagatatccgtgccgcttgcgaaattagtctgcatctcctctacgataagcgtcaggtcgggcgcggagcgctgattctcggcggagtatttcgcatctatgcgcctcttgacaagcgtcagcatgttgagaagatagccgttgcagttattcatgaagccgaccctttgcagctggaactcctttattatcttctccgcgtacaggaagaaatgcgtggtgtccgagacatggtatatccgaaacggctctatactgtactccctcacaatccgctccgccgccgtcccggtgaaatgtatccacatggcgtcgaccggatctgagtagcggtattcgttccgctcgttcggcgggatgagtatcatgtccccgccggacaaaagtatctccttatctccgcgcatgaacgccgcgccgccctttgatatgaagaccatctggtagtcctttcgtccatgcgggcggagagtaccggcgttctccgcggttttttcatatatcccgcagcagttcacctgcaaaaaattctccgagtcgaaatcgttgttgcgtttctgtctgtcgtatatgcttccaaccctgaccgtcatataaccacctccgttttcagatttcaagcgccgcgaaaatccgtggcggcagcttgccgcattcgaaaaaacgctgactcagcgcgaaaaccggttaacccggataacccgtctccggcgcagaacggcaatccgactgactgatccggtgggttatccttcaactctattatacagcatttcgcccggaatgtcaaccaccttcagcaggaatatccataatttccggcaggatatgctattgaattccgccggaaaattatgtatactaagtgcggatgaaaaattcaatcgagaggtttttttgcatgaaacggataagacttgatgaactgagggcgtttgccgtcagtacgctcagatgggcgggcgtcagcgagaagaacgccgccgaagccgcggacgtgctcgtcacgacggataccttcggggtcatgacgcacggaacaaggaatctgtatccttatatacagaaaatgcgggcgggcggacttgacccgcgcgccgaacccgcaataatccgcgaaggtccggcgtgggctgtgatagacgctgacaggtcgctcggaatgatctcgggctgcatggcgatgaggcttgcggtggagaaggcggagaaaaccggaatagcctatgtcggggtgcgcaacagctgccacttcggcgcggctggctattacgcgaatctcgccgcgatgaagggcatgatcggattatccatgagcaataccgacccggtaatcgcggtgcccggcggcagaagcaagctgatcgggacgaatccgctggcgttcgccgcgcctcttggcgacagcacaagcctgtttctcgatatcgccctcagcaatgtcgcggcgctgaaggtggtctatgcaaaggaaaaaggactgcctgtcccggacacgtggcttgtcgacgagaagggtctgcccaccaccgacgcggagaaattcccgggggaggcgagcttgcagccgatggcggctcataagg

SEQ ID NO: 2021 - DNA, 4444 bp, Unknown
  16S sequences of unknown bacteria
gcatcgaagcgcgcccaggagctcgggtcggtcgcgccagacggcaccgtcgcgctgcgctgccccgacgagcccacgtgtctgaacctgctcgagcgcctcggcaagccgttgtgctgcacgagcgcgaacctccacggcgcgccggcggtgtcgagacgcgcggagctggacccgtcgtttgcggacgtcgcgggctttggcgagcttccggattgctgtcggggcgggaaggcgtcgacgatcgtcgattgcacgggggaaacaccgcagattctgcgcgagggcccgattcccgagcagctcgtgcgcgaagctgccggcatcgatgctacactcgaacggtaagcaaaaaagacgagaggggctgacatgggaagtctgcgcatcgcagtagggagcgaccacggcgggttcgagcagaaggagcagatcgcaaagcgcctgactgccgagggctacgaggtcaccgacttcggctgtccgtctacggaaagcgtcgactacccggattatgcggcccccgtcgcgcaggccgtcgcacgcggcaatgcggatttcggcatcctcgtgtgcggcacgggcattggcatgatgctcgccgccaacaaggtcaaggggatccgcgcggcaaacgtcacgtccgtcgagttcgcccatctcgcgcgcgagcacaacaacgccaacgttgtgacgctgtccgggcgcttcgtcgaccccgagctcaactggcagatcgtccaggagttcctcaagacggaatttgccggtggacgccacgagcggcgcgtcgccaagatcatggcgctcgagggctagcccgagcgcgtttcgagggtctattcgaggctcgatgcctgcggctgctttgcatccgttcgccagaaaaaaatcgttcaaattctgatgaggggattgagcaaaacgaatcgaccgctattattgtctaggtttgaacagagggccgcattgcgactggggattttacaaatatggttctagcgatcgttctggggattgttgctggcatcgctagctttgccccgttatatgttggcctgaagcgttctcgtacgatggacgcgcaatcgtctgcaatcgggtatctttcgcctttgctgctgatggccgctgcctcgattgtcgttctcgtgatttgcacggctctatgcatcgttgtggcacgttccatggcgctgccttttgtcgtttccgaggccgccgcgctcatcgtgtgcgcgcttggctttggaatcgtgcgtattgttaggaatagataggagaggaagaacgcgtgagtgatgtgaatccactgcaaatgctccagacccccggggctggcggcgagactccgctcgaggagttgcaggggtcgtttgacccgacgtaccttgccggcttctttggcacgggcctgacgcagtacatcttctggatgattgtctgcgtcattcttacgttggtggtcgtcttggtcggcggcaagcgcctgacgctcatcccgaccgacaagttcgccaacatggtcgactacggctacgacgccatccgccgcaacatgggcgagaatgcgatcggcgagggctacgagaagcacatgcccctcatcgcgaccatgttcttcttcatcttgatctccaacttcgtcggtctgatccccggattcaagaccccgacgggtaccctgagcgtcacctgggctctgtccacggtctcgttcttctacttcaactggcagggcatcaaggcccgcggcggctggggctacatcaagtccatcgccccgtccggacttcccaaggtcatggtgccggtcatctggttcttcgagctcatctcgctcatgctccgctggctgacgcttgcagtccgactttacggcaacatgttcgcgggccacatggtcctcggcatcttcgccctcatgacgagcgtcttcatccagggcatgatcatgagcggcaacgtcttgttcggcctgccgcccatcgcgtggatgctgttcctgatcgcgatgtacgcactcgagtgcttggtcgcgttcctgcaagcgtacgtcttcgccatcctgacgtccgtctacatcggtggcgccatctccacgcactaaccaaggtttcggttactcagccggtccggatgtccggctagtacatagagtaaggaaggatcgcggaaaaggtccgctgtccgtctctgaaggaggatcacaagtggaaacgactctcatcatctcggccctgaaacttgtcggctatggtctcggcaccattggcccaggcgtcggcatcggcctcgcagcctacggctgctgcgttggctccgcacgtcagcccgagctcgcaggccgcctcttcaccgacttcatcatcggtgctgcacttgctgaggcacttgcacttatcggcttcgttctcgccttcatcctttaatcagggcacatcactacgtgaaacatgcccaagttaaaggaggttggtaagtgaaagcgtcatttaaaaagctagcagctcgtacgggtgctgtagcagcacttgctagcagcatggctttcgcgcttcctgcttttgcgtttgcagctgagaagaagacctctggcattgcggcaatcctgccgaccatggacgagttcatcccgatggtcgtcgccttcctcatcctgctggcgattctcgccaaatggggttggcccatgttcgacaaggttctggtcaagcgtgagaacacgatcagggctgccctcgagcaggccgaggagaaccgcatcgagagcgagcgcgtcctgaaggaataccaggaccgtctcatcgacgcccgcgaagaggcatcgacgatcgtctccgaggcaaagcagcaggctgaggcccagcgcgccgagatcacctcgcgtgcgcaggacgaggcggatcgcatcatcgccaaggcacgcgagaccatcaagaccgagcagcaggccgctcgcggcgagctgcaggcctcggttgctgacattgcggtcgcagcgatggcaaaggtcgtcgaggaggacttctccgacgccgatcatcgcaggctcattgagcgcagcattgaagaggtaggtaacctcaatgcctaaaaaccgtatgctcatcaagaaagaggtttcgacgtatgcccaggtgctgctcgacgcagcacgtcaagcgggcaggcagtacgagatctctgcacagctcgaggaaatgaagaaggtcgttcgcatgagcccgggttttgccgaggttctgcgcgacacctcgcttccggaagctacgcgcagtgagattatcggcgaggcgttcaaggaattcgaccccgacatgatcaagttcgtcacggtcatggcagacaggggagaaatcgctcttcttccgcaggtagccgcggaatacgaccgcgagctgcaagaagaggacaacgtcgtcatcttggacgttgccacggtaataccgctcgatgacgagctgcgtgagaagatcaaggcaaagtttggtgcccagttcggcaaggagatcgcactgcgcgagcatgtggactcctggttgctgggcggcatgaacgtgagagcaaacggcaagcgtatcgactgctgcacggcaacgcgtctagacaagatgcgcgtcgcgctctctgatgttacgactggaggtgagaggtaaatggcggaaattaccgctagcgctatcgacgagattctgcgtcagaagctcgaagggctcgagaccaacgtcgagacccgcgagttcggttatgtaattcagattggcgacggtattgcacgtgtcaacggtctgaagaacgccatggctggcgagttgctggagttcgtcgcgtccgatgggcgcacggtctacggccttgcacagaaccttgaagaagacgaagtcggcgccgtattgctcggcgattccgacgctatcaaagaaaacgacgaggtccataccacgggccgtgtcgtcgaggttccctgcggcaagaacttccttggccgcgtcgtgaacccgctgggtatgccgctcgacggcaagggcccgatcgaggcagacggctaccgtcctgtcgagttccgcgcccctggcgttatcgagcgcaaacccgtccatgagcctgtccagaccggtcttattgcaatcgacgcaatgattccgattggacgtggccagcgcgagttgatcattggtgaccgtcagacgggcaagaccgccatcggcgtcgacaccatcatcaaccaaaagggcaaggacatgatctgcatctatgtcgccatcggccagaaggcctccacggttgctaacgtggtcgaggccctcgagcagcatggcgccatggagtacacgatcgtcgtctccgctcctgcatccacgtctgcaccgctgcagtacatcgccccgatggccggtgctgcaatgggcgagtacttcatgtacaacggcgagaacggcga

SEQ ID NO: 2022 - DNA, 4597 bp, Unknown
  16S sequences of unknown bacteria
aagaatatccatgcggatttatagggcacttttctctttgccaatcgagaccgtgaacggtggccacgcattttttgccgaacattttgggaataaacatggcggccgaaggaccctcggcgtggaaatgaacaatgtcgcaatcggaaaaagcggcggcaaaggcggccgtaaaggaggaaagcatggccgaaaggcccttgattttcagcgttctcgcctttttgagagaaacgcccttatacattccgttctttatgtccttttcaaacaccttttcgctgcggtcggcggttcggttatagcaaaccaccccgttccccttttcggccattatggggcaaagattggtaagcacggtttctatcccgcctcttgtggacggcacaaccttatggcctatcatggcaattttcatagtcgcttcctatcttccgtttgccttgatacaggcaatgggagttttcaaaattatttttatgtccttccaggtggttctcgtttctatgtattcaaggtccatctccagccacttttcaaagggaatgtcgtttttgttgggcattatctgccaggtgcaggttatgcccggcgtgaccacaaggcggagcttgtcataatcgctgtattgctttacctcgtcgggaaggggcggacgggggcccacaaggctcatgttgccgataaacacgttgaacagctggggaatttcgtcaatggagaattttcttataaatcggccgacccttgttattctcgggtcgtttttcattttgaaaaccgggccgtccatttcgttgctgtccataagctctttttttcttttatcggcgtccacatacatcgagcggaatttatacatatcaaagggctgtccgtggcggcctattctcacctgcttgtaaaaggggctgcccttggggtcgtcgagaaaaattatcagcgctatcagaagaatgggtattataagcacaagcagcataagggtggtgaccgttatgtcgaaagcgcgttttttcttccaatatgaataataagatttttcgatgagtttttcaagtcgttttgcggttttttcgtctacattttccgcttccaaaaaatttcattaccattcccacctgtcggatttatgaagaaattttccgtataaaaagcaatatgcccttacacctataagcctcttgagccgcagggttctcctcgtaacatccccgcaccatgaggcgtcataatgatgtatcgaaaccgtttttttggttatctccttttttccggtgaaaaaattcacggggcaaagatactgctcgtcgagaaaaatgacgttgtctataacctgatctctcttgtcggtgtcaaggccgagccgacgaagagcctcggtgtttcgcttgggacagggggtgccgtcaaaaccgtcggaagtcaaaaaggagacgccatcataatcgtcaagcatggcttttacgaatttgctgccctttttcgcgccgaagccgagtcccgtggccacgagattttcgcccttttcaaagccgaaaaagccgtcgtagctttcggtcaggccgtcgagactttttataagctccacgtcggtgtcgagatagaccccgccctgctcatatataattttcagtcgaaaaaagtcgctgacaaatgcccattttcccgcctcataagcctgctttgcatagagattttcgtttatatctacgtttgtctcgtcccatctttttatttcatatccggggcagtgctttttccaagaggctatacattttttcaccgagacggggggctcgctttttccgaaccaacagtagtgaataactttaggtatgctcatttctcaaaccctgttttcaatatatttttcggcggcgttttccctcggaatgatttttcccgggtttcccaccacaacgctgtggggcggcacatcgaaattgacatatgccccgggggcgataagcacgtcgtcgcccacctcgatttttcccacgacaacggcgtttgttcctatccagacgcagtcaccgattttgggcgagccttcccttttgccgcggttttcccgtccgatcgtcacgccggtcgcgatgttgacgtttttgccgataaccgcctcgggatttatgataatgcggccgaagtggccgatgtaaaagccctcgccgattttcgtccttgcggggatctgtatgccggtttttatcgagcggcggcgcagggcaaaatgccttaagggatttttactgttttgcgcctttctgaaagaaacgagaaatctcatttcgggggcgcggaaaattctgtgcaaaagcggttcgccctcgctcccgtatcggcggaaaaagtcctttttcaagatttcattcatgctcaagtctccccttaagtttatttacgacggatttaaagacgtcgggacgaacggcaaaattcacaagcgcataaaggggaactatccaaagcatatggacaattccgacgccgcacagatttaaaaatttcatgccgcaaaagctttcggttccgaaagcggcgaaaatcccgcaaaacaccgcgccgttcgcaagcataagcgcaaagctgccgacggggcttttgccgaacacccttttgttgacaaaaagtgtcgttgcgacgttgcggaaaacaatggccgccaccgtccccgcaagggcgccgcaaattccccattttattattccgaaaaccgtgaaggtcagattgagaatcatctccgccacggcgtgccaccttgtgctttcaaatgtgccggaatattctatgacctgactcaaaggcgctttggcgcaggcaaaaagctttgccaccacaaaaagcagaataagcgtggggttaatgtaatcggcgtcgtttatgccgccggtgtaaatctgaattatcgggagaagaaacaggcacatagccgtgtagaccacaaaattcgacgccacgaaaaggctttcgtaggttcggaatttttttataaaggcctccttgtcgagggaaaaaagctgaccgagggcgaaattgaagccctttacgaggccgtttatgaaaacctctacctgagagaaaaagaggttgtagatgtaataaatgctgacggtgttaaaatcggtgagaaaggaaagcaggattatgtcggtgttgttgaaaaccattcccgacacctgatgcacaagcacggaatttttctgtgaaatggcagcatggtcgggctgcgccttgaaatcgagccatttatagtgccttttggcgtaaaaggtgacatagagaagctgcgccgccaccgtcacacagtaggaaagttgcatgagaatgaggttttcggtgagcagcagcaccgccgcctttaaaaggccgctgaccacctgcagaataatctgagaattggttatcacatactgcataccgtcggtctcgagcattatgcagtattttccctcgatgaagaatgtcacaagggaaggaattccgtttaaaaggatgaggataacgacggtcaggctgtccattcccgtgtcgatgacaaagccgtagagcaccgcaaaaatcagcacggcgccgccgtagagaaaaccgatgcggttatagtgccgtcttgtggccgaaagaacgctgtttattctttctctgtcccctcttgcgactgggccgaaaagcgcctgggccgaggcaagaccgacccccgcctcaagcaggcagagataggtgaaaatctgttttatggtggacagcacgccgttgaccgacgaaccgaaattttcaatgtatatcctcggcagcagaaagccgattgctatggtgaccgtctggcagagcacgaccgatatgagattgaattttatctttttcgaataggtgctcatgcaaaaaggtctcctttaatagattttcttcaaaaacgaaaaatgttttttgcccgaaagcagtatgaccgccgtcgaaaccaaaagggcgggcaaaagccctatggcaaacatcaaaaaggaatcggtatactcggcccgggtgaaaaggcagtagccgtcgatgaagagcatgtgggtgaaatatataagcgagctgtacggacggcaaaggcgcagcagcttttccggcaaattcgggcgaaagcaaagggcggttttaagcataaaccacgcgcatggcagcagcattaaatacatatcgaattcaagccgccagcgcattttcgaaacaagggcaaactcgccgcaaagaagtatgagcgaaagagcaagacccgccgccgatttttttaaggttccgaagttctctttttgagaaagctttgcgcccaaagcgataaaaacaaatccctcgaaaatgccgttgcgtgtggtgccgataaagtcataaaccgattttaccgcggctgaaagctcgggcgaatggggaatctgccgcacaagtccgaaatagctctgcccgcaaaggccgacgagataaagacaaaagccgattgcaagaacggcgtttatgctcaccctttttttaagcaaaaagccgacggcaagcacggccgccgccgtgtgaatcttggagaagtcgttacccttcaccttggtaatggagtcgatat

SEQ ID NO: 2023 - DNA, 5678 bp, Unknown
  16S sequences of unknown bacteria
gtccccaagggcggccccgatggcggcgacggcggccatggcggcaatgtcgtcctccgggtgaacgataatctttccacactgatggacttccgctataagcggaaatataccgcgcccaacgggcaggacgggcagggcgcccgctgccacggcaagcgcggtgaaaatctggtgatccaggtgccccggggcactgtcgtccgggacgcggcgacgggggagatcatcaaggatatgtcggattcggaggatttcatcctttgcaagggcggacgcggcggctggggcaataagcattttgccactccgacccggcaggccccccgctttgcaaaatccggcggccccggcgaggagcacgaggttattttggagctcaagctgctggccgatgtcggcctggtcggcttcccaaatgtgggaaaatcgacgctgctctctgtgacctccaacgcccggccgaagatcgccaactatcattttacgacgctgtatcccaacctgggtgtcatctatgtcgaggagggcgtctcctttgtgatggcagatatcccgggcatcatcgagggcgcggcggaaggcgcgggcctggggcatgatttcctgcggcatatcgaccgctgccgcctgatggttcacatcgtggatgtctccggctgcgaggggcgggacccggtggaggatttcgagaagatcaacgctgagctgcgggagtattcgccggagctggcccagcggccgatgctggtggctgccaataaatgtgatctgctgggcggcgatactgcgccgctggagcggctgcgcagctatgtcaccgggcagggctacgagttcttcgaaatctctgccgccacgacccaggggacaaagcagctgatgcagatcatcgccgagcgcctgcggcatctgccgccggtgacgatctatgagccggagtatgttaagccgctgcaggaagcgggcgacgcggaggagctcaagatcgagcagcacggcgactactggctggttacaggcaagtggctggtgcggctggtgaacgatgtcaatttcacggattatgaatcccggatgtattttgaccggcagctgcgcaaatgcggcctgtttgagcgcctggaagccatggggatccaagatggcgacaccgtcagcctggaggactacgaattcacgtacgaaaagtaaaaagcgcccccaaagctacgctttgggggcgcttttgcgggcagtgcaaaaccccgccagaaaactggcggggccttgcttttggaaaagagataagagaaaagagagaattttttatggaaaaaacgtggacttgtaaacatgaatcgcagtggctcaagctgcgttctgatgtttacaatgacagcatacgggataaatttgaataagctatgaacaaataaaaaacaaaaagaaaacattggtgggtcgtatgacaaaatggcaaaaaacacggtgcggtctccaaaatggggatcgcaccgcgtttttgcgtgcagcaaactggatgacaccgggcaggcgctgccgcagcagcgtgtccaggggcggctttgtggggaactcattcaaatttccgcgcccaggtcacggagcggtgcggcaaatatgaccctgcgccgttcccagtggtctgcggattagtgcatggaacgctcgtaggcctcaatcatcttcttgcacatgtggcccggacgaacctgcagcggcgcatcggagcgcgcccgtttggagagcgtctgcaggtattttgtcgtcacttcgccgctgaaaacctggatttccagctgaatcgcatcgcctgccggggtggcggtgatcttggagatgaatttgtctacaaaggccttgccgatggccgccgtttcgatcgacgcctgggcctggcggagtgcggcgttcagctgcgccaggtgatggtcaaattcctggtgggagccgggcggctgcgccagggcgttttgctgctgtatcagcgcctccagctcccggttgcactctgccgtcatggtcagaaaatcccggtcggtgatttgtccggcggcgttgtagtccagcagcttgcgcttttttcggttcacatggtcgatggcgctttgcagctttgcggcctccatctggctatccggtgctgcggtcagggtctggtacatctgcgtgtagcgtgcggccagagccccggcagcggggcgggtgtcacgaaagacatccgcgaggactgccttcagctcctgctcatagagcgggacggcggggcaggcggcggcaccgtttttgagcttgccagagcagacccatttgctgttgctgcgcccgcggcggtccttggcgtccctgcggtaatagggggcgccgcagcagccgcagtagagcttaccggtcagcagattggggtgattgcactggttctgccgctggcggacatcgctgctgcgccgctgcaaaatagcgtttgcttcgtcccatagggcttcggaaaccagggccgggacggtctcgccggtctcgtccttgaatacgacccactcctccggcgggagaaatttttgcttcttggtgaacatgtcgatgaccttgaccttattcccggcgtaatagcccttgtacttcgggttggcgatgatatttgccatggtcgtatgggagagcttgttgcctcgggtgttgcggtagcccttgtcccagaagagctgctccagctgcttcatgctgtagttcccggaggcatagagctggaagagggaccggaccatctccgcctcggcctcgtcgatcacaagtcgcccgcggtccttgcagtagccgaagatgcggctgttgcccaggacgacaccctcccggatggcctgctggtggccaaagcggacgcggctggagagcttgcgcagctcatcctgggcgatggaggacatgatggcaagccgcagctcagcgtcctcgtccagcgtattgatgttgtcattttggaagaagaccgcaaccccggcggccagcagctggcgggtgaaggagatggaatccagcgtattgcgggcaaagcgggagatctccttggtgacgatcagatcgaaggccccggcctcggcgtcctggaccatgcggtgaaaattctcccgcttgcgggtcgagatgccggagagcccctcgtcggtatagccggggatatagtcccaggtgggattcttgcgaatgaaatcctcgtaataagccacctgattgctcagtgagttgagctgctcgtccgattccgaggagacccgagcataaaacgtgacccgcagggggatttcataaatgcttttctggcgcagctgctgccgtgcgctgtgaatatccatgggtgcgctccttttgctttttttgccactataccacaagggcaccggcgctgctaccggtgaattttggaagcggcctccggggcggggcaggccgtcgtaatcttttgcaccattttgctgtgctccgcggcggtgatcagccctttgtacagcagcacgtcgttaaaataatgcagccagaggttttgtaaagctgcggtgtgccggtcgttcatggcagggcctcctttcctacttaagaatgccccaaaatggcgcgatataatccggcgcggcaaaggggatagcgcggggggaaaaaatgtgctatagtaaacaaaaaacgggcggcagatcgcgcggagaaagggtggagcgggatgaaggaaaaggcatattccggcgtggcggcactaccaacggggcagtacaccgggccgctgacgccgggctgcatggtgctggagggcggcgcgtttcgcggtgtctataccagcggtgtactggatgcgctgctccaggcgggcatccagatgcagtgcaccatcggcgtttccgccggggcgctcacggggctgaattacgtcgctgggcagatcggccgggcggcgcgcatcaacctgacctaccggcacgatccacgctatgtcgggcctaaggcgctgcggcgcaaccggggcgttattgggtttgactttttgtttgacaccgtcaaccagtgggagccttttgacgaagcgacatttgcccggacggaccggcgctttttggccgtggcgacagactgcacgacggggcgggccgtgtattttgaaaagggcgcgtgcccagcactgtttcaggcggtgcgagcatcggcgtcgatgccttttgtctcgaagccggtctggatcgacggtatgccgtatctggacggcggctgcgccgataagattccctatgcctgggcgctggcggcgggctttgagaagatcatcgtcgtgcgtacgcgcccggcggactatcggaaaacggggaaacccaagcgggtaaaataccccgcctatccgctattggccgcgcagctggcaggcagcgacgcccggtataaccggcagtgccaggagctggaggcgctggagcaggccgggcggctcgtggtcatcagcccgtcggtagatctgcaggtcacccggctggagggcgatatggaaaagcttggcagactatactggatgggcaatcaggacgccaatgcgcagttagagcggctgcgggcgtatctggtatgaagcggaaaacgcagaaagaaggagggaacaggatgatcgcggcattggtcgtagcagcggggcggacagcccggaaggtgggctttgccccgcagaaaaaggtcggcacgatctccgccattgagcgggctgtgacggttttacaacgggcggatatttcacgcatctgcgtcgtctgcgccgatagccggacggaaaagcttatagcgcggcggaatctcgtctttctccgcagcagcggcgaggcgcagatgttcgactgcatcaaacaggggctgggctatctgcgggatcgatgcgatgcggcgctgattgtgccggttgatctggcgctgtgctcggtgcagacggtgcgggcactggctgcggcccggggcagtgtctgtgtcccggcctaccaagggagaaatgggcacccgattttgctccggggcgattgcttcgatgcgctgtgcgcctatacgggccctgatgggctgggcggcgcgatctaccatgccgggctggaccggacggtcgtcccggtagatgacgccgggattttggcggatgtgcagcacacgccggaggcccggcgcctgccggggacacaggagctgcagaagctgtgcccggaggtcgagatcaccttgtgcaaggagcagccgtttttcgggccgcagacgctgcagctgctgcaactgacccaggagacaggctctttgctggcggcgtgccgccgggtcggtatttcctacagcaaggggcgtgggatgatcgcggcggcggaggcccaattgggcggcgcgcttttggcgcggcaacagggcggcgccagcggcggcagctctgttgtaacggtgcgcggcgcacggctgatgcagcgctaccgggcttattgcgacgccgtccaggccagcgctcgggaattgtttggcgtctatttctcagaggaaacataacgcacgaaaaatcaccgtggacgatgaagtcatttgatatagtccccttagagtagacactcgaaatagcaaaaatttcgagactacaataaggggactattattatgccaagaaagagacaaaagaacaa

SEQ ID NO: 2024 - DNA, 32759 bp, Unknown
  16S sequences of unknown bacteria
ccattctgcacaccacctctacatcatctttgtgcttgttattatagacgatacacctataattgtcaataaataaagacattaagagcggcgtgtctgcgatgattctctacttcattgtgcgctgaccatcttaccgatatgcatccggtcttagaggtctttgttgattgcgccgcaaaggggacagattacagcttctgtgttcattggatgctcatctccgccctaaggatttgataaactgaaaagaggttggtatcaaaatatgataccaacctcttcaataaaaagtttcaaattatttaggaaagacgagcaataaaaagtatccgagagcgtaaagtccgccataaagcaggccaaatcagccgagaatttagttcaagtcctgcctaacgctctgaaatgcccttgtgtatctataaaacacgctttgaaaaaacagggcataaaaacgctgaaacccctgatttctcaggggtttcaggtgagtgtatctattttggtcactcaagatggttgcggaggcaggatttgaacctacgaccttcgggttatgagcccgacgagctaccgaactgctccactccgcgatatttgcgcaatcaagattgctttattactatacaatattttatgaggtttgtcaagcattattccggtttcggaaaaaatgattcttttacttcccttttacctgcaaatgctgttcaaacctgtccggatggcgtatactaagaaaagaagaaaaaagaggggcgcaatatggcatatattacttttgaacagattaaaaacgattcgacggtggccacttatatccgccaggcagatattgctctgaaggcttacggatacaccgagcattcctttccccacgtgacccgcgccgccaaaattgcggcgaaaattctgggggatttcggctacccgcagcgggaagtggagctggcgcaaatcgccggatttctgcatgatatcgggaactgcatcaatcgggtggatcatgcccaaagcggcgccctgatggcttttcatattctcacttcgatggggatgcctccggaggaagtcgccaaaatcatcgctgcaatcggcaatcacgacgagtcctcagccgttccggtcagcgctgtggctgccgcgctgattctggcggacaaaaccgacgtccgccgttcccgggtccgcaaccgcaatatcgcctcgtttgatattcacgaccgggtcaactactcggtagaacactctgctttttcgctggacgctgctgaaaaatccatgacattggacctgccatagatacagcactttgtcccgtaatggattattttgaaatttttctaggccggatgatcctgtgcaaacgtgcggcggatttctttgaatcccgctttcgcctgattatcaacggcctgaccatgatgtaaagcgcaaaaataccgtctgttaaaaaacaggcggtatttttttattcttttttctccagtcgaaacctggcctgccatcggcgttctttatcggtccgaccgctttgccgaaccgctttttccaaacagcgcccgcaggcgttttgccgtttcttcccgccgctgccgggtcagctgctcgtccacctgccagcggccatcaccgtctaaaaacaggcagtccccttcccgcacgccagccgggagccgggatacctccagccggatcatctcaccatccgggccttcacaaacagcccagccttcttcgattcggtcgatgctccaaccgctcattctagcgctcccctttcggtatgcgccgcaatctcttttccatcggtcgtaaagacaacgctgccctgtaaatccgtgcggtaaacagcggtaccgcgctcggacaggcgggacagcacctctttatgcggatggccgtagtcgttgtcctgcccgcaggaaacggcggcgatcttcgcggacaccgcgtttaaaaacacatcgcacgacgaggtgttgctgccatgatgcccggctttgagcacatccgcctgcagctgggtcccctcgctgatcaaatcctgctctacctgtttttccgcgtcgcccgtaaacaaaaaggaggtttccccgcaatccaggcggcacaccaccgagtaattgttcagatcatcataatcctgcagcggggccagcaccgtcagctttgcgccgctgcccaaatcgtatgccaggccgggctgcgccgccgtgaccgggataccctgcgtttccaccgcatccagcaggcggttgaataccgatgtggtgggcaccatgtcctcggccatttggggcattaaaatctcgtccgccccgaaccgggacaatacgtccggcatgccgccgatgtgatcggaatgcggatgggttgcaatcaccagatccagcttttccaccccggcggattttagataatcgcagaccgtctgtccctggtcccgttcgcccgcgtcaatcaataccgctttttccccggtctggatcaggatgctgtccccctgccctacgtcgatgatgtgaacggcggctacctgttctccctccagtttggcaaccggctcgtaaggctcgctcatgcccagcagatcgctccaaccgggcatttcaaacggcagccatcccatttcgctcatggtcatcagcgtaaaaaacaccattaccagcgccgccacggttaaaaaaagccaggcgggcgtccggtcgatcagcttttgcagcgcacgaagattggtttttcttttgctcatcttgctcgtttccctcttgtctttccttttccggtcgacgcgttttcccttcccgatttcacattgccacgcctttcatcattctttccgcgccggggctcctggggtctgcggcccccgccggcagacgcttcccgctgcggcggcaccagacaatccggcccggttccaatcaggtcctcccggcctgcccgcttcagcgcctcgatcacctgcggccgcatttccggccggtagtactgcaaaagtgcccgctgcatcgccttttctttcggatctttgggaacaaaaacctgcttgccgctaagagggtcaatgccggtgtaaaacatacaggtggataccgttcccggcgtgggacaaaagtcctgcacctgctccgggcggattcggtttttcttcaggtataccgccagctgcaccgcgtctttgagggtcgagcccggatgggacgacatcaaatacggaaccaggtactgttcctttcccgctttttctgtcagctggtaaaaccgcttgacaaagcggttaaacgtttcgatatggggtttccccatccggtcgagcaccgccgcagagcagtgctccggcgccaccttcagctgcccgctgacatggtgctccaccagttccttgaaaaaggactcgtccttgtcctccagcagataatcgaaccggatgccggaacggatgaacacccgcttgacccctggcagcgcccgcaggcggcgcaatagcgccagatactcggtgtgatccgcctccagattcttgcagggggagggcgccagacactttctgccgcggcacagcccatgctccagctggcgagcgcaggaaggattcctgaaattcgccgtcggcccgccgacatcgtggatatagcctttgaagcgggggtttttcgtcatggccaccgcctcggtcagcaccgattcttcgctgcggcaggtcacctgcctgccctgatgggtggcaatggagcagaagttgcacgcgccgaaacatccccggttgtgcatgatggaaaattctacttcctgaatggcgggtatgccgcctttttcttcatacgaagggtgatagtaacgggcaaagggcagcgaccacacccagtctaattccttttgggtcagcggcggcatgggcgggttctgcaccagatagcgctcgccgtgtttttggatgacagccttgccgtaaaccgcgtcatgctcttcatactggattttgaacgcccgggcataggcttccttatcctgcgccaccttttcaaacgacgcgcaggatatagcccccgggatggccggcgccgtgtcggacaaatagcaggtcccccggatgtcggtcagggctgaaaccggttcgcccgccgccagccgccgggcgatctggatggtctggttttcccccattccgtaggacaaaagatccgcccccgcgtcggccagcaccgacgggcgaactgcgtcgtcccagtagtcgtagtgggcaaaccggcgcaaagaagcctccagtccgccgatgatcactggaaccgagggaaacagcttttttaactgccgggtatagacgatcgtaggccggtcgggacggtaccctgctttgccgccgggactgtattcatcttcgctgcggcgccgtttggcagctgtgtagtgagccaccatcgaatcaatgttgccgccggacaccaggaaagccagccggggctttcccagcgccagaaagctttcctcccgccgccagtccggctgggccaatacgccgaccctaaacccctgggattccagcacccgggcgatgatcgccgctccaaagctgggatgatccacatacgcatctgccgaaaccagcacaaaatccagctgatcccagccccgctctttcacatcttctttgctgatgggtaaaaacggattcataatttttccttcctgccggcacccggccgggaacaaaacgccgcttttggcttgtccggtcaaaagcggcgctgtttgctgggtgctgcgtgtaaaaaggcttcgttccggcgcctattcctctttctggggcgccgtaccgtctgcctgcatcttcatctcaatccactgctggcgggaaatcaacacctgccgcggcttgctgccctcaaaggggccgacaatcccgcgggactccatctcgtcgatgatccgcgccgccctggcgtagcccagcttgagcttgcgctgcaaaagcgaggtcgacgcctgcccggtttctaccacgcattcgatggcggccgggagcatttcgtcatctgcatcgaacccacccccgccggagccgctgccggcagatttgcccgtcgcttcggcctgccgctcaatctcctccagaatctggtcgtcgtattcggcagtctgggagcctttgatgaaggccaccaccttttccacctctttgtcgctgacaaagcagccctgaatacggatgggcttggccgcgcccactgggaaaaacagcatatcgcccttgcccagcagcttttccgcgccgccggagtccaaaatcgtccgggaatccacctgggaggacaccgcaaaagcgattcggctgggaatgttcgccttaatcacgccggtgataacgtctaccgatgggcgctgggtcgcaatgaccaggtgcatgcctgcggcacgggccatctgggccagacggcagatggcgtcctccacctcattttgcgcggcgatcatcaaatccgccagctcgtcgatgataatgacgatctgcggcattttggccagattgcgctccggccgctcttcggccaggcggttgtagccgttgatgtcgcggacgctgttatccgcaaacagcttgtagcggccgagcatctcgctcaccgcccagtttagcgcgcctgccgccttgcgcggatcggtgaccaccggcaccagcagatggggaatgccgttgtaaacgcccagctccaccaccttggggtccaccatcaaaaggcggacctcttccggagaagctttaaaaagaatgctcataataatggagttgatacaaaccgatttaccggagccggtggcgccggcgatgagcatatggggcattttggaaatatccgccacgcatacgctgccgccaatgtccttgcccaaacacatggtcaccttgcttttcgcctcgcgaaacgcctgggaatcaataatatcccggatgggcactacgctggtctgccggttgggcacctcaatgcccaccgccgccttgttgggaatcggcgcttcaatgcgcacgccgctggtggccaggttcaaagcaatatcgtcggccagattggtgatcttgctgattttgacccccgccgaaggctgcagctcataccgggtgaccgcaggccctcttgcaatatcgatgatgcgggtctgtacgccaaagctggccagcgcgtccaccagcagctgagcattggccttcagctcctcgcttaaatcctgtccgtcgggctgttcgccttcttttaacagatacaccggggggaatatgtaactttccgtggattgcagctgctttgccgcatccagttccccggcgattttttcgtcggcgccggtttccgctgcagattcttctgcggcgatctgcccttcatccgccgtcttctccgctgccgggcagcccgttggggccgccggcagatccgcctggggctgggccggggccatgatgcttttcgtaattttccccaccagatcgtccagcagcggcggttccttcgctgcttttttctccggctttttctcatcagccgccggggcaaaatccgatcccgcctgcggccccgccgcggcctggatcagcttttcctttgcttttttcaccgtttcccgagactgctccgactgctcctccacccgaaccggatgggcaggcagcggatcttcgtccagcggcacgtcgatgttaaactgtgggcggcggcgttcctccacccgctccacataggtttccccgattttttgaaccggcttataggccgaacggatcaaatccagcagcgttgcaccggtaatcagcatcaaaaaggtaaaaatcaaaagaaaaaccgtcactgcagccggcgtctttccaaaggagagaagcggaatgccgatcagcccggccgccagtccgcctcccttgagcttggtgccgctttcatacagataagcggctttctccacaaaattttcgccttccatgggcgttttggcaaagatctgggcagcgccgcaaatcagcgccaccagcacaaaggtctgccagaccttgtgccccagtgcacccatgggcttgtccatggcggccataaccgcaatatagatcagagccggagcgatgagataggcgcaccagccaaacagcccaaaacaaaatgtgtgcagccaattccagaacccctggccgggaatcagcgacaccgccaggaaaaaaatgcccacggcgaacaatatcaccgcccacagctgcctgcgggaacgggcctgctcctcagcaaggcgcttttgcgccgctgtctgccgtccggtgctttttttagcggcagttgttttcttttttgccgccgttctctttctctgttccgccacggatgccgccccctaaaattcctgtttttcttctaaattcagtggacaaatttttccaccacgccgatcaccaccgtcaccgtgcctaaaatcgccgtataccaggtaaacaccttgaaatttccggaccgggccagccagcgcaccagcttgatggtcaaaaagcctaccactgccgctactaccatgccggtcagcatcggcaacagctccatttgcgttccctgcgccaaagcgtccttcacttcgaaaatatttgcccccagcacagcgggaatccccaggataaaggaaaaggccactgcaaattcccggttaagccccgcaaaaatacctgccgaaatggtggaaccggaccgggacaggccgggcagcggcgcaatgccctgcatggtgccgaccaaaagcgcgtcccgcacccgcatgttggaagcggttttcttaccgggcaccaaatggtcggccacatataaaagcccagccgtgcccaaaaagcacaatccctctaccagaatgtcatcatcggtggcaagggaagtgtaccagtcccgcaaaaagaaaaataccagcagcggcagcagcgccactacgatcataaaaatcatccggcggtttggatctgtggtccgaaaggtgaatttccccttgaagatatccccaatcatgcggaaaaactccacaatcatcccccaaatggtatcccaaaaagcaatgcagaccgccgccagcgtgcccagatgcagcaggatggaaaacaaccccgcagcctcgccggactggccggtaaaatgctgatacaaagacaaatgccccgagctggataccggcaaaaattcggtcagcccctggataatcccctgcaaaattgcgtcccacaaactcatattgtcccctccgtattctgtcgtgcgcgtttttgtgcactcgtgtttttttccgttttatatgtaaaggccgggaaaaccggccggacaactcagtgtttttttggcacctgcccaagacggtataccgccccgggctgataccgcgggtcaaggtacatcgccggatcggtggaaaccagccgcgccaccgtcaggccctgttcccccaaaacgccctgaaccagaccgcccggcacctgctgccaaacaccggggtcattttgcctttccatcatctccatcgggtcgataatcgaatggatgaccaagcctattcccccttcttttgcgccggaatccgggcttcgatcagttcggtcagtttccccaccgcctgcgcaagcccgcccagctcgtcgatcagcccttcttccaccgcctgttcgccgtcgagcaccgtgcccacatccatcaccagctcgccggtgttcatcatcagctgccgaaagcgctgggcgcccacgccggaattttcggtgacaaagcggacaatccgctcctgcattttgtcaaaataagacagggtctggggcacccccagcaccagcccgctcatccgcaccggatggatggtcatggtggctgacggggcgataaaggaatacttggcgctgcaggccagcggtacgccaatggagtggccgccgcccaaaaccagcgataccaccggcgtttccatggtggaaatcagctccgcaatggcaagccccgcttccacatcgccgcccaccgtgttgagaatcacgatcaggccttcaatttccgggtcctgttcaatggccaccagctgcgggatcacatgctcatatttggttgttttattctgggccggcaaaatataatgcccttcaatctggccgataatcgtcaggcagtgaatgacgtgcttgccgtgggtttcggtggtcaccgaaccgctttgcatgatctgtctttgctgttcttcttgttccttcgggtctttttcttctggcatagcttctcctttcaggcactttttccattattgtgccctggaaaggaacctctatcccgcatacagatttattatatcaaaaacaaatgggtttcacaaccgaaaaaagtcaaaaaaacgaacctgtgttcctcccggcgaaggattacgccggctttttttcaaaaggcacccgattcttcccgtttgccgcatggaacctgcggcatgggggaacactctggtttagagcgaagaaatgagggatgacgatttgaacagccggcagcgcgtatggtttttagatgaggccagaggactttccattctgctgatggtgctgcatcacggcgcatacgacgcagcttttctgctcgggtggccgctggattttctttcggccgggtggttcgggatcatccgcacttttttcgtcggcgtttttgtgctgatttccggctgcgcctgccggttttcccgcagcaatctgcgccggggcgcacggtgccttttaccggcggcagggctgtccgccatcaccgcttttctgatccccgcccagcggatccgttttggcattttgcacctgctgggctgcgccatgctgctttttgcctttttacaaccgctgctggaccggattccccccgctttcggcgccggtgcgggcttgtttctttttttcttttgtttttcggtccccagcggacggctgggcttcgctcccatgcaaatacagcttccccgctgtctgtttcaaaacgcctttaccgcggcgctgggatttcccgggccgggctattattccgccgactacttcccgctgattccgtggctgtttcttttttgggcgggcgcctgcgtgggggtctggctgcgtctgggcagggggccgggctggctgtaccagcgccacagcccgtttcttgcggcggcaggtcaaaaatccctttggatctatcttgtccatcagccggcgctttatctgatttttctgctgatccgcctgtgtttttgactttacaaatcgtttgctgtggagtattgtaaaaaaggttgtccgccgctttctcacagcggaaatgccgcacggattttgacacaaaggagggaattggattggcctgcctcaccgccgatcccattcaagccaaagcaaagcgctacccttttctggacgagcttcgcggtgccgcgatcttgatgatgattgcctatcaccttttatatgacggcgttgtttttgccggctgggatatcccgttgttttctcctccgctttcactctggcaggacagcatcggcgccttgtttatcctcctgtccggctgtatgtgccggctttcccgcagcaactggcggcgcggcctgcgctgtctggctgcggccttagccatcaccgccgtcacttttttcctggttcccaccgtggccgactggttcggcgtgctccattttctgggctgcgccatgctgctgtatcctctttttcgccctctgctggaccggttccctgcgctgcccggagccgtctgctgttttttgctgttctgggccacctatccggtcagcctgggcaaaatcggcgggcttttttggcaggcaaatcttccctcctttctttaccgtaattttctcaccgcgattttgggattcccgccccataactttgtttccagcgattattacccgctgctgccctggattttcctgttcttttgcggcagcctgctggggcggattctggttggccggggagaccgtccggcgctgctgcgttcccgctgccggccgctggcctttttggggcggcacagctttgtgatttacctggtccaccagccggtgctgtatgggctttttcttctcgccgcacaatgaaccaccccattgtcaaaaacgccaaagcgccccttttttctgcgttttggcagcttttggattggaaatatgaaaaaattgcgaacttttcacccttcgcctttttttctttgccaaattcgatataatgaacttaaattttgcgggtgctgacggtttttctctccggcactcgttttatcggagaagaatggaaacgggaaaggaggaagccggaatgacgaaacgcttttgccgcctgttggcggtgcttttgctgcttgcgtcccttttgggcggctgctcggataaaaccgccggccaggtgttccggctggatattctttccgagccgtccaccattgatccgcagaccgcctcctccgacgagcagtatctgattttgctcaatacgatggagggccttctcaaaatggatgaaaaccagactccgaccgaggctgccgccgaaagctacgccgtttcggccgacgggctgacctataccttttttctgcgcaaagatatgctctggtccgacgggaaaacgccggttaccgcttacgattttcagtttgcctttcagcgcctgttcgacccgcagacgcagtctcctgccgctgtcaatttcacctgcatccgcggatcatccgcagccctgtccggcgagggcagtgtccaggatatcggcgttactgcccaggatgacgatacgctggtcttttctctggaacatttaaacccgtctttcctctcgctgctgaccactcccgccgcgctgccctgcaacgaggattttttccgggctgcccgggggaaatacggcgtgtcagacgaattcatgctctttaacggcccgtttttcatttacagctggccggaaggcgagtatattcacatgcggaaaaacaccaattatcatgcgcgggattcggtcattccctctgctttccggctgtatattcgggaggaaaacgacctgtcccgcctgaccggcggcgctgtggacgcggcggccgtttccttctccgagctggaaacgctggacgaaacgtatggggcggtgcagttttccaatattctttgggccatcctgcccaacctggaaaatccggctcttgccaatctctccatccgccaggcgctggccgccggagtggaccgggaggacctttccggttatctggcgcaaaaccagcaaatcgccagcgttccggtccccccggccgtaacgctgggcggcgcttcttatcgggagcaggcaggcgattccgacgagctggacgaattgccgtatacggccgccgaactgtttcaaatcggcctgcgggagctggcggcggacgcgtccccttcgctgaccctcatctgtcctgattccgatggaatccccctgctgctcagccagctgcagcgccagttgcgggatgcgctgggcgtgttcatcaacatcgaaccgctggaaccgtctgaactggattcccgcattgccagccgcgattatgacttggccctttgtccggtcaaggcgtcttatgacagtccggaagcggtgctatcccagctttacggcggggaatccctcaccgggtggcagaacgatcagatggtcggctacatgaatggggccaaaaacgcctccaccgcctccggtgttctttcgtcctaccgctccgccgaacggctgctgacgcaaaacggcgtcgtcctgccgcttttttacgaaacttcctactacgttactgcgccttcggtcaccggactgcgcttttccccctttggctgccatgtctcttttgccgagggacgcaagaaaggctgattgcggcgaaaaggccgtaaaaaggccccgaaagagaacgcatctctttcggggcctttctttgcagaaaatcccggatttataccggttcggcttctccttttttggcagaaaatgccgctttcatgcttttttctcttctcacatacaaaaaccatctgacggttccgtaaatggtgttgaccagcatggcgaagtcgtcaatcaacaagccgtaagcgccggcggaaatgtccatgataatatacagcgcagtggtgataaaccacgcgtaccactgctcgctgtaccgcatcagcagcaaaacgccgtttaccatacccatagcggaagcaaacgcctccaggtaggaggattcggcgccgggaatattcatggtaatggaaccggctacaaggctgaaaacaaccactcctgccatcaccaaaattccttttttccagcccaaagattttacctgcgtgagattttcgtcctgggcgtcaggatatttgctccagcggataaagctgatgatgtcaatgggaatccagaaaaagatgcaggtcatggccagggtataccatcccagcgccagggccagcgccacataggttccctcgatgaaaaccaggtccacgataaaattccatttgctctgcttggcaatcagcaattcgcagaccgggttggcgatgacgttaatcaccgagcaggcgattaaaaaggtaccgccggtgctttccagcatcatctcggggaaaaagatcgtaaatactatggcaagcaccagcacggtcgccagatagccgatctgatacggggtaaaggatttcaaaaagcttttgcatttttcaaagttcgttttttgattcattttattttataattcctttctcacgaagaatcccggcaagctttggaaacgcccgcagcgggttgttccagtaaatgtcctcaaattggtccggggtaaaaatctgtcggatggtttcatcgtactcgccgaaagcggacagcgcaatcggcgggcagaaatccgttccgtaaaggatctgccggtaagcgtcgggatactggtggatcgcgtggtcataggccgaaatggtagcttccacatcctccatggcgctggctcccggctcaaaggttccgctgaagtcgctatacaggttgggaacgccgtgcattgcctgaacgcactcgtcaaagcgcgggtcgtccagatgggcaacgataaagttgacatccggataggcaagcgctacgttgcgcacatatttcgcgttggaaccctccatatcgtcatccgtgggcagatgcagcgaaggcagcccggtatgataggtgaccgacaggccataccggcgggcaaaatcataaatgcacatcattttttcatcgtccgcccggcccttttgataggttaaaaaaatctttaggcctaccaccttgcactccggccgcgccagcatcttttcttcgattgccgacagctggggcaaaatttccttgtgaatatcgatactaggggataaaaacaaccgctcatccgccgcggctatctgccaggattcatccggcatctgcgcgttggcaaactgaggcagaaactccatgatgatggcgtatcctccggggttttgataataagcgtctttaattttctggtttacaatgtgggtgtgacagtctattctgcgttgattttccattgtcctctcctattctaccgtccctcaaagccgccttttttgttgaaagcggtgcagggccggtttcctttcacacagcaaaccgactttatcacggcgcgttgatgctttccagcatccgcatcatttcaatcctcacttcatgtctttccaaatcctcattggaatagtggaacaggtccagcccgccgatggcaaaaccctgggacagataaaaaccaatcgccggcatgttgcagctctgggtttccagcaccagcatccgggccccggccttttccgccacgctgacggcatgtctcatcaaaacggtgccggctcccgttctccgaaacggttcctctacgaacaggttggccacccgcatccggttgttccatctctccggattcagttccagatagcctgcaatttgctcctcgtcatccaccgcggcaaacagcatcggcgccgccatgtgatctttcatccaagagacttccagttctttctccaccggggcgtcaaacatctttttgcgaaattctatccggctcacgccccgttcctctacaatctggacatccagataggaatcggtccggtaccgaaactgccgtgttctccctttccaggaatcgtccagctttacgattcgatatgccgccatgcagcttcctcctgtttttttgcagcctattctccgatcaatgcctttacggcccgggggatatccgcggcgcaggccactcgaatgtccgcgccgtccacctcatggggcagatagccgtattgacagccgataaacggcagcccgttgtcccgggccgcctgcatgtcgtgatggcggtcccccaccatcaccgctttgtccggccggattttatccagcaccatcttcagggtatccgatttggtgcagcccggttccgctccctgcagccaggtaaaatagggcgccagccccagcgcggacgcaattttacgcacataaccattggtgccgttggtgcacacggcaagaatatatcccgcttccgacagctgacggatcatctgcggcaccccgtcaaaagcgccgtgataccggtcgatgttgcggtattccgcctcggcggtcagcgccataaattcatcaaaccgctccatcggcgcgccgggcagaaggccctggtagatctgctcgtccacacagcccatcagccgcatcaccgtatcgtcatccgcctgggcgccggcaaacttttgcagcacctctttgtaagtgggaatgataaacagctcaatgcggttgagggtgccgtccatgtcgaatacgaccagctttttttccttcatcaccgcacctctattctcccaggataaactgttccacaaccaccgccacaccgtcctcgtcgttggatacggtcacatggtcggcagccgccttgaccggctcctgcgcgttggccatcgccacgcccaggcctgcaaattcaatcatcgaccggtcgttaaagccgtcgccgcaggcaatcatctgctcgcgctccattcccaaatgctccagcagcttgcccagcgaataggctttatcaatgtttttcggcatgatttccaaaaagaacggctccgaccgcagtacgctcaacgtgtctcccagccgggccttgaccttcttttccacctcggccagatactccccgtcctcgaccatcaggcatttggtcaccggaaagttgacaaagctcttaaaatcctctacttcccgcacttccatcttgttgatgcgggattccagttccacatattggtcgtcctttttgggggtgatgaccgtttcctccagataggtcataatattggtcttgtattcccgggacatatcgtataaaagagcgggcatatcagccggcagcgtcttttgataaatcacctcgccggtctgagcattgatgatccgcccgccgttgaaagacaggatgtagccgccatactcctccagctccagctgcttggccaccggcatgatgccgtaggtaggccgcccggaggccagaacgattttgacccctttctcctgggctttttttaacgctgcccgggtgcggggggtaatttcttttttcgagttggtcagggtgccgtcgatgtccagcaccaggattttgtattccatagcgactctccattcctctttccaaaatttcgcagaccagtatagcatattttccccgtttctgtctattttttgggcgcaaaacttgacatttttctcccgctttgtagactgaaaagcaagcgaggtgaaaaacatggtccagcgggaggatttttttgaacgggtatgggaattggtagccgaaatcccatacggccgggtggcaacttacgggcagctggcagatatgctgggctatccccggcacgccagactggccggtgccgccatgcaccacgcgccccagggcctgccctgccaccgggtcgtcgcctcaaacgggcgctgcgcgccccactggccagagcagcaaatgttgcttttgcaggaaggcgtttccattttgcccggcggcaaggcagatcttgcccattatcgctgggaaggattataaaaactggaaaaaagacgatggaatggcaaatactttgcattgcgtccagcggttttttcatgataggctttgtccgaaccgaaaggtaaaatcaaaaacggaggaatcctgatgaaaaaactgttcgcatttcttctcgcggcgctcaccgccgcttctgtaacggccacggcctttgcgcaggaagccgcgccgtccgccaccctgcaggtgggctctgccgacggcttgaccctcgacggcagcgcgctgctgcatcccggccaggaataccgttttccgctgatgatcgctgaaaacggcgaagaggcccgtcccatgacggtggaggacatgcaggtctatgacatcaaagtaaccgccaaatccggcgccggcgccatggccgatgccgggcgcctggaatccggccgtcagcagtatctctccctgacccccggcgcaattttcaccgtttcgccccaggatgtcaaatacacggtctctctttctttcaaaaacagctccgctgttctttctcaggttaccgtccagtggaaagtaggctacccttctgtggatgacggcgatctgggtgcctctaccgccattgacccgtctgctccggtgctcaccaaagagcagctggccgccattgagaaaatcaccggcgacgggcaggcttcctttaccggcagcggctggcagttccatgtccgcctgctggatcaggaagcggtgaactttcactactccgctcaaaacatcaaggctgtttccgaccggtatccagaggctgatttccgctttcttacctttggcggcaagcctgcttttgatttctacggcaccctgactctggacgtatccgccgtgctggaagagtatgaagatttgtatttgtaccgttacctggacggtgtgctctattccttgaaatatgatctggatcaggatgcccaaaccatttccattcggaccaagcagttgggcagctatatcgtctcggacacaaagattcccaacggcaccgcggtgggcggcagctcctccggcagtgcgggcaattccggctccggctccgataaaggcaacccctccaccggcgggaccaactttaccgcaatcgccctagcgctgggctctgtcagcctggcaggcgcggcggccgcagtaaaataccgcagaaaataagcatatccatccgcacttttacaaaaaaggcgcagagtaaaattactctgcgccttctttttttacagtacgtttcggcagggtcggatcatcggtcagccccaccagataatccatgctgacatcataaaagaccgccagctttatcagcacctcaacgggataattcagcacgccgatttcatactggaaataagtattttgcttgacatgcagataatccgccaccttttgctgggtcaggtcgcgctcctcccttaggtttcgaatccgttcaaatttcagcatctccgttttcattgtatcaccaacaaaaccatattctatctgaaaacaagatattgctttttatcttattttcagataaactaatgatgaggtggtgtttcatgcgactgatcgaagaaatcttatatcgaaaaacaaaagggctgcacgtccaaattgttctgccctgccgcgaggatgaactgctgccgctgatcgaatgcgggtgtacccaaatgcttctgcagatccgcgatattctggaggatccccagatgcgcaaggaaggatgcgcccggcaaatccgttatatccggtatctgtttgccgacgaaggggttttgctcaaaaaatggtaaccccgttttcccataccgtataaaaaccggtcaaaacaggcggagcgccactccgcctgttttcttttggatacgtttcatcatagactgttatcctttttcttccaattttttgtaaaaatcctcgagcaagcttttttcctccacacccaatacccgactaaaacataccagttcataatcggtcacgatgcgaagattccgttcgattctgctaatcatctgttgatcgatattcacattcatcgtctgcattctggcggccagctgcgcctgggaaagtcccttctcccgccggagtgtctccagccggctgccaatgatgtttttgctgccgtcatagtctattttcttcatttgcgtctccacgttaatgtaacgtatctgttattgacattatcacaaaggggagagtagaattacgttatataaacgtaattcaatcattattatggagtgaaggcctatgactttatacgaagaattgctttggggttgcctgcgggatcttccagtgcaggtgactttcccaaatttgacagtcaatcccaacgatctggtggagatgaaaagctttctggcaatcgagcgcatccgggacattctggaaaaagaaggtcttaccgaccaggagcgcaccatgcagattcggtatatcatttacacgttggaggcagaaggcgtctccattcaaaaccggtaaaaagaaaaaggggcggcagcccctttttctttttttgactttactcttcttctgcccaatccaaagcacggctcacagccttgcgccagccgcgcagcagcttttgccgctgctgttcctgcatctgcggcagataccgttcctgcggcttccaggtggcgcggatttcgtccagatcccgccatacgcccaccgcaagccctgctaaaaatgccgcgcccagcgccgttgtctcggcaacgccgggccgcagcaccgaccggccgatcatatccgcctgaaactgcatcaagaaccggttggccgaagcgccgccgtccacccgcaggttttccagttccacgccggtatcctcctccatcgcgtgcagcacatcgcaggtctgatacgcgatggattccagcgccgcccggatgatatgctcccggctggttccccgggtcacgcctaatatggcccctctggcatacatatcccaatgaggagcgcccagccccgtaaaagcggggacgatgtaaaccccgccgttatccgccaccttctgcgcaaaatattccgtgtccgccgcttcggtgacaaaccgcagctggtcccgcacccactggatgaccgcgccgccgacaaatacgctgccctccagcgcataactgatctttccgccgagtcccgcggcaatggtagtcaaaagtccgtttttgctgtgaaccatctgatcgccggtgttcatcagcaaaaagcagccagtgccgtaggtattcttggcctcgcccttgaaaaagcaagcctggccaaacagcgcggcctgctgatccccggcgatgcccgcaatcggcacctgcaccccctggatattgaccgtgccgtatacctcgctggaatttctcacctgcggcagcatctccatcggaatgtccagctcccggcagatccgctcgtcccagcaaagatcctttatattatacagcatggtgcgggaggcgttggtataatccgtgatatgcacctttccgccggtgagcttccagacaagccagctgtccaccgtgccgaacagcacctcgccccgcctggccttttcccgaacgccgggcacatgatccaaaatccacttgatcttggtggcggagaaatacgcgtccaccaaaagcccggttttctccttgatgtacgccgttaaatccgggtcttccttgatctgctcgcacaatttggcagtgcgccggcactgccagacaatggcgttatacaccggccgtccagtggccttatcccataaaatagtagtttcccgctgattggtaatgcccaccgccgcaatctcctccggcgttatgcccgtctgcgccagcacttccatcaacacgccatactgggaggaataaatctccatcgggtcgtgctccacccagccgggctggggataaagctgcgtgtattctttttgcgccatgccaatcacatgctgccctttgtcaaatatgatgcagcgggaactggtggttccctgatccagcgccacgatatattgtttcattgtccgcacctcgcctgtccaaatggccgctttctttttatccgggccgttttcgccgttttataataaggttagtataacagcacgaaaggggagctgtccagcccgtcctgggcaaaacgcagattctcctcaaaagcctgtatttctttttccaggcggccaaagccgtacgagtctttggaaagcctcctttttcgccggttttcgcaattttcccattgacatttttcatccgccgtgtttataatgatatttgtaacaatgcgctgaaaagaccagtgtccgcccgttttgcctttagagaggaaggcctttggctgcaagctttcccaaagcacggatacaagccatcttggagcagcggcgtgaaaagcgctgacggctggccccgttacaggccgcaaagtgacattgcccttttgggcggtgtaatacgggtggtaccgcggagtgttcgcttcgtcccagatcatggggcggggcgtttttttgccgcctggaaaatgaaaacaaagaaagcaggatgaacaaaatgaaatggacaggattaaatgagctgcgcgagcagttcctctccttttttgaaagcaagggccatacccgcctgcccagctacccgctggtgccgattgacgacaagagcctgttgctcatcaactccggcatggcgccgatgaaaaaattcttccttggcatggagaccccgcccaaccgccgggtaaccacctgccagaagtgcatccgcacgccggatatcgacaacatcggccacaccgcccgccacggcacctattttgagatgctgggcaacttctctttcggcgattacttcaaaaaagaagccaccgcctgggcttgggaatttttgacccaggtgctggaaatcccggtggaccgcctgtgggtgtccatctaccaggatgacgacgaggcgttcgacatttggaccaaacaggtgggcgtggcgccggaccgcatcgtccgcctgggcaaagaagacaacttctgggagcacggttccggcccctgcggcccctgctccgaaatctattttgaccgcggccccgaatacggctgcggcaaaagcacctgcggcgtcggctgcgactgcgaccgctacatggagatctggaacctggtgttctcccagtacgacagcgacggcgagggccattacgagctgttgagcccgcccaatatcgacaccggcatgggactggaacggctggcctgcgtgatgcagaatgtgggcaacctctttgaggtggataccgtccagaacattatgaagcatatcagctccattgccggcgctcattacggcgaaagcgccaaggaggatatctctctgcgggtcatcaccgaccatatccgcagcaccacctttatggtgggcgacggcgtcgttccctccaacgagggccgcggctatgtgctgcgccgcctgctgcgccgggccgcccgtcatggccgcctgctgggaatcgatcatcctttcctgtatcaggtatgcgaaacggtcatcgccgaaaacgcttccgcttatccggagctggtggaaaagaaagactatatcatcaaggtgctcaaggtggaggaagagcgtttctccaaaaccatcgatcagggcatggaaatcctcaacagcattatggataaaatcagcgccgaccagatcaatcaggccgtgttctccggcgaggatgcgttccgcctgtacgatacctttggcttccccatcgacctgaccaaggaaatcctggctgagcggggccttcccattgacgaggaaggattcttccggctgatgggcgagcagaagaaacgcgcccgtgacgcccgaaaagacgtaagcggctgggacaccgacgaaatgctggacgtagagggcaaggttaaatttatcggctatgaaaaagcccgcggccagggcaaaatcctcgcccttctggacgaggacggcaagcctgtagattccctgaccgaagggatgaaagccaccgtcgttctggattccacccccttctacgccgaaagtggcgggcaggtgggcgacagcggcgtaatcgtccgcggcaaatccattttccaggtcaaagactgtaaaaaagcgcctaccggacaatttttacatctgggcgtgatgaaaagcggcttgatgaacgtgggcgacggcgtggaaaccgctgtggatgaagagcgccgggttgccatcatgcgcaaccataccgcctgccatctgctgcaggctgccctgcgccaggtgctgggcacccatgtgcagcaggcgggctccatggtggacgaacaccgctgccggttcgactttacccatttctcggccatgacccccgaggaaatcgcccggacagaggaaaaagtcaaccagctgattttgggcgcatatgatgtaaccgttaccgaaatgcccattgccgaagcaaaaaaactcggcgccatggcgctgttcggggaaaaatacggcgaaaccgtccgggtctgcaacgtttccggcaaatcggtggagctgtgcggcggtacccatatttccaacaccgcccgcatcgggctgtttaaaatcatttccgaatcttctgtcgccgccggcgtccgccggatcgaagcggccaccggcgctaatgtgctggagttgatccgtcaggacgaggcgctgctggcccgtacctgcgagagcctgaaggccggcagcccgtcggagctgcctcagaaggcggaggccatcaccgcgcagctgaaggaaaaagaaaaggaaattgaaacgctgcagcataaaattgccgatatgcgcattgaaggactgttcgaaaacgccatggaggtcaaaggctgcaaggtaatttttgccggatttaccggcacctctccggatgcggtcaaagccatgtgcgatcaggtccgcgccaacgcgccgaaaacggtcgcggtatttgcctcgatcctgggtgaaaaagccaccgtgtttgccgcctgcggcgacgaagcggtgaaaaaaggcgcccatgcaggcaacctgatccgccagctcaccgccaagctgggcggcaagggcggcggccgacccgagcaggcgcagggcggcgttgctgatatctttaaaattgacgaggcactggctgaaattcccactatgctggaaaagatgattcaggactaaacaaaggaggtttttgggatggattgcctgttttgtaaaattatcgccggggaaatccccagcaaaacggtttatgaagatgcggagatcctcgcattctgcgacattcagccgcaggccccggttcacgtgctggtcatccccaaggagcacatcccgtcggtggacggcatcaccgccgaaaacagcgacgtggttgcccatatcttccaaaccattcccaaaatcgccgccagccttgggctgaccggcggttatcgggtgatttccaactgcggcgcggatgccgggcagacggtgcctcacctgcatttccacattctgggtggaaagcctttgagccttaccatggcttaatttgcctttccctgtgttttgaaaggagtctttttcatgaatgatgcaaaaacctatgagttacaggtagccggcctcacccggcagctgccgttgtgccccatcaatgacaaaacctccattgccgcgtttatcatgttttccgacgtggagctgaccgttgcctgcgccaccgagcttttgaaaaaggtgccgcagcacgatgtaatcctcactgccgaatccaaaggcattccgctggcatacgagatgtcccgtcaaagcggcgtcaagtatatcctcgcccggaaaagcgccaagctttacatgtataaccccatcggcgtcgatgtcaaatccattaccaccgcccgcctgcaaacgctgtatttagatcagcacgatctggaatatctgcacggtaaacgggtgctggtggtcgatgacgtcatcagtaccggcgagtcgctcaatgcgctggaggagctggtccgcaaggccggcggcaccattgcgggccgtgcggctgtgttggcggaaggagatgccgcccagcgggacgatatcctctttctcgctccgctgcccatcttcaccgaagaataaattccatatgcagaaagcgcctggtttttctccaggcgctttttttcgaaaagggcgccaaaccttttcttccctttgaaaatctgttatgatcgaaacaggatatgacaaaatgcgccgaacaaacggaggaggtagccgctatgaaaagaccgctgtgctggatcagtctgggctgctttgccgccgcagcggccttttgctctttttatccggcaaaagaatgggttttcccggccatcgccctgtttggattgtccggcttattctgccttctttccacccgtacccggccggccgcaatcttttccttttctgccgctttcatgttgttgttttgccttttgtacgggcgtctttttgccaaacccgctctggacctgtccggtcgtacgctctctttgtccggcacggttctggagaccggacgcgcctgtttcctgcttgacggcgagaccgaaagcgggcaatccctgaaagtgcaggtctggtgcagcaccgatatggtgccaaaccggtaccagcagttttccggcgtaatcgcgttgtccgaaatcacctccaccgaccggtttgacagcgaaagctattatcgttcccgcggcgtttacctgcagggcgaccttctgtccggcagcttttacgacccatcccgcttctctgtgaccaccctgccagggcgccttagcgaccttgtctgccaaaaaatccgctcgctgctgccgcaggagtacagtggactggtctgcgcggtggttcttggcagccgtacagacctgccagacgagcagtatgagctgtttcagcagctgggcattcagcatcttttggcggtcagcggtatgcatctggcgcttctcgccggaatgttctctcttcttttgaagcggctttttcgctcagaccgccttcgaattcttttttccatggctttcgtgctgttttacatgctcttgaccggcatgagccccagcgtatcccgcgccggcatcatgctgcttttgtccttcctggcccagctcgtttcccggcgggccgatgcggctgtcagcctggctgcggcagttctgctcatgcttttgtataatccctttcttgccaggaataccggctttttgttttcggttttctccaccatcggcgtgcggatcctggcggggcctttgagtgaaaaaattttgtcttttccaaagaaatggccgcgccaaaaccggtttcgccgcctcacccaatcctgctgcgtcgctttatgcggctatgcctgcgcagcgccgctaacggtatggtacgactcttgcctgatccccatgtccattcctgccaacctgctgctctcccctttgtttacaccggttttggccgctgcagccggattggcagttttttgcgccgttccgctgctgggtccgtttttcgctgttctggtacggttcttggccggattgtttttacaatctgccgcttttctggcctgcgtcggcccgacccctgttttctgcagcggccccgcgccttttatcgccgttttctcgctggccgccgcagtcggatacggcgcccttcaggcgaaccgcaggcagttcgccgccgcgttgtgcatcgctgtcgtgatcggcggtaccaccgtcagcacccaggcgctggtgcaaaaccggcagattcactgttacaccgcagcctttgaaaagaagctgctgcaaatcttttcctatggaggccacgctattgtcattggccacctgtcctctcaggcccagattgaacaggcggtgctggaactgcagcgggagaatgtccacacaatcgatgctctgatcctgctgccaacgggcggcagcccgcgggtttcccttgccgcactgactacccggttcgaggttggcaccgtcgcctgcccatcggaggacaatctctctacacaggcggcggagagcctggccggtatcgctgtccacgatttttccgacctcgccctgagcttctggcaaaacggcagcatccgcctataccgcaaaggaatggtcagcgtctgcatcggggcaaaaaagctgttaattttgccggcggattgtgctatactgtatgaggaagagtcccgttgggatttagcggtcacctcctgggacacagcaccgccgcttcacgcagatgcggtgctgtgcgcaagaccattctggggaaaggaaaaccaaaatcccaatgcgtggcttttgtcctatggtcggggcatccggttccggctgtccgccggatgacgggctatgtccccgcggcccaaatcagccgccaaaaaggagcggcacccctttataaaagcaaactgcgctcgatatcaatagaatcctcactcggaaaggaggaactttgccatgcgtttggaaaaagaacaggacctgctgcggcatttaaaagaagatgcctgcctgccggtttaccttttgtacggccagcaaagctatcttgtacggctgtacgccaaaaaactgcgggaaaaagcggtccctccttctttgatggatttgaatttcacctattttgaggcttcccgcaccggtgttgacgaggtatccgacgcattggaaagcatttccttttccggcggcacccgctgtgtgcagctgaccgatctggatgcggacaagctttctgccgccgaatgggccaaatggaaagagcggctgtccgcctttcccgaagataccgtgctgattctcagccagcagaatatcccggtggaccccaaaaaatcctcccgatggcgcgcaatcctcaaatcggtggaagaatccggcgcctcggtggtgctggacgggcgctcccgccgggaaaccgtgcggtttttaaccgccctgtgccagaaaaacggctgcaccatctcccctgcggcgtgcgagtccctcatagaccgatgcggcgacgatatgctggtgctggggcaggaggtccaaaagctgtgcgcctaccagggcgagggggaaattcccgcttcggcggtggaaaagctctgtatccgccagctggacgccaatgtgttcgacttagcccgccggattcttgccaaaaacctctccggcgcgctggaaaatttgcaggaactgtttgacatgggcagtgaaccgctggctgttttgggcgcgctgaacacctcctttattgatttgtaccgctgcaaaaccgcgcgggaacaaggccttgcagccgctgacgtcaccgccgccttttcctataaaggcaaggaatttcgggtccgcaacgccatgcgggataccgaccggttttcccggcggcggctggcccgctgcattttcctcttggccgagaccgattaccagctgaaaagcagccgtaccgattcccagattctgatgcaggaggcggtaacccgcctgtttttggcgctgcaccaacaggagggcggcctatgattcacctgcgccaagccgtcgtcgtcgaaggcaaatacgataaaatacgcctgtccgctttggtggacggcccgattctggtgaccaacgggttccgcattttcaaaaaccgggaacagctggcgcttttgcgccgtctggcccggcaggatgggatcctgattctcaccgattccgacgcggcaggttttaaaatccgcaactatatcaaatcggccgttccaaacggcaggatttatcatgcttatattccggaaattttggggaaagaggcccgtaaagaccacccgtccaaagaagggacgctgggagtggagggaatggacctgcagatccttgccgccgcgctgcaaaaaagcggcgtgctgttcgccgaggggccgaaaaaggacccggtcacccggatggatttttacgaaaacagcctttccggcgggccggatagcagccaaaagcggctgtcccttctgcgggagctgaacctgccgcactatttgtcggctgccgcgctgctggaagcggtcaacgccctgatgagccgggaggactttcttcggctgctggatcggctggacgccgccgggccccaggaaaaataaccgcgagggggaggatgttatgccgcttgcttctttcacttttttgtatctgttcctgcctgtttcgctggcagtatattacctgttcccccaacggatgcgctacggagtcctgttggggatttcccttgtttttttcctgctgggcgatcctgtctcccttttatttttatccgtttccgccacagtggactatgggctcgggcttttgatggaacactttgatgagcaaaatccgcgccggcgggccattatggtggtgatggtcgccaaaaacctgcttttctttttcggcgtctcctgtttttgccagctgcacggcctgcaaacaccgttgggtcttgctgtatgcaccctgctgggaaccggttatgcggtggatatctataacggcgaggcgctttatgagcataattgggggaaattcctgctggcccatatcctgtttatgaagctccccgccgggccgctggtccgctaccgctcgctgtgcgagcagttttcgcccaaaaaggcggatcttgcgcagatgagcgaatcgatctgcctgctgattcaaggggcagccaaacaggtcattctaggcgtgccaatccaacagctgtataccgccctttcgggcttttcccggtcggaacattcggttttttctctgtggctaatgcctttgtgcgccgccatgagcctgtatttcaccctgtccggctactgcgacatggcccgcggcctgggcgggatgttcggcgtggcgcttccacggaatttttattacccgtatcagtcccggtccgtgaccgattttgtgggccgttttaacatctcggtcaccgcctatctgaaaacttatatctatcaccccctgggcgaagactccggcggctttgcctccgccgccctcaatattggattggtcacgctgctgtggggtctctggttcggttttcgcatcaactatcttttgtgggggctttattttgtcctgctgattctgctggagcgttcagtttggggcaggattctcgtcaagctgccggtgtttctgctgcgggtctataccttttcgctggttcttttctctttcgtgatctttaacggccgcagcgtcgggcaaagcctgtttttctttctgggaatgcttggcttgggcggccttgcgcccgctacttccccggtgctgtatctggccagccaatacgccccttatctcattctggccgttttgttcagcaccagcctgccccattcgctcaagggcgccctgcggcgaaaatccccggcggcggccgccctggccggagccgtttgctacggtgccctgctgattttaaccaccggctttcttctgcatccataagccgtgtcgggaaaggaggatgtcatgcgttctcaaaaactgctttctgtttttctgcttctgctgttttttgtgccgggggtgctgtttgccctgtccggcggatggcagacgcttactctgccatccgccgcgtcgatctgggacggtactgctgcccagtggacagaaaacatccttgccgaatcttttgcgggaaaggacttcctttgcagcgccgcggcggcgctgcaaaccgccctgggccgcaatcagcaaaacggctgcttttacggagaagacgggattttgcagaacctgccggacgcggacgaagccattactgccaataacctgcaggcgctgcaggcatattccgcccaaacctcctcgccctgctattttctgctgtcgcctaccgccgcggcgattgcgcagcaaaaaatccccagcttggcgctggaatccctgttcaatcaaaagctgtatatccagcgctgttacagctccctctcctccttccgcactatcgacgcatataacgggctgttttcccatcagtcagaataccttttttaccgcacagattcccgcctcaccgcattgggctgctattatctgtacgtcagcgccggggaaaagctgggctataccgcccgttccatggactatttctccatctcctacccgatgcatgactatcggggtaatttgacgcagcaggtgccttatgcccaggtggagcccgacgtgatctccctgttccattaccaaaagcacaatcgggacatccgcctggtgcaggatccattgggcaatgcctccgcggcgccgctgtatgataccagcctgttaaagagcagcgaccctttgcaggtctatctggggccgaaccgcggcgtaaccgatcttctggttagcgaaactccctatgacgggtgtttgctggttttgaccgacggcagctgcaacgcccttttcccgctgattgccattcattatcagcagatccgggtcgtcgatctgcgatcggttaccgccgaccagcttgctcaaatcaacccggattcctttgaccaggtgttgtttgccttttcggtggaaacgttcggctatgacagcctggtgggagatgtgctgggagagggctaacattttgggggatttcctttccaaatcagcatttttggggggaatgggccgcggtttttacctttcttttaccgcagcgtgccctgtttttttgcctctttgccgtaaactgacggcaaaggaggcgaagagatgtcgatttttgcaaaacgtatgattaccctgtccgttgttctcaccgggctgcttctggcggtgctgccggtcttttccccaatccaaccgaccgtatgattcacgcctttgccgtatccggcggctttgtggcgttcggcgcgcttgtctggagctgggcggttctgcgctgtcctcattgcggcgcaagcttgcctttgcgcggctggtcggatgtccactgtccccactgcggcaaaaaatgagaagagaaatccaaaggagcctgaagcgcatgtacgcccggtgatgtttgactttttcaggttttttgctatcgatgttcctatcgaaaggcaaatgctgtccgaacatagaaggaggtcgcccaaaatggaaacatttggtcaaaattgtatgatgccgctcaaaaagcgtccaatccccgtgtggtatctgatatgatccaagcgggagagtttgccgccgcggtagagtctgactccgggaaaatatatgtgggggtctgcgtagattcagcatgcacgttaggcatatgcgcagaacgaaatgctatttttcatatgattacaaatggggaacatcaaatccggcgcgtgattgccgtgtcgcggacggaaaagcggttccgccctgcggcgcctgcagggaattgatggcccagctcatgcctgaacattatcaagacattgaaatcatgctcgattatgagaaaaatcgcgttgtcacgcttggggaattgaccccggaatggtgga

SEQ ID NO: 2025 - DNA, 23503 bp, Unknown
  16S sequences of unknown bacteria
taattgtctggtctataatagttaaataaatttcccaacttacactgttcccaagcgtcagcgaaacctttgaaccttatgcggggtttttgtatgtttccactcattttactcacccccgagcagttttttcagttccatcaagccttttatgtcatcttccgagccatcaagttcatccaacatcgccgttaaagacttctccgtctcgcttatctgctcgtccaagtctacaagcgtagtttcgtattttttagaaaggcttacaatgctttttgtcaacgtttcaataatcgtctcgggtagttcgctgattttttgaacaagcggcgcaatccatttaagttcgacaagcgttaaagccttatcggtcggaagtgcttcaatcgtcttttttgttgtatctgccaattcgctttccaacactttaacgtcttttttcaacaatttttcttcctcaatcagggctgaaacttccaaaacaatcttctccgcaacggataattcgggggttctctcttttcttatcgcttttgcgtgctttgtaacgtttgcatttacaaatgcgtcgttttcgtcggtcagatcgtcactgatttcttctctgtcgtcttcagacaagttttcaagtttttcctcgtaaagcgaggcaatctcgttcagtctgtcgcttttctttgccaaagcctcttttttatctttcagaagttcattctgcaccaattcaaatgggataatatgtcctttccagccgtcctgaacctcttcggttttatcgcctttcttctttattaccataaccggatcgactttattgagagcagacaagccttccgtctgaataatttcaaggtcggtagaaatcgccgtccatgcatcggcaagaagttgatacgcctgatatttatcaatcagcggcacatttttcagtctgttaaaaatatcattcgagatagtttcttccgttctgttgatatccagagtctccgcaccgtcaaccaataatgtctttaaatagttacgaaaatccgcaaatttgtttttgtatccgttatcgaacgccgttacatcgccgttttcggaaatagcgttattaacgtcttccacggcaagagcagaaaaattttcacccagaggcttaaaaagagaagcctttaagcttggaaatgcttgccaatatttgacatattcttcgatttcactattcggtatgcctccgaacatagttgcgtaaatatcataagactcggctttatccgacgaatcgacatatctcggaatatttaagttataatcgttccccctgatttcgtcctttggcactactcgcgaatatttatcgattgtttttctatttacaacggtatcgacgatctttttaatatcgcaggctctcaacttattgtttttaccctctttaacaaagccctttgaagcgtcgataattaaaacgtcgccggatgcccttttcttctttaacaccattacaatggtaggaatacccgttccgaaaaagatatttgcgggaagcccgataatcgtttcgatgttatcgttttcgattaagtttctacggatttgtccctcctcgccgccacggaacaatacgccgtgcggaagaacaattgtcataatgccgtccggattcagatgatataaatcgtgcagcaaaaatgcataatcagctttagacttcggtgcaataccgtagccgtcgaatctcgcgtcttcgtgcggagtccatttttgagaatacggcggattagatacaactgcatcgacaaacaacgcttcataggttgattcttttttaccttcttcaaaataaggccaatcgtcagccaacgtatcgccgcatcttgcaataatattgcccggcttaattccgcgcattacaagattcattctcgttaaggaatatgtattctcttttaattcctgcgcgtaatactttattttatctttgtttttaagatattttgatacgctttgcccgatatttataagcagcgaacccgaacccgaagtcggatcgtatatctcaatattttctctgtcttttaagtgattcgccactatttggctcatcattaaagatacttcgtgcggagtataaaattcgcccgccttcttgcctgcgtttgccgcaaaattggaaataagatattcataaatataccccaatacgtcatagccttgcttgtcgtccatggggatagggttgataagatttataagcgaactgattgctttcgttctcgcgcccgagttttcgccaagtttagataaccccgtatcaagagtatcaaaaatgttttcgaatactttttcgtgatctttattaacgtttctcttaaatgccgataatgccgtagtaacgtttgatgcgtcaaagtccgttccttttttaagccatgtcgaaaacaggtcattatacgcaataaaatagccgtatctgtccttacaggtctttaacagatcttcgtttgtttcgactaaatattcttttaaactttcttcatcccacccgtcagcctttaagccgtttagttccttatccgacagaaatttgtaaaaaataaagcctaaaatataatctttatattcgtttgcgtctattttagaacgcatgtcgttcgccgatctccatatcgtagctgccaattcctgcttattcatttgttttctccttcaactatttccattatgtcatcaaaactacaatttaacgccttgcaaattttcaccaacacttctgttgtaacagtttgccctttgcctaatttcgtcatagtgtaagtacttacgtttgcaagtttacacaaatcggcttttgtcatatccttatctatcagaattttccatagtcttttataacttaccatatagcacctcttcttgagttatactatgattatatcacaatttaaaaaatatatcaataataaatcaagcgttctctctattttttctttattttatcgaaataaccaatataccatttttgttattcctttcaacccttgactgctttctttattatttttattattattgtaataacaatggtcggaacaccgaaatataaagcaatcgcaccgacaggcgtaaagtatcccaatattttttttatctgtaaaatttccggcaaattatgccaaatcaagggaaaaacaacagatataaatccccatattgtctgtcctaaaacttgtaatatctgaaacagcatcgtcattatcttttaaaaacctctatcgttaaaatatccaccgccgtttttcaatcctttcagcgaaacccacccatttacactttctttatccccgcttttgcttgttcttgtgtaagcttcgttatgcgcggtaagacaaacagaaacctcttcaaaactatcgcattttgcaagattaaatagttcatccaaccatgccggatgattaggatctcccattggttcatatgttatatctataccgaaacaatgagaaacaatatgaacctcagccggtaactcaatcgaattataatatagcgttttcatgttttaaatactccttgatttctttgttatttatttcgacggcgaatatagccgttttaacgattctatgtgcgttttgaacttctcaactaccttattcggcgcaacaagtttcaatttttcgccaaaagtgcagcaccaacccataaaaacgggactaacctgaatatttgccgaaaatcgatattttccgtcccctatggaaacaaattgtgttttaactccgaatttatcgaacattacgtccaacaaacttttatcaacgtcaaatgttacacgctcttcctctccgccgaacattccaaaaagttcttttttatgttgcattacatcaaactctgcattgtcttcaaatagaggaattatcgcttcttttaatttattcacagagtccattctgtctacgcggtaatgcttaatttttcgattcttatcattgtaagcaagcaaatagtagttattttcagaaaaaatcgttgcatacggattgaccttatatactgctccgtccttcctatatactttcttatgcgaagaatcatagtcaaaatatttgaactcgattttcttcttttcgctaatcgctcttacaatctcgtctatcgtataatatataacttcgttcgtattctttgtattgttgaacgcaaccagatttctctttaacacttcgcccttgcgacttccggctaaatccgcaattttatctacgagttctttcgttttcttttcggttataaaactcgcgccttgaacggcatctaaaagaatatgtaattccggcaaatcaaaactacggtctacaacataatattgatttttctttgccctctcacattttacctcataaccgtattcacataaagtctcgatatcacgataaattgtttttctctcacaggaaacgcccacctctgcaagtttatcaatcaaaacggtagaaggcataggatgctcttcatctgtctcctgacagagaatttcccaaatttttaacagtttaattcttgttgcgttttgaaacataatacacctccccgattatgacaattatagtatagcatttttttcaacacaagtaaacctgtaattgtccaaaagttgggacatttattaacgaaatttaaattagaacaaaaaataagccgcattattctctttatcgttttgcatttgaaaacattataaaaaataagcgcagccgagtcggtgcgcttcaaataacacttaccaccacaagggaagaaatttaactcaaaaaaaatttttttggatagccctaaaacgtagggcaaaccaccttaaaaaagtcaaaaaatatggatgttgtaagttcaaaccttgtttttcccaaaaaaacgccaaaatcagcaatgaaaatggcatggtcaacttacatattttagccttagaaaattcctcaaaaacgctaaaaaacatataaaaaaagccaaaaacgattgtttttgactcttttttgaccgaatcagtaatttcggtcaacgtagatggtgcccgtggccggacttgaaccggcacgatgtttccatcgagggattttaagtcccttgcgtctgcctattccaccacacgggcaaaaatattgaatggttcctttaaaagaacgtcagtctttacggcttgcaaatttatttacgccttttccttttggcatcatcatagataattatgtcaaaagaatgagatcataaaaattttcaatatataaagttttcactctatttacaagtcacgaaaaagtatagcatagtttgagaaaaaagtcaataaaatttgttggaaagctgtgcggttttgtaattattttacttgactgatggcgaatttccggtaaataaccgaaaaagaacataatgccacctgtgagttttttgtggaaaaagaaaatgaaacgaaatattcttgttatcgaagcgccgagtgaataaacggcgcctttttttgccaaaaatagcatataggaacagccacaggaaagagcaaaacagtttttatataaaatccaagatttaggggaactctcttttttgtttggcttccgattcatttctgtattgattgggcgtaagccccgcgtattttttaaagaacacaagaaattgtggtacgtaattaaagccgcattcgtaagagatattcgttatcgagagtgtggaatgctccaaaagctttttcgcgtaatcgatctttttatccaaaatatattttttcggcgtttttcccgttttttctttgaagagaatgcgaaaataatcgggcgtatatcccgcaatggaggcaagctcgtttacattcagttcggtacggaaatactcgtcgatataacgcagggcaaaatcgatggaaaatttttcagccataggcggcagcaaactgcgtttaaagtggtacagcagaatttcaagataactttggatggcgtcgagataaccgaactgcttttcggcaacttccttgcggatggcggcgacagcgttgagcatcgtcatattcgtatgttgcagcacttgattgaaggcgaatacctctttgtcggtagtaaaaccgattgccatgatcttactgtaacccgtatgtttttcgccgtgcgaggtctgcggcggaattaaaaaaatctggttggaacggaaattaataactttatttccatcgatgacgcattcgcccgtcgcatcgaggtagaccacgagttcgtagcaggaatgaagatggggcttaataaccctgtctttcgtgtaatttctgataaaaataaatttaatttcggtcatttttcccttagactccttgcaatcattgtagtacataacggcgcgtttgtcaataccctgcgggaaaaaacaggaagagaaaatatcggaaaagcataattttttatcgttttttgtgattgcttattttcgaggcattgtattaaaataaaaacaagagaaggctttgggagaaaccgctatgaaaaaactttttaagaaagaatcgaaaaggggttggacgacgaatgaaaagcagatttatataatggcttgcgcgggcgtcgctttccttctcgtcttttcttatcttcctatgtacggcgtgttgctggcgtttaaaaacgccaataaagcgttggatctgcaaaaggcgctttttaatgccgattgggtgggcgtcgccaatttcaaggagttcttgacagataaaaaatttatcgacgtcttcatcaatacgataggtctgaatctgttgatgttgctcatcaattttcccgcgcccattctttttgcgctgctcatcaatgaggtgcgggctcgcctgttccgcaattccgtggtgacgatcgccagttttccgcatttcatttcctgggtgatcttcgggggtatttttatttccctgacggatatgacgacgggcgtcatcaatcccatcctcgaatttttccatttgtccagcaaggcgaatcccgtggatctcagacttccgcaatatttctgggcggaaatgatcatcgtttcgctgattaaaaacgtgggatgggggtcgatcgtctatatcgccgcgatcgcggggatcgattcgcagatttacgaggctgcgaaaatcgacggcgccaatcgtttgcagaccgccgtcagaatcaccgtaccgctgatcgctcccacgattaccgtttttctgctcctaaatatttccaaacttctcggaaattcgttcgaacaattttattccatgcagacgacggcgaatttgtcgagaagcgaagtgcttgccacgtatatctactccacgggcttcggcaggaggaaatactcctacgcggcggcgatgggcctgttcgattcggtgatttcgctggcgctcctcatcgtcagcaacgccatcagtaaaaaaacgacggggaggggactgttttgagaaaaaagaaaatttatcctttcgacatctttaactatgccctgcttatcctgtttgcaatcgtcaccctctatcccttttggtacgtaatcatcggctccgtcaccaacggactcgtttacgaattgggcggggtatggcttttgccgaaaaactttacgaccgcgaatttttccgtcgtccttcacgacgacagactgtgggtggcgttcagaaatactattgtaagaacggtattcggaacggccgtcgcgcttttgttcacttccatggtcgcttatgccatgagccgaaaggaactcaggcacagaaaggtgtttcgcgccgtgaatatgtttacgatgtttttttcgggcggcatcgtgcccttttatatgctcgtcaactggataggactgtataataacttcctcgtctacattcttcccatgagttattccgtatataacatgatcgtgatgtccagttttttcggaaacatccccgaggaacttcgggaatctgccgtgatggacggcgcgggggagtttagagtatggctgcaaatctatatgcccctgtcgaaagccgtgctcgccaccgtcgggctgtgggtggcagtcggacattggaacgcatacatggcgacgctcctttataccaataaggacagcctcattactttgcagtattatctgatgcgcgtcatcaaggacgcctccatgcccgacggcatcgacggcgcgatcgcgggggaaattacctccaaaaccgtttcttatgcggcgatcgtagtggctaccgtacccatcatctgcgtgtatccgctgatccaaaagcaattcgccaagggcgtactggtaggctccgtaaaggggtgaaaaagcccgggggacacgatagaaataaaagtaaggagaaaagattatgaaagtaaaagcaaggagtatcgccgttttgctggcagcgctcgtttccttggccgccttttccggctgcggaacgaaaaaaccggattttaacatcgacagcagcgtaaaactggatcccgacgtggacagctggctgcaaatcgacgaagacgacgaagacgtggaaattacctggtgggtagacgccaccagctgggatttttatcagatcgcttccctgatcgaaaagcgaacgggcgtccgcgtcaatttcaaaaccgcgctcaaaggggacggcacggagctttccaccatgatcgcgggggacaatctgcccgacgtgatcacgctgacggacgaatccacgcgcatacagctttttgaaagttacgacgacgaaaaatatctctattccatcaccgatctggcaaacgtatacgcgccctctttaaacaagcgcatcccttcggacgcatccctctatctgagcgcgtcggacggcaagctttacgggctttccaataatttctattccaccgaggacatggaggaattcaaatcggaagggaactcgatcttatccaattatgcgatcgaggtgagaaaagattggctggaagcgtatatttccgcaagaaaatcggcggatccctcttttgacgaggacgaggaagtgacgacgcagcagggcttcgtggagatgtgcaagtgggtaaaacagaagtacgggctggaaaattccaatcccaccgtgcttttcgcgcccttcccgcagaaggcgacgaacggcagcatttccgaaaccgtttcctgtctttccgaatatttctgcgtcccccaggaggatgcggaggggaatctcgtatacacttacgatacgccggaatttctcgaagtgctgcaatttatgaacgcgctttacagggaaaaactcgtattgagcgcgaatttcggatacagctccgcggatatcatttctcacatcaaaaacggcagaccgtttgccgtaatcggcgccgcgcacaattattccaaaggctttgcgggaaggagcgccatggggtatgacgcggacacggggaaattcgacgacgcctatgaatacgtgcccgtcgtggtgacgaatggcgcgggggacgcgcccgtccttctcgatctcggcggcaagggatacagaacgagcatgatcaccaccaactgcgcgcgcccggaccgcgtgattaagatgttcgactatctgatgagcgaacagggacaggcggaatgttactacggggaagagggcaaaaccttccgttatgtcgtgaagccgggcgaaacggtggaagtgacgaagcccgacggctccacggcttcgcaggtcagcacgtacgggaagatcgaatggacggattccgcgaaagaaatgctcggatccacggcgaacacctggtacggcgcgggactcaaacagatcagccttttgcaaaatcccatgtacgtcatgatgacttcgctctattcggcggagatggacacttatcagttctattgccgctatgcgatgaaggcgcctctgatcccttatacgtatccccgttataccttcaaatacccgctcgacttttcggatataaacaggtatctggacatcgtcgatatttccgagcaaatagaggcggtgtggatacgctatctgccctctatcgtcatggcgggcagcgcggcgcaggcggaacagctgtggaaggacgctttgaaggaaacggagatttacggagcggcggagaggacggagtttcataatcgctgtttcaagagctataaggaaaagctcgggatagagtacgcctgggcgcccaatcgctccgattacagggcggcggctgtaaagcttcgggggtacgcggcggaatacgcgaaagagatccccgactatatcaaaatcagcgagtaaggagaaaatatggaaacgcgcagaaaaattatcatcgataccgatatcggcgacgatatagacgacgcctttgcgatccttttggcggtgctgtcggaaaaattcgaaattttgggcgtcacgacggtattcagaaattctctgcatcgcggaagaattgccaaggcgcttttagaaagcgcgggggcggacgtccccgtatacgcgggcgcggatgagccgatcgacggaaagattccgacttttcccttcgaggatacggacgcggacgggaagcccgcgattccccactattttcccgaaatggaggaagagaggacggaaaaggcgcctgcggaaaattttattctcgatatggcggacttatatccgcaggaagtatccatcgtcgccctcgctccccttaccaatcttgcaaaagcggcgaaaaagcgccccgacagttttcgaaagatcaaggaaatttttttgatgggaggggacggaacgttccattttgccgaatggaacgtccgctgcgattgcgccgccgcgaaaaccgtgttcgatttcggcgtagatatcctgctttgcggcttcgatatcacctcttccgcccgtctttcccgggaggacgtaacgaggcttcgggcgctgcgcgcagcgccttttcggctgcttgtcaaaatgatggacaaatacataagcgactatcgggaggaacgggtgcccaccatgcacgacccccttgcgctctgtatgctcctgcttcccgaaaaattcgtgtgggaaaagaaaaaattgaccgtttctttaaaaggcgaaacgcggggaatgctctgcgcctgcgacgggggcagggaaaagagcatcgtcgtaaaagcggactggaaaggattgattgcctatatgctggaacgcttccttgcctacgacgcaaccatgaaagaaaaggcgtgaaaaacgccgaaaacagataataaggagaaaaacgatgaaaagaacaaccaaaattgccttagggatgtccgtaatgctcgctgtcggcttcggaatcggcgcgggacggggaatcgcggcgctggcggagcggaagcaatccgccgtgacggatcggggaaccgtatacgaatatcagacgggttccatgacgcttgtacagaacgcgtacggcggctcgatttttgcggatttcgacgcagtcaacgtcaacgcgctcgccgatgcgcgccgctacgcgctcctcgcgcccgaatacacgtacgccgtaggcggcgtcacgctcacgggaatagacgcgcaggcgtccggaaaatatctcgttttgagggtacataaccttctctgcgcggaaaaatcgatcactatttccgtcaacgatacggcgatggacagcgtcgggtattatctcgacgggcaatacgattccgtgcgggcatacgaaggggaagccgtaaaactgcccgtctatcagaatccgaaggtgacgaaggcgaacatgggtttttcgggagaagtgattattcccgtttccgcgtttgcgggagttacgaaaattcagagcatcactctttccgcggcgctctctcagacaaatttcaacgtgggagaagcgtatcttgccgaatttgacgccgcggcgatgactctttccgataaagtatccgtatggacgccctcggaaacgaattgggaaagatacgaagagagcctcgataagtcgggaaattcctatacggcggaggacatttttgccgtcacgcccctgcgggccggcgaaagcatcttcacggcttgctatgcgcagagcgcgctggataccgccgcgagaaactatttcttctggcagtttcccgaggaaatgatcgacggggaggattcgctggtacaccttaaagacctgaacgtgaaaggaatggcgatcgacgtcgcggtgcccgaggggacgccttcgttgcagcttgcgatacgcctcggcggcgcggataatcccggactcgattataaggacggcgtcactgtctatcagacgagcaacgcccttgctaatcaaagcagaattttgcccacgggactcgtgaagggcggcaatacttcctatttgccctcgggcgcgtttgaagggacgatctatatcccctttacaaaggattcgtttacgggaaaaaacaacaatgtcgatcccgacgtcgtgatgcccgtcatctgggtggattacaacaacagcagtcttttgacggaaaaggaatccgtgcggttttccaattgccgtttcgtgacggacgacacgccctatcagccgaatctgatcaccatggtaagcgccaacggtcttttggaaggctcggtgggagaggtgcccgtgggcagcgactccaacaataaagtgctcgcgggaacggaggtggcgtttaaagtgacgcccaataaaggatacggcatctcttccgtcaccgtgacggaggaaggaaaagatcccgtatccgtccaaacggacgaagagggcggattcgtttatacggtcaacgcgcccgtcaccgtcatggcgagctatgaaattacgcagtacaaggtgacttacgaactcaacggcggcacaaacgccgcgggcaaccttgcgacgtatacgtatctgcgcggcttcgagctttccgatcccaccaaagaaaacgccgaatttatgggctggtacacgaacccctctttcctcggagaggcggtgacggagatcgcggacggcaccacgggcgatctgacgctttacgccatgtggaaggagaattccgcgagcggagatagctccgacggctcctctttgaatggctcggcttcttcggagggcaattcgggcgcgggatgcggctcctccctcttcggcatgggaagttctctgattcttctactcggcggcggagcggcgatatatcgtcggaggaaaaaacagtgaaaaaaaggacgtggcttttctggatggcttttgcggcggcgaccgtactcggcgtttcgggcagtatgcccgaaattgcccgcgcgggcgcggaaggcttgtccgcgggagagaaatggacggacgcggcggaggtgagaatcgtcgacgatgagctgctcgccgctttgatcgataaacgcgccgacggggaaagcaaggtgacgtattcgggcagtacgtggacggcaaagcgggaaacttacaaccccgccgacagacaatggcagggtctggtatccgtcgcggcggtgggggacagattgtggtcgtgtttttatacgggcggaaagaaggaacccgatcccttcaattatatcgtgatggcgtacagcgacgacggcggcaaatcctgggtggatccgtatctcatcgtcgatcacgcggacatcggctcgcaaaatattttcaccgtcgtccccaatctctttgtagacgaggacggggatctttggctcacctatcttcaatcccaattctggggcatccgcttcgataacgcgggatgcgaaaatataaaagacctggcgtgggatccgcccaaggtgctgggcaatatgaagaccaatcagcccccgacggtcatcactcacgccgacggcagcaaggaatggatcgtcgcttccgaatcgcaggtgggcgaatcgcacgtcgacaccacccgcctttacggctctaaggacaagggggctacctggacgctgaaagccaaagtgaaatcgggcgccgccaccgcccgcagatggccggaatctcaggtggtgcaggtggacgatcaaggcacccttctcctcgcttcccggctcgaaggcggtacggtaggaggcgtcgaagttgccgtttccaaggactacgggactacctggtcggactatgaatacaatttatccaaaccgtttataggacccggttcgaaattttttatgcttcggctttccagcggcaatctccttatgctcaaccacgatacgtcctcctcgcggagcaagttgaaggcgtatctttcggaggacggcggaaaaacgtggccgtattccctctctttggacgacagggacgacgtgagctatccaagcgccttcgaagcggacggcaggattttcgccgcatgggataaggggagatatatcgaaaaggaattgcgtttttcctcgttcgacgaagaggatattaaaaaaggctatattttgtccgagaacggcgtaaaaaaatcgcttatttcccgcccgacgcaatatcgggacgtttcggatgtcctgggcgcgttcccttcctatttggaaaagcctgtcggcaccgcgtcggcagagataaaagcggagcttccttcccgattctccgtgctcgacgaagacggaaaggaatatacgctccaaggcgcttggagcagcgcgggctataaggcggaacgcgcgggctattacctcctcgcctttgaagccgagaatatgcctctttatctcgcggacggcgcggacaagctctccatcgtcgtccgactcgtcgaaggcgggcagcagggcagcgacgaaagctccggaaacgaaaacggcgggaacgggggctgcaaaagctcctccacggcgggaacgggcgtcgcggcggcggttttggcggcggcaggtatgaaacgaaagggaaaaagacggtagtttccgcggagaaaaagcgcatttttatggcgggagaacgtcaaagggcgatttttgaggagaacatcatgacggaaatcaaattggtgcacacggacacgctgagctgcgaagcgattttcaggatcgcttccaacggggactatctgattttttcacagtgcggaggcggcgtggagccgcatccggataatcgtatactgcttttcaggagcaaagacgggggagaaacgtggcaggctcccgtggatatttttcccttggaaacgcgcgccgttggttgcagcgaggtgttcgtttccaaggagtgcatcaaagcgtatctcctcgtgcacaacggttttttcagggggtatgaaaactttatcgccaaaagctacgacgacggctatacgtggcattacgaaaaagacgactgttttaaggatttttgtatgacgcgcagcgcccttctgctctcggacggcagatacatgacggtggcgcagcactatcccgggacggagggggcgagaggcgcttcgggcgacgaaaaagagtatatctggaaactcgattccccgtttgcggaaaacaccgttatctacgaggacggaaggggcggcgtcggcggaagcgtccgcattccgcgcgtttacgagggcgtacggggatggaaatggagcgagccgaccgccgtcgaactcgaaaggggacatctcgtcatgctgcttcgttttcagggtacgtcgtatctgtggcggagcgattccttcgattacggaaaaagctggacaaagccgcaaaaaacagagctggaaaacccgggaaacaagccgaaactcatcaaggcggggaatcgggtgatcctgctcaatacgtttcgtcggggcagccgatacatagaccgcacgccgctctccgtatgggtgtccgacgacggcatgaagacgtggaaaacaaagataacggcggtggattttcccgcgtatttatcctatcccgacggcatttacgacgaacgggacggaaaggtgaaattcgctttcgaattgaatcggcacgacgtatatttcgtttcctgcgatataggcaaagaagaataatggaatcatggatttatatatagacataggcagtacgaacatcaaatggtcgcatggaaaaacggcgggaaaaatcccttttcccgccgcctttgacgcggcgtatccgcgctacgaggtccgcgcggacgagattttttcgattgttttaaacctgatcgatacacatcggccgcagcgcgcgttcttttccgtacagatgcacggatacgtgctgttgaaggagggcagggaagcgacgggctacatttcctggcgggacgagcgcggaaaagaccttccgcccgactttgcgctcacggaagaatacggcgtcagaataaagccgaatctcccccgcctgagtttacaggcgcagagcgtggcggcggatgaattttgtacgctcggctcctatctcgtttaccgcctgacggggaaaaatacgacgcacgtgacggacgccgctgcgagcggcttttacaacgtgaaaacgggcgcgcgggatgcctgtcgctatcgcctgcccgaagcggtatatcgggtacaggaggcgggcaggtataaagacaccgccgtattttctcccgtaggggatcagcaggcgtccgtcctcggcgcatggaagggcatggaaaatgcggaagggtatgttttgaatctcggcacggcggcgcagctatgctgcatggcggaaggattcgccgcgggagattttgaaagcagaccgtatttcggcggcaacaccctctgcaccgttacgggcttgccgggaggcggatatatttcccgaacaatcgggacgacgtccgccaaagcgctgcgggaaacgcttgccgaggcgtatgcttccgctctaaaaaagctgccgacgcgaaggaaaataatcgtgacgggcggagtcgtgcactatcacagaatactgatagaagaaacgcttgaaacgctgccaaaagcatacgtcctcaacgaaggggcagacgcgctggcgggattaaaaattttagcggaggaaataaaatgagagcgggaatgatgatttcggagatcgcgttttccaatatgcccgtacttttgaaaaatgcgggaatagagttctgtatactcgattgcgaacacggcggcttcgattatgcggaggtatcgcggctgatcatgacggcgcggctgtgcggcttagagctgatcgtaagacttgcgaacaacgaaagaaaagacgtcgtcaaatacctggatatgggcgcggacggattgttgctgccgatgacgaatacggcggaggacatacgaaaggtggcggactacgcgaaatatccgccgctcggacatcggggcatctccacgatgagggcgcatactctctatgcgccgccgcccgttttggaatatatgcctgcgggaaacgcccgcacgaaaatttttgcgcaggcggaaacgcgcgcaggcgtggaaaatatcgacaggattctcgcggttcccggggtaagcggctgttttatcggtccgaacgatctttcggcggattacgagtgcctcggagatccgaacgcgccgccgatattgaaggcgatagagcgcgtaggcgaggccgcggcggcggcggggaaaatctcggggatgatcacggcgaacaaaaattatctctcgaaggcgaaaagctgccgctttacggcgttttgcgttggcagcgaactcaacgcgatcgcggaatatggtaaaaagacggcgcggctgataaaggaataaagcggaaagaaagagcggacaacagaagaaagccgaagttatcgggaaggataacttcggcttttttggctaaatagtacgaaatgccacataagtaaaagagtttcgccgcgttgagaaggcacctcacttcttcacgattttttacctcttacctcgccaaatcccggttgtcataaggaaaagggaaagggtgaaaagggaaaaaataaatcccgaccgctttcgcagtcgggattttggaggcgccacccggatttgaaccgggggatgaaggttttgcagaccttggccttaccacttggctatagcgccgtttgccctgttctcgtggggataggaagaaaaaacagtgcgaacctttataaattggagcgggaaacgagacttgaacccgcgacatttaccttggcaaggtaacgctctaccactgagctattcccgcatactccgtccgcactgtttttcttttggtggaagttatagggatcgaacctatgaccctctgcttgtaaggcagatgctctcccagctgagctaaacttccgaaagcctatatactatatcatatctcgccttgaaatgcaagcgttttttaaggctttcaaaaaattttttctcaaaaaatttcacaaaaaaaggaacatatttttcgcatgaaattcctcggcggggcttggcgccgcgaagaaaaaacgcgcgtttgccgcgcataagagaggtataaaagtagttttccttttaatcgaaagattatgccctctaaaacaaaaatcgtaatttctgcatcgcctgagccgggcttactccctcttcgccggcgccgtcccgcgtcgcctttaaaccgctttgtcatctcttccttcctgctccgtatgttttaaggaaattgccgaattttgttattttccttaacggcaaaggaatattcgggaacgacgaaacaatcggcgccccaaagagttcttgctcccttaacacatttcgtcggcataggactgcgctccgcaaaagatactctttatccgtcgggatcacttttataagcctcacgcttcgccgaaattcagtatggattttttctccccgccgtcggtgtttccgtacgccgtcagccctcgaagcgcagacttttgaggtattcgtcgagaatggaagccgagtggggcggcaggccgctaaaaatgtaatcgacgcctaaattcgtcagtcgggcgatattttctttcgtggcgttgcccgagcattccgtttccgcatcaggggaaataaccgatgcctgatcattcgcgctcgccgtcgttttttctttgcggaacgatcgcaatcaaaaaaggacccgaacgcacgccgatcaaaatcggtttcaggttcggatcctactgatgtggagcgggaaacgagacttgaacccgcgacatttaccttggcaaggtaacgctctaccactgagctattcccgcatactccgcatacattattttatgcttacataatatatcatatctttttcataaatgcaagcgtttttatgcccgtttttataaattttttgatttttttcgaaaaattgctttgattccgttgacaaaccgatggcacacggggtataataataaaaatcttgtaacgcaaggagaaaattatgttcctttcgaatgcatggtggcgtggataattcggcgttcgcataaacggtatgttttgcggatgcttttatcgcgtcgcaaagcatatcggaagaatgatacgtctatcatacaagacccgacggtatgttttgtttaaaacagatcggacgggtcttttattttaattttgaaggagatgtatcatgaacaagacaagaaaaagcaacgcgggtgtgcaagagggatatttcggacaattcggcggagcgtttgtgtccgaaaccctcaaaaaagagctggatagagtgtatgcggaatatctcaaactgaaaaaggacgaatctttccgcgcggaactttccctgctgcaaagaacctatcagggcagacctactcccttatattattgcaaaaaactttccgagcaaacgggcggggcggacatttatttgaagagagaggatctcaatcatacgggcgcgcacaaaatcaatcactgtatcggcgaagttttgctcgccaaacacatgggcaaggacacggtgatcggggaaacgggcgcgggacagcatgggcttgccctcgccaccgcctgtgctttactcgggcttaaatgccgtattttcatgggcgaaacggacgtgaagaaacagtacatcaacgtgcgtaaaatgaagcttttgggcgcggaggtcgtctgcgtcgaacggggaagcaaaacgcttaaagacgccgtggacgccgcgtttgaggagtacgcaaagacttatgaaaactccatttactgtatcggctcggtagtcggtccccatccgtatcccacgatcgtccgcgattttcaatccgtggtgggcagggaagcgcgcacacagttcaagcggctgaaaggcggtttgcccgacgcggtggtggcgtgcgtgggcggcggctccaatgccatgggcattttcagcggctttttggaatatccgtccgtggctctgtacggcgcggagcctctgggcaggggtgaggcgacgggggataacgccgccagtatcaccttcggaaagcctgccgtcatgcacggctttaaaagtttggtgttggaggacgagaacggagagcccgccgaagcgtattctgtggcgagcggtcttgactacccctccgtaggtcccgaacacgcctatttgaaggcgataggacgcgtgagctatgtcacggtgacggacaaagaggctttggcggctttccgcaaattgtcggtgacggagggcattattcccgctctcgaaagctctcacgccgtcgcgtatgcgctgaaactcgcccgagcgctcggcaaagaaaagagcattgtcgtcaatctttccggcagaggggataaagacgtggacttcgtgttggataactatcccgaatcctgacctccccgtttgcgggaagtaaaaaggaattgccgcgcgggagtcggcgcatccttgccgaaaaatgtttttttgtcgggtaaatagaaaaaagagcggcttttaagctgcgccgaaaacgatcctttctgttgatttcccgcaagattcgccgcatagaggcgatcagacggacgcgcgagtgctttctcgtttgtaatagaaaagatattgctgaaaaattcctccgtttctgccgaatttttccacaaaaaagcggttgattttttcccgatcggtttcggtgccgccgaaatcctggtgatacagcttttctatccaggtatcgacgggaaaggcggccgtttcgtgaaacgcaaacagcgaaatgcagtccgcaactttattacccacacccatgtaagaggtgagcgcttttttcagttcgcttccccgcttattttccagcggggaaagcccttcgagaaaaagccgccgcgaagtgtccgccacatatttggcgcgatagcccaaacccgtttgccgataaaattcctcgcttttttccgcaagcgcccgcagagagggaaaggcgtgataggtttgtcccaaaaagctctttttttctcccagcgcggcggcgatacgggataaaatgcccttgatgcgaggaatgttgttctgttgagaaacgaggaaactgaggatacattcggctttgtcctgtcgaagaatgcgaagccctttgccgaaggacgcggcggcagaaagaaagggtacgccgaaggtttccgcttcggcgcagatttcttcataatccgtctgcaagtcgaaataattgcaaaaatacgcttcgtccgcctcctcgcaggtgagaaagacggttttgttctcctccctcaaaagacacgctttgtctgcggaaatgagaagataaccgccttcaaagggcgtaaaccgaaacacctgtccgcattcgagggtggctttcggggaaaaatattcatttggaagggaaagagtaatcatagattttttcgatgtgtgaaaaggcgaacttttcggaaaggaatttgcctgacgcaaagcgaagaagacttccgttgttcccgttcggtcggaacgcccgtttcggaagccgtccgaggtctttgctttcgttctcataaaatcggaaaaacagagtcgctttatgaaggaacagaataattataacatatctttcgaaaaatggcaacgaaagagggcttggaaaaaagagagcgctttaaaggaaactttttatgaaaagttgtttaattttatgaacagaagtttaaaagaaaagcagtccccgatttggcgcggaaattttgtcggctcgtttgatctaaaagaaagatttgtgaattattgttaaaaaacggaaagaaatttccaagcgctattgacaaaaggggatttgtatgttataatgaataaagtagaaatttatttaaaaccgaggtattcgaaatgaaatatgcattgagaggcattaccgccgaagaacttacctacaccatcaatcgggtgaaaatggaaagaaacacgaaatttgagatcaaaccccaattttcccgcaccattcgccgcgttcaggaaaacgataagctgtatttcgtttccttggaggtgaaagtggaatccaccgaagcggaacccaagcccttcaatctgaaagcgcgcctggtcggtatcttcgaggcggaagaagtcaacacggacgaagacagacaggtccttgccatcagcaccaccgaaatcgtctatccctatttgagaagcgcggtttccgctctgacggcgaacgcgtttatcaatcccctcattctccccgtcattcccgcagggaccatgttccccgaagacagaggagaaaaacaggcgactctcactttcgacaaccccgacgttctcaactgagcaaagcggaatttcgactgcttcttcctttcaaaataggtcgttacaaaagattatggcaacggggtttatctgttattgtatttattggctcgtcaagttttggcgattcagaaataagaaatattcggaactttcccttgcagaaaaagaatttatttccagaagtatgcgaaaggaacgttataagaaatctcccgaggaatttttagaagaccttgcgccccgctctgtcgcagtactgtgtattcttatttttatggtcgcgactttgattggagtcgtcgcgtatattgcgctttctatctaattttttaattgtgtgatacaaaaatgcgttcgtctttaaattcttaaaggcgggcgcatttttattaaaataattcttcttcaaaacgcttgacttttatataaaaatgctatacaataacagttgttatgtaacaattgttatttttttacgaggtgaaagagatgccgccgaaggcaaaactcacaaaggaacaaatcatagaaagcgccgtcgaagaagtgcgggcgtgcggctatgaagcgctgaacgcgaggagccttgcttcgcgtctggggtgttcgacgacgccgattttttcctgttttaagaacatggaagaggtaaaaaaggaagttgtccgtcgagcgacggaagtttattcttcttttatcgacgagggattggcgaagacaatgcctttcaagggcgtaggacagggatatatccgctttgcgaaagcagagccgcagctttttcaattgttattcatgacttcgcacgacaaagcggcggcttagatcggaagagcgtcg

SEQ ID NO: 2026 - DNA, 3613 bp, Unknown
  16S sequences of unknown bacteria
cccccctccggcacttgccgctggagggggtctctctatgctcccggggatagcagaaaaataccgccgcatcttccgcaaaggctgcggaggatgcggcggccgtggtttttcggggtcatacggcgtgtgtgatgcgtcggtcccagaggagccagccgtagcggcacatggtgcggcagggaatgcggccatcggcctctgcgtgggcggccaggtccgccgcaaggcgcggcaggagcacatccgggtcgcccggtacgcggtagcggcgcagaatatcctgcgccagggcttcgtccgcggcggagcgcgtggagagctgctctgtgtgataggcgaccacagggaagcggccctggagccagagaagattcagcagcgcatagaaattccgcccgtttcggcggacagaaaagctgcccggcgggcagagccgcgccagggcggcctctgcaatatcgtctgtcgcctggacaaagctgctggtgcagcagtaggcccggctggcttgctccagacgggcaaggtcccgcgcactactgagggcaggcgtctgggcggcgaagaccaggtcaaatgcaccgtcccagtcaggcgcattgagatcaagcactgtaaaatcggtctgcaggaagcgaagattctcccgccctgtccgggcagcatgggcctgcgcgctgcgcagcatccggggcgaaagatcgacggcggtgacctgggcgcaggcccgggaaaattcgacagaaaagcgccccagaccacagccgatatccagcacggcatctcgcgggccgagtagcccatggtcgcggagaaacgcagccattgcagcgacgcgggcgtcataggcggcaagcttggcgtcgttctccaaaagctctcgctcccaggcagcggcgcgggcatcccagtcggcgctcgagtagccgcaggcagcgtttttatcctgtttgagcagcgcggcaaattgggcttgcagcgctgcggggtcccagtttgttggcatagcggtgtccctccgtgatgtttcttacttgctactataccggaatccgcgccgctgtgcaacaaaaaccgcaaaaaacgcgcccggtttagacggacgcgtttgctgtgggcagcggatatttttcggcgtaggcgtcgtagcgctggcggaaggcggcgctgtttttctgggcgcgctgagcctggtgggtcggcagaagggatgcgtctgttacggcgctggcaatattggcacagtgggcggcgacgcgctccagggcggtgagcagatcagcccagacaaagcctgcttcgacgctgcagtgcccctgctgcatccgcgcgatgtggcgcatccgcagctcctctttgcgctggcagactacctcagaaaggggcagcacggcagctgcggcgtccagctcctggcggcagtaggcggagagcgtcagctgcagtagctctgtcacggcgcggctgatgcagcccaggtccgtagctgcctgcggcgacagggccaggtgcttgtcatgcagctcctgggcagcggcgataaggttgacgctgtgatcgccgatgcgctccaaatcgccgatgacccggagaatctgggcggacccggcgctgatggcctggcccggccgttgagcgctgagcttgacgagataggtgctgatgaggtcctcatcccggtccgcctggcgctccagctggcggacggtatccggcagggccgggtcgaagcgtactaggcaggccagggcattctgcagggcagaggcggcgtcgtctgccatctggcaggagagggcacggcaacgctccagggcgacagcgggggtggccagcaggcgcgtatcgagggccaccgtcgattccttggcagggccgtcggggaccagccggtaggccagctgctccagaagcccagtggcgggatacagcagcgcggtacacagtaggttaaacgcggagtggaccgtagcaatcccggccagcgtcgcgctttcggataagatcgccggggcaaacagcgcacggacgatgcaaaaaacgctgatccagacgatggagccgatgacattgaagctgagatggaccatggccgcccgcttcgcgtttttgttcgtaccgaaggaggccagaatggcggtgatgcacgtgccgatgttctgccccatgatgatggggatcgccgcggcgtagctgatttgccccgtccccgctagagcctgcaaaatgccgacggaggcggagctggactggatgatcgccgtcagaatcgccccggccaggacaccgaggatggggttctggaataataagaagaggtgccggaaggcaggcacatccgctagacccgcgacggcgccgctcatggtctccatgccgtacatcagtgtcgcaaagccgagcaggatcgtgccggtgtcctttcgcttgctgtcggagcagaagaggaagagcacgatgccaatgagggcgagaatcggcgtgaaggaggagggcttgagcagctgaagcagcaggctttggccggtgatccccgccaggctcaaaagccaggcggtgactgtcgtgccaatgtttgcgcccatgatgacataaatcgcctggcgcagccgcatcagcccggaattgacgaagccgacgaccataacggtggtggcggaggagctttggatgacggcggtgacgccgaggccggtcagaaggccggtgaatttatgggaggtcatccgctccaacagggtctgcaggcggctgcccgcccggcgttccagcgcctgccccataatctgcatcccgaacaggaacagacagagcccgccgagtaacgttaaaaagtcgaagatatccatactgcatctcccgctgcgtttttctgaatttaaccggctgggccgatcaatgctattgtaacagacggggcgttaagattttgccaagattcggcgaagcggcgggaggattgtgtaaacaatgtgaaatctgcgttaaatccgccccgcaccaggttcctggtgcggggcggtcaaaggggcggcgttagagcatggcgcagtatgccgcgcgcagcttttcgatataggccggggtcgtgccgcagcaaccgccgatgacgcgggtgcctgcctggagcagcgtacccatggagcgggcgaaatggtcggcgtccatgctgtagtgaacgctgccgtcgtcgccgatctccggcatcccggcgttgggcttggccaggatggggatggcagcgtgagctgccatggtacggatcattgcctccatctggtctggcccgacggagcagttgacgccgacggcgtcggcccccagggcctccaggacctcggctgcgtcggcagcgccgccgccaaagaacgcttgaccgtcggcggcaaaggagaggctgcacaggaccggcagctcgcagagcatccggaccgcttccagcgcggcctgggtctcctccaggcccatcattgtttcgatgacgaagaggtcgacgtcggcgtccagcagtgcctgggcttgctcagtgtagaggtcgatgagttcggcgtagtcggcgggcttgccgatggtcgtcatatccccggcgacgaaggcacggcctccggca

SEQ ID NO: 2027 - DNA, 4323 bp, Unknown
  16S sequences of unknown bacteria
accacaggctttatgatgccgaccggaaaatatccgatatatccgtaaaccggaactcagacggctctctggaccttgccggagcgcaggcagcgggagcagacgttgagagtcttcggggtgccgttgactacagccttgacacgtctgatattgggcttccaggtacggttggttttgcggttcgagtgggaaacggcgagaccgaactgaacggcctttccgcagatttcacattttgccatgattttgacctcctaaatagccgcgcgtaattgggcgcacgacagcgattcatgattaacagaattattataacacattccgattgaaattgcaagaggtttttgaaaaaatcccaaaaaaaattgcgcgaaaaattccgccggttcggttcgcgatatgtctgttataaccgaagagttgtttttttcccgcgccgactgaaccgactggttattgaaaagctgtacaaaatatgttataatatagttacggaaacaacaaaaccgcgaaaggacagcaaaaatggaacagcagaacacggatcccggagcgcgactgacagagctccgcaagaagcggggaatgacacagaagtcgctaggcaccgcgcttaatatctcggagcaggcggtctccaagtgggaacgcgggacgacgatgccagacatagcgctcctcccggcgatagcggagattctctcgacgtcgatcgactacatcctcaccggaaaggagaacgtcagatacgtgacggtctcgcagtacgatatgtgccgcaccgacaagcgcatgggacgcgagaagcccctcatcccggagacgacctacaacgggattgagaaccccgccgtctttccgccgagaaaccttgaaaaatacgacgcgcacctcccgctcccggtgccatacctcaaaaagccgccgaaaattattgatatatcagtcggaagacagctcttcgtcgatgatttcctcatctctgagacgacgatgatccgccagttccacaaggcgagaaagcaccccggaaacccgatatttttcccggagacgccgcttgaaaaaggcgagaacggtcacgtcgcgatggctgctccgttcagcgacggcgtctggtacgacccgaccgacgggaagaccaaaatgtggtaccacgccggatggttcgacggcacggcttacgcggagagcgcggacgggatacacttcgagcgcgtcgactgcgggcagggcgacgtcaacaggtgcataccgaaacgcgcgggtgtgcggcgggacggctgttcggtcgtgctcgacagatataacgcgagcgcgagaccgtaccatatgttcctgttcaaccgcgacggcacgcacgatttcgcggaggtctgggactcggcggacgggaagcgctgggagaagaccgcggacgccggaaacatcggcgaccgctcgaccatcttctacaacccgttcagaagaaagtgggtctacagtatgcgaaccggcttcggaaagctcggcgagcgcgcgagaagctacgtcgaggcggacacgctcgaggatggcgcgccgctctccgacccgataccgtgggtcaggtgcgaccggctcgacccggtttaccagacgataggcaaccgaccgacgctgtataatctcgacgcggtcgcgtatgagtcggtgattctgggcgcgttcgagatattcctcgggccggagaacgacgtttcggacaggactgggataccgaagcacacggagcttcagctcgccttctcacgcgatggattccactggtcgagaccggaagacaggacgccgttcatttcgccggagcgggagaacccggacagctgggagcgcggatacatacagccgaacagcggtatctgcacgatacacggggacgagctgtggttttactacaccgccttcaggggcgacgagacgagaaccagaaggagcaccgaggcggacggctgctacgcgaacgcgtcgatgggtctcgcgaaactcagacgagacggcttcgcgtcaatgaacgcctacgggtacaaggggactctcacgacgagaaccctgcgctttgacggcgagatactgttcgtcaacggcgattttcatagcggaattctccgcgccgccatgctcgaggaggacgggagccagatacccggcttcggttttgacgactgcgtcgggatgaacacagattcgacaaaatgcgagataacgtggagagacggaagaaacctcgcggagctctcggacagcgccgttaagatacgcttcgagtgctcggagggcgcgctctattccttctgggtctcggacgacgagagcggcaggagccatggctgcctcgccgccggtgagaccgggaaggacagttactgggacgaataaaatattgagattgaggaggaacaggcaatgaaacgaagaatgatatcgatgctgctgctcgcgtcgacgcttctcgcgtcctgcggcggaaccgggagcgggactgagagcaccgcggacgctccgggcgagacctccggcacgaccgacaccgagacggaaaagctgacgagcggcctcgaggctgtcgattacggcggggaagagataaatttcctgacatataaaaactccgactaccagaactcgcagatggacattctcgcggagacgctgaacggcgagcacgtcaacgacgccgtttacaaccgcaacaagacgctcgaagagaagtacaacgtcgtgataaagtcggacggcgattcctcattcgacgcgccggcggcggctgtgaacaagctcgtcatggcgggcgacgatacatacgacatatttcttatgtcgaccgtgaacgccttcaagtgcggatttaccgggaaccttctgccgatgaacgagattccgcacatcgacctctcaaagccgtggtggaacagccggatagccgaagacacctcgatacttggcgtgaattatttctacatcggcgacatgaacctcaacacgtggacgcagagctatgttacgtacttcaacaagaagctcgcggtcgattatgatatcccggacctctacgggacggtgaaatccggaaagtggacctttgacgagctcacacgccttacgaagacggtttacaaggacctcaacggaaacggagagtacgacgaaaacgacctctacggcctctccgcctgctcggtttgtatcgactgcttctggatatcgagcggcgtcaggttcatatcaaaggacgctgaagacgggctcacgctgtctatcgacgagaaggtatacaatatgtgggagagaatggcggctctgctcgacacgcctgagatgctctacacagacagaaagcagtacacgaagatgcgcgacacatacgaccgcggggccttcactgaggacagggcactgttcttcatcgagggactctgcgtcgcgtcgaataagctgcgcgatatggagaccgactacggtatcataccggttccgaagaacgacgagtcgcaggagaactacagcgtctactcccacgcgacgcacaactcgactgtatctgttcccacgacctcttccggcaagctcgatatgctcggacgtataatcaaggacatggcgtatttctcgtccgagacggtcagaccggcttactacgacatgatgcttgccgggaagttagcgagagcggaggaggatgtcgagatgctcgggattatcacgaactcgatctcgtatgacctcgcgtactcgctgctcgatatgtggagcctgcgctccgccgtcacctcgaagcccgccgcgtcatacatcgagtcgcagcggagcacttacgaaaaagcgataaataaggcgatggattcggtgcgcgaaaataccgcgtcctgatcggattatgcaaactgcacaaacttccgtcccacgagaggcggaagttttctcacgaataaacacgaaaagccttgaaaaaatcacaaaataagtgtaaaatatattctgaaagattttttcttaaaaagggagataatatcatgacactcaaactcagtgataaatatataaagggcttcctctccgacgaggacctcaccggcatcgaacccgccgtaaagaccgctatgacggagatcaaggctaagaacggtcttggcagcgatttcctcggctgggtcgaccttcctgtcgactacgacaaggaagagttcgcgcgcatcaaggcggcggctgaaaagataaagaagacctgcgacattctcgtcgtcatcggcatcggcggctcctacctcggcgcacgcgccgctatcgagttcgtcaagagct

SEQ ID NO: 2028 - DNA, 7066 bp, Unknown
  16S sequences of unknown bacteria
cttggagaactggggagcgcggcgggcggccttcaggccgtactgcgcgagtttttgagctgtttttccttgatattccgggcttttccggctttctgcttctcagttatccgatgtgcggaccacaaaaattgtcccgattctttatgaatagctagacacctttattgtcagccttccgtatctttccgcagttcactttcaatctcatcaatcgaaggcaacgaacctttaaaattctccggtatcagttttgacaattcatatgctgacacgcccagaggctgactacttgcttccaatgcgtactgtgcttttatatcatccttggatttacacactaacaagccaagcgtcggttcatctttctctgtttttagctgatgattaactgccactacataggttcccagctggccagcataggatgattcaaattctgtgacctttacctcaactactacatagcaatgtaggcgaatatggtaaaacaacatatcaatgaagttctctgttgagccaatttcaattcgatattcccgtcccacaaaagcaaatccattgcccagttccaaaagaaacttctgaatattatccatcagtgcatccttcagttccttttcgttatagctttgggtcaaggtaatgaaatcaaacttatatggatcttttgtgatctcctgtgccaaatcgctctgcatggccggaagtgtcagattaaaatttgtgattgcctttccctgccgctcataaagatcggtatctaaaaaattcagcaatactgcgcgcgaccaattattttgaatcacttgatttacaaagaacaatgcttttttcggatttccattgcacttatcaataataatcttatgatgtccccacggaattgcaaaaagcggctcaatttcttcgcttctgaaatcttccccaacttggggaagatttgaaatttcgctatatagttctgcaaatttctgcatatatcgtaagtttgtctccgaaaatgactttacatccggcagttctctacgcagatcacgactgattgttttgtaaaagctctgtccataagagaacttatcttttctatcatgaagttcttttcctaactgccagtaaaatcgaagcatctcatcattcactttcaccgcagccttaatctggctttgatgaaagcgtttactcacttcggaaatccactctctatattgagcatccacttctactaatttatccatatccatccctcatatccgtaccagaatactgtgtgcggcaattcctgtttaaaacttgaaatgtcaaactggcatttcaaatatattatttatcctgtataaacgcctgattcactacatcaaaaagttcttcaggtttattgtactttacctttgcgtagatgtccatagttgttttgctgttttcatgtccggcaaggtattgtactgtctttggatcaacgcccgcatagagaagattggtgatgtaagtgtgccgtagctgatggggtgtcacatcgaagtccagcgtatatttgattttgggttgattcttctgggtcatacccagcgttggagtaaccgtatatttgatactctccccatttacatacttataatagttccggggcttagtggagcggacaacgacatactgccacactctttgaaactgcgaagcagccagtggctctcctttgctgtcagcgatcacataatctgatatggaattttctttcgcttctctcagacaatccaccaaacacttcggtatcggaatatccctttttgccgccggagtctttagcacggtagaaaccacgggtctgttatgctctgtacgccatgcccgcctcaccgatagataaggtgtatcctcgtccagaaatacacaatcccattgcagtgcaagaatttcttcccggcgcagaccggaatacaaaccgagcataataaacaaatatggaggaagccccttgactgtatccagaagcacggctacctgctgatctgtcaatgcctctctcttttttgatggttttccgcctttaccggatattcctgcacagggattgtgttcaagaatttggtttctctctgccgcataaaaaatgcacttgagcagcatattgaccttgttgtataagccttccgatttctttgacaatggaacaagagccagccgaatatcgtcagcagtcacttcttccatatacatctctcccagaggtttgatgatatagtttgtcatatccctcgtataacctctgagtgtagacgcagacacctttgccgactgcatcagcagccacttctcgccatactcggctactgtcgggtgctgccggtgaaagataatttcttccacctgcttccgggcctctaactgcttctcatacaattcttcacaagtagcggcatacaaactcaactctttgccatctgcatccgtaatcctggttctgtaatactggattcctttcaatgtaatggtcccgtacttcgggatctgtgttttcttttttgccatctttgatcgtcctttcttgataatgtgtagtctccgtatctacactctctttttatcagaaagcctcgatttaatcaaagatacggctgatgtaaaacaaagagcgagacatccttgcctcgctcctgctttacttcctattttattattactgtgctgcgtcccagcttgcaaacgcgcaactcattgatctgaccagctcatccggcctgttatacttaacctttgcatagatgtccatggtaatcttgctgctttcatggcctgccaggtattgaaccgttttgggatctaccgacgcatgaataaggttggtgatgtaagtatgccgcaactgatggggtgttacctcaaagtccaggctgtaaaccacttttccgttatgagcggccttttctcccaagacaggtgtgacagtatgctttactctttttccatcttcataccgataatagctccgttccttgaccgttctcgtaacaatatactgccacagtcgcttaaactgcgtataggacagcggttcgccatcccggtttgaaactacatattccgaagtcgaagtttcctttgctgctttcaagcactcggccaaacaaacagggagggggatatttctctccgcagccttggttttcaattcatccgaaatcaccggtctgttatgttcggtgtgccatgcccgtcttaccgtcagatatggagtatctgtatccagatataccgaatcccattgcagtgcaagaatttcttcccgccgtagccctgcatataaaccaatcatgacaaagacataaggcggcaaatctcggatagcatccaaaaggcgcgctgcctgttcatctgtcaaagcctgacgatcctcttgtggaacaccgccaccttttgttgtcagataaaccgtcgggttatggtcaatgatcctgctttccatcgctgcgcgaaagatagacttgtaaaggatcaccacagatttataaaccgatgcagatttcttggaaaccggaacaagggcaagctgaatatcatccaggctaacctcacccatccgtttatctcccaattccgctataatatgccgcctgacctttgaggtgtaatccgtcaaagtagtagctcgtacatgaaccgactgcatcagcagccacttttcacaatactctgcaactgtgggcgttttccgatgaaaagtggcattctcaatctgttccaatgcaagcgtttctttgttatatagttcttcaggtgtttttgcgtagagagctacgagctttccattcgcatctttgattctggtcctataatataggacacctcttttcataactgtgccatattgaggaagcattattttcctatttgccaattcctccacctcctaagaataatctccagcgctgtacctttgttttatcagacctctctgattccatcaaggatacggatcggctcacgatcttccgcttcgaggcttacggtaagttgtgcttctctcaactggctttgctctatgcgtacatttggcgatatactcctggagacctgccgcagtaaaatacacacagccattctgaacatactgcacataagagatcaagccgttgttacgggcggcatccagcgttgctatgctgattcctaagatttcagcagcttcttttcgtgtaatgagtttttccatagaccatattccctccaatctgtcaaggttatcatcttgctttcaaaaccacatgaatacgctggcagccgaaactgccagcgcatggtatctgattttgaatagaaaacgaccaactaagaaagtaatcgcttcctattttaatatgactcaattctcgccatatttgccacgcaaccctgacgatgggaacatagcaggtctccgctggcgcggttgtcataactccgcagcgtcgttttactcgtgcgccgcagggttccccccaagtctttaggaggccgtgaggaagtatctttaagcccccatgcagtcatcgcgccccgaaatgccgctttcgggtttcaggcttgcgtagattgctcagaacagtcttgttcatcacctcctggactgtcatcttcgcggcgcgcctgattcgctcgtacatgggttatgtaccggaaatgccgtctattcagttgtcaagctgcatgagggagatagaccctctcacttacttccccgttgggagagcagtttagcaaccgattttagaaaaattcttcaaaaatttttctcagcttcaacagtagaacccgttttctcttattgaccgcctgatgcgaaatgtgcaatatattcccgacttcctgttctgtcttttcttgatagaaaagcaggaaaatcagttcttgttcgtcttcgtttaattgagccaaacaaaagcgtatctgttccgcttccagatgttccaatgcaagctgttctacgttttttccgggcgcagcaaactgcctgtccttttccaacagacgctcataggaatcctctctgctgggcaggaaagatgcagtgtctttctggaacttttccgttttcagatcgtaggaaaagtattcttcttttcgctcgtagtgctgatacacgcggtaaatctgttcgcttaccggtacagcctgtccatctatataaagataataattcgctctttcttcacgatttttgctcacagccgttacctccaagagtttgaaaagtggatcgttttcgaactctcggaaggcggcgaacggcagcgtgggaataagggaaaaataatacggacacaggcacaggaatatcccatgtcggtgtccgttctgttttgtcgctttctaattgctactaatagttcccataaaggccataaaagactggcagggaagaagcgggaattttggggttctggcgtagttttacaaccaggttttcttcgttaagaggacctgccagaagcggacaggtcattattttcccacataatcatctcctcctaagcaaaaaaacaacgcatagtagctataaaaaagccactcttcaatcatttcgcataatacttttaccccgtaaaatataattatgtgaggtgacggagagtgaacaaaaaaatgcgacatatagatttttcgtttggggcatccttacggaatgccagggaaaagcgaaactacaggagagaacagattgcggaacgtgcagaaatcagtcctcgttttttggcggccatagaaagcggccggcgaaagcctagcttggatgtcctgattcgtcttgtcaatgccatcggcgcttcgtttgacgaaatccttgcgccgcagatgatcacagacagcgaaatcgttgatcggattaggcgcttggtcccacaatgcagtcagcgagatcaggagctgttgctcgccctgattgataaaatgctggatacaaaagagaagaaagataacaaataatgcggtcgggtgtattgcccagccgcattatctgtccgttgctatacgggcaaactgtttttccttttgagaggaatagtaatccctgagtttctcaaaggcttctatactgatagtatgttccatatggcaagcatcggcctccgctgtcttaggattaacgcctgcggttattaactgctccatgaagaattaatggcactcatagattttttcgggcaccccgcagccaatatctgctagatgtaggtatgctcctttgcatactgatacaaaactactttaaagaaaaacaatattgacagcattcttccataaactccggatcatgtgtgataacaatcacggtttttccgcggctggcagcggctttcaatgcatcggatattctcctcatgtttgcgccatccaatccacttgtaggttcatccaacaagagtatctcacgctccgaaaatatagcgcaggcaacggcaagtctctgtttctgtccccctgacagggctgccggatgtacatcccgatactcgtacagattcatgttctttaacaactgccttgccctttccattcgctcctctgacaacggttgattcaagagcagctcttctgaaacacttgcggtaaagaactgtgttgtcgtgtcattgccgcagtagtatactttttttcgccttctagacagatgatttttactcccacaaacgatgatgtcaccgccgctcttcttagagagacctgcaagcactaaagccagagtgctttttccggcgccatttcgcccggtgacagcagtgatagaaccttgggggaaagctcctgaaagatttgtaaacacctctatttctccgcattttttacacaggtcgtgcataatcagcgacccacgctcgaaaagtttcggaagtggtagcggttcgcgtgtttgtacacggtgcatcgtccgaagccccttgttgcgccgttccatttccggcatagctgtgaactccttgggagtgtattcgcgtacaatcctccctttttccatatatataatccgatcagcaagctcagaaagccatgagagacggtgctctgcgatcactaacgtgtagccctgggc

SEQ ID NO: 2029 - DNA, 2315 bp, Unknown
  16S sequences of unknown bacteria
gcgaaagtcttaaaaataaatttgagaggggcaatgagatgctacattatgaaagaatcaagcaggtagaccaagagatctacaaggtgtttgaacaagaactcaatcgccagcagacacacctagagttgattgcaagcgaaaactttgtggacgaagcggtattagaggcatccggttcgattttgaccaacaagtatgctgaggggtatccgggccggcgttactatggcggatgcgaatttgtggatattgcagagaaccttgccatcgagcgcgcaaagaagttgtttggtgcagagcatgtcaacgtacagccccacagtggttcccaagcgaacgcagcggtgtattttgcgatgctgcagccaggcgataccattttggggatgagcctggaccatggtgggcatttgacccatggcagcccggtaaacttctctggaaaaacataccattttgtttcctatggcgtatcgaaggacacgggctacatcgactatgaacaggtacgcgaacaggcgctcaaacataagccgaaaatgattgttgcaggttattctgcctatacgcgtattttggactttgaaaaattccgtcagatcgcagacgaggtaggcgcctatttgatggtggatatcgcccatattgctggtctggttgccactggtgtgcatcccagcccggtgccaatggcggattttgttacgaccaccacacacaaaacgctgcgcggccccaggggcggcatgatcatgtgcaaagagcaatatgcaaagcagatcgataaggcgatattccctggtacacagggcggcccgttgatgcatatcattgcggcaaaggcagttgcgtttgaattggcactgcagccggagtttaaaacttactgccagcagattgtcagcaatgcaaaagcgctggcagcggctttggtggagaatggcatccagctcgtatctggaggtaccgataaccacctgatgctcattgatcttagagggacgggaaagacaggcaaagtggcagaaacgctcttgcattcggccaacatcacgaccaacaaaaatgcaattccctttgatcctgaaaaaccgtttgtcacgagcggcatccgtatcggaacgcctgctgttacgacgaggggcatgaaagaagaggatatgaagaccattgctttgtgcattgccgaggtcatcaaacagggtgaacaagctgtgccgcaggtgaaggagaaggtactagcgctgtgtaaaaagtatcctttgtatcaggactaagcattcaaaaaagggtatgagatatgccctttttttattttgccgatcaagcgagtaaaagaacgaaaatcagtgcaaaataatgttgacaaaattcctaggatatgatattttcaaatcaatctagagtagattagtcggatttagggagggcgtaagtgaaaatttctaccaaagggagatacggcctcaaagccgtgatggaaatcgccagacaagcagacaatgggcatgtttctatgcgcgatttatcacagacaacgggcatttcggcgtcttatcttgagcaattgtttaaaaagctaagagcagccggtgttttgcgctccgtgcgcggcgcacaggggggctatgcgctggcaaagtctacacgcgaaattacggccggcgaagtgctccgggctttggaaggctcgatggcacccaccgtatgtgcacaaaaggaatatgcgggatgcgtaggccgtgaattctgcattgagtcgtacctataccagcgcatccgggaaagtatagacaatgtgatagatgccatcacattggcggagatgctggagatagaaaagcagcaatcgttacagcgccccaaacatctttgcggcgctcgggagggaatatgatggaacagaagcacatttatatggactatgcggcaacaacctatgtgaagccggaagtattggcggaaatgaccccgtattttactgagtattttggcaacccatccagcgtacacagctatgcaagggaaaccaagaaggcaatggatcatgccagggagcagattgcggaggccattggcgcgatgcctagtgagatattctttacctctggggccacggaaagcgacaactgggccatcaaaggcatggcgtatgcgcatcaaaagaaagggaagcatatcgtcacgacaaaaatagagcatcatgctgtgcttcatgcctgcgagacgttggaaaaagagggttttcgcgttacctatttggatgtggacgaatatggcctcgtaacgccggaacaagtgaaacaagtgat

SEQ ID NO: 2030 - DNA, 32759 bp, Unknown
  16S sequences of unknown bacteria
tcaaaagaattttcgaagattttcaaagcactatttaattatcaaggttcatgttctatctcgttgcctcagcagcaactctgatatcttatcacactctgtcgtatcttgtcaacaacttttttaacttttttcaaagctgtttgttgttatgtgattgactgcctgtgtgttaccagctgttctctcagccagctcgactatagtaccacctggaagtatatttgtcaacactattttcaacttttttattttacccggctcactacacgattcactggctcacgactcactttttcacttatccttcattcttatatctaaaaggtcgcaggcacaggctgtgacttcgtgccaccattttcaatatacaggaacgtctatatccatcagttctttttcatcttcgatctctacatatcgacatgtatgctgcttcagaacttttcgtccgccctgatctcctgtcagctgcagaagttctggaatcagggattcatggaacatgcagggattccccggaatcccatgacagcaaagtgataatgtctctggttggtctttttctgtttcgcagtctgaaccggtatccaacaccccggatgccttcataagacacctgacactttctttggaaagttccggctgatccgccaccataaacagaagatatgtcgcctgcttctgcatggcagctattcccgccttgatcgtatacgatgctcccatatggctctcttcacaaaaaacaacctgtacttcaggcagcttctgcacctcttccagaatctcaggatactgtgttacaacgatcacagataactgctctttcatttcttttttcaattccagcagcagatccagcccgtggcggtacatggtcttccccttccatgggaacaacagcttattacttccaaaacggcggctgttaccagccgccatataaattacctgtatcatttaatcctttaccctgtgatcagtttctttccagtccggatccagcattcccataaggatcttctccggagtgaacggtactgttctgtgccacacaccggttgcacgataaattgcatgtgccagtgccggtgccggtgtattgataacgatctcaccgattgattttacaccaaacggacccgatggctcataactggtctcgaattccacatgaatatttcctacatcctgtctggtcgggatcttatactgcataaaatcgccttctgtgatcttaccattggcattgtaagtaacattttcgtagagtgccataccgattccctgaccaatgccaccctctgtctgtactcttgccagattgggattgaccggaattccgcagtcaaccactgcatcataatccaggatcttcacacttccggtctctttatccagctcgatctctgccatgccgaccatatagggaggcggagatactggcgatgaataagttgccgtcacatccaccgggattctgttgttcacctgcgatttcactgcaatatctgcaaggctgacagattggtctccatccaccaggtataccttttctccgtcaaattctacttcatccaatgtacagcctaatagttccgctccgatcttcatcatattttcacgaagttccattgcagcattctgtgttgccataccggtaacatacgtggtagaagatgcataagatcctgaatcatacggggatgcatccgtatccgcaccaaagactacgatctgatccggttcgcaatccagcacttctgccgccatctgtgctaggatcgtatcacatccagttcccatatctgcggcaccgatcagcatattatatgttccatcatcagaaagcttcagagtgcaggaacccacatccacattagagatgcaagaaccctgcatggcgattgccatacctgcagtgcgcacttttccatttcccatatcacgcaccggatatttttctttccagtgaaaatgatctgcacagtgtgtaatacaccggtcaagtgcacaggcattcgccgtctctccaaaataagccggcatgaacatgccctcccggacaatatttttcatccgaagctccaccggatcgatcttaagcttttcagccagttcattgactgcagactccagggcaaagattccctgtgttgcgccatatccacgataagcacctgctgcctgcacattagtataaaccacatcacaggaaaaccgggttgcctcgcatccgcctgtgtagagcggaattgctttatgtccggaaagtcccactgtcgttgttccatgttctccataagcacctgtattggataacgtatacagatcgattgcccggatccttccatctttcattgcacccagacgcacagttacctccatctcatgacggggagacgcaatggtctggcactctcttctgctgtaaataatcttactgggccgctttgtcatccatgtgacaaaagcaggatatacttcacacactgctgtctgcttggctccaaatccaccgccgatccgaggcttttctgcacggaccatggatttggagattccaagagcattggcaagaatacgtctgatatgaaatacgatctgtgtggaactgatacaatgaagtcttccgtaccgatcgatctcacaataagcacggattgtctccatatacccctgctgagcagctttaattctccagctatgctcaataacttcttcacaatctgcaagtaccgcttccacatctccatgagcatcttcttcatgatgcagaagattgcgtttcacatctcccgtatttccatgggacatccagttatcttccggatgaaccagcaccgggttatccagtgctttgcggaaatcaagcaccggctccagcacctgatatttcactttaatgacacgcaatgctttgtccactgctttttctgtctcacctgctacaatcgcaaccgcatctcctacacttcggactctttgatcaagaatcagacgatcatagggagatggctccggaaaagtctgtccggcaatagagaatctcctctgaggcacatccttccatgtatagacagcaacaatccctggcaccttcatagcagccgccgtattgatctcttcgataatcgcatgcgcatgagggctgcgcagcagttttactatgagacaatccttcggaataatgtcatccataaatacaggttttccaagcagaagctgatcagaatctttctttggaatgcactttcccactgcatggtactcttttctgtcacgtttaaattccttcatgcttccactcctttccaacatcctctccatagacatttgcttccagatccatagttgccccttcctttttactgttcaggtaatttcgaagagaacgaagctggctctggtatccggtacagcggcaaagattacctgacagatattccaggatctcctcatctgtcggatccggattttctctgagcaatgccacaatattcacaatatatcccggattacagaaaccacattgatctgctccctgtgctgcaaaaaatctggtaaatgcctttgcctcttcctgcagaccttccagcgtatccactctgcgtccgttagcacgtccaaccggtgtactgcaggaaaggatcggctttccatcaagcagcactgtacaaagcccacagttgccggactcacatccgcgttttacagaatagcagttatgttttctgcaaaaatccagaagaaccatatctgtatctacggaatctgttattattttcccgttcaatgttatctttacatccatcagatctgttctcctttccatgtttccagtgctctcttcacaagtacccgacagactgccttacggtaggctgcgccggatctcacattgctgccaaaccggatctcttctgatacctgttctgcaaacttactgattgattcatccgtaagctctgtgagcacgccttgtcgatccagtaccacttccgccagatgaggagttgcccccaccactgctgcgtatccgtctgctctctttgcaactgcgcaggtcagcaccggaaaatcggtggactggtttctctggctgagatacaccaccttttccacggtctttggcacgatcacagccacaagaatatctctggtctttctcggaagtctgacaaactcatccagatccatgattcctgcatgatgcagttctacctttgcccccagtgcacggaaaatagtcatcacatcggagaaaccaaaacgtccccagaggctgccgccaactgttgccacatttcgaaattgtactcccacaatatgacgtactgactcccgaaatgcaccttccgtataagcattcaggcgttcattggtctccagttcccgcagagacacatatgccccgatccgaaactccgtctctgtctcatccacctgatccagaccaagtgcacacagatcgatggctgttcccattgtccggtttctcattttctgccagagcattccggccagaataaaattgttttttttctgatacagagtatatgcctcgtcaaggctctctgcccttacatactgattataataaagcatggcttcctttctatctatcttcttattgtagtctcagaacatcagaagttcatacattgcttcccaatgaagcttctgctgctccataaagttcatgatggtatctttttctgaaagctctgtcttccaggccagtccacagcctgccgagatctcagacggaagagggatcagtcttcccgaaatctctgctttctctgcccgctgttccatctccatagctgcggtggttgtagcaaatgtcaccaccagctgcagatatttccttctcattctacgggctcacgatcagagaagctttggacatggtctcagcgatctcatacatattcgtcacttctccaactttcagcttttcagataatccgtaaaaattcagacatgtaccacaggtcaggatctttacaccccgatgttccagctctttgagatcatcaagagatgcagatccttcacaggtcagataggcacctccattgtaaaagagtatggtcttcggaagctcttcctgctgcgacaatgcataaataaaccctttgatcagcacttttccaagctccggatcaccttctcccataacgttactgcggattaccaccactttatcagatgccgctgtgggtctgcagtcacagatgtccgcctgtattttttctgttttttccgcttccgtaaccatgatctgtacgctgtattttccttcttccagcttctgatccttcacctgatatcccatctgtccggccatctttttcaggttttccacagcgatctcattatccacaagcgtttccaccacttcagatccttttatcgtctccatggctttcctagtttttacaacaggtatgggacaagcatccccgattgcattgactgtgatcatcttataccctcctatttcacataaatatctttttctttttttgatatcagtcttcccacaatagctgccggaagtcctgcttcttttaattccttcatgaattctcccgcctgatctcctctcactgcaaacagcagtcccccggaggtctgcggatcaaataacaactcttccatcgaaaatggtatcttcgaagcgaattccacccgttccttcacatggttccgattgcgttgggctgcagctgtcagaagaaattcttctgcacaatggattgctcctttgatcaccggaatcgagatagaatcaatctccgccgatatctgttcattgatcatctcacttaaatgtcccaggaagccaaatcctgtcacatctgtgcaagcatggatctcataatgatgactgatttccgctgcttttctgttcaggagagtcatagaagcgattgcttccttcatagcaccttccggtgccagatttacccggttggcattgcacaccagaccaacccctaatttttttgtcaggatcagcatatctgacggctgcccttgattattcccataaatatggtccggatgcaccacacctgtcacggaaagtccatatttcacatccgcatccataatcgagtgtcctcctgccagcatgcctcctgcttctattactttttctgctccaccctgcaggatctttccaagaatattaagatccatcttttccggaaaacagacaatattcaatgcggtctttactacaccgcccatggcataaatatcgctgagcgcattagctgccgcaatctgtccgaacaaatacggatcatccagcatgggtgggaaaaaatccagtgtctgtaccactgctgtatcatctgagattcgatagaccgccgcatcatctttactgtcatatccgatcagaagatcaggatctttttctccttttggaatctttgaaagcacatggctcaaaagatccggtccaagcttggcagtacagccgcctcccctgcaaaatgtgatttcttctgtcattctctctccttatacctgtacttcttctgcgattctgcggaccgcttcgactgccgcagatacctcttcttctgtattataataagaaaaactgaatcttaccatcccctgtttttccgtatgaaaatatgcatgcatcagcggtgcacagtgtgctcctgctctggttataattccatattcctcctgcagccagtcactgatctgggacgaatcctcatttccaatgttcagtgctacaatagggcatcgaacattttcttccaaaaaatttccgtagattttcactcctgggatctgtctgaccgcttcataaaaaagtgtcatcaaccggtgttctttttcatagatctgccgctgtccgatccgctctatctcctgtactgctgccagaagtcctgcaattccatgtccgttaagcgttccggcttccagatgttccggatattcttccggctgctttttcagaaaactgtacactccggttccgccacttttccatggttgaacagaaatgccttgtcttacatacagtcctccggttccctgcggtcccatcaggctcttatgtcctgtaaaacaaagtacatcgatctgcatcttctctacatctatgtccagcactcctgccgtctgtgatgcatccaccaccagcagcaatccataggcttttgcaagctttcccatccgtttcagatctgttacatttccagtcagattagacgcatgtgtgcagacaattgcttttgtttccggacggatcgctttttcaattttcgaaaaatccaccgtgccattccttccgcttactgcaacagtcaatgcaacaccttcttcctgctgcgcatacaaaggccgcagaacggaattgtgctccagttcggtggtgatcacatggtctcccggaacaaacagaccatgaatcgccagattgagactttctgtagaatttccggtaaaaataagtcgggaaggatctgttccgccaaacagcctggtcagatgaaccctcgcatcataaatgatccttgatgcctgaagtgctgcacttccagctcccctgccagaattacccatactgcccatggcagcaacaaccgcctctgcgactgcttccggtttctgcatcgttgttgctgcattatccagataaatcataccgttcccctgttctatatttcttccaataatacaacaatggttccgccacagaccataccttcttcttccgcattgtctgtgctcatccgtatctgcctcttttcacaagccgcatgagggatcttctcccgcagcttataaaaatgttctctgcagactgtgatcacttcagcctctgcacagcctccgccgatggttcccgtaatctggttcatggaagtcaccaccatctgcgtacctgcgcttcgaggtgcgcttccatgtttttctatgatcgtacatagcattctctgctctcccggctccggcgttcggcttaatatctccagcacctgttcatccagtgcggtctcctttgactgctcacttctcacctttacaatctcactgatcacagacaatgcgatctctgccggagtctgtgctccgatggacaatccgatgggtgcatggagcgattctgccagttcttccgaaaaaccttcctgcaccaaatcctttttcatcagaaacgaccgttttctggaacccatcatgcccacataagcatgcggctttttcagaatctccagcaggcagtctctgtcaaaccgatgacctctggtcatgcagacaaaataattgtcactgctgtccggaatctgctgcagcagttctctgtaatctccacagaatacctgatccgcgccctctcttttggcagtctctgcaaacagcggccgatcttccaatactgtgatctcaaaatccagaagtccagccatcttaaccaatgcctgtgacacatgtccgcctccgcagataataagctttgactgatttcccagtggttgaagaaatacttcctgaccgttgatcttcatgagcccttttccctgcaggtttttttcattttcccctgtaaaaaaagttcccttctgtatctggatcgtaccatcttccacatatgctttttcccctgcagctgctccctctgtcaccgtggcaagcaatgcattcttagaccggtcccgatctcttacacaggcatatatctgttccatcttatccatttacatatctgcagaccgcttccagcacacttcctccgatactgctggctttatccgaaatcgtaaaacaattggcaagctcgccttctcttggatcaatgtctgcgatcttaaatcctttctgaaaatgatatccctcacgaatcagtccccggagcactcccggaattgtcgcctctaccgatacaaatcttccggaaaatacaccctccggagacatctgttcatagattcttgcaatcttttccccttttcgcaccacatccccgatctgatgaaggttcttcatatatccttctgccgctgcatgaatgaccctctcttttgtgtagcctccaatattaccgggaattccagtatttgcaagcgcagatccagtctccagaatccgtgccagattatgtccacgcatggattccaccaccagatgcacatcttctccagccacaaatcccggtccgatcccaatgaccagcggtgccatctctttatatgtccccagattcttcttggcaatgatcgcatccaccacgacatccggctttaagacttctattgatcgtccatccggatccaccagaagcggtatacgtcctctttgaagcacttcttccaccgcctgctttttggctgtgtagattctctcagcagtgactccttccacggttgccgttccctcatagacagcttcgcagaaagagacctgtcgtcggatcgctgccggttctgctgtctccaggatcagcacctgataccccgcccgaaatagacgatgtacgattccagtcgccaggtctcctccgccacggcagataataagtatctctttattcatatagcctctttcattcctccagtgtgtgaaacataagtccctgatctgtcttttcagacagcagaacatgaaaatgcccctggtaatccatgttcttcagcttttcctcatatgcctgccaaatccactgaagcatctgtttatctgctttcatatctccggagattccaagtgcagatgtcatatgttcaaaccgaaagaccacatccttacatggctttcccagatcccatgatccaagcaccagaatcacgtcggtcgtcccctcaggaatcaccggttcttgttctgacggatacttcagcgcataatgtttcgctccatctgcttctattaaagcataatccacctgcttcatcaagtcatgaagcatctgttccggcaatgattgcatttttgcagaattttccgggcagacagatcctgccatacagtatcctgtcttttttattttttccataatagcaaaagaatcgcaggagagatctgtatccggttccaccagcatatgggtagtggtactcaccagcacagacgcgcccttcctgcgatattcttctgccagtcgatggatcagggtggtcttgccacccgctccaatgactgcaatgattttatttttcatcttcaatatcccacattttacgaaccggactcgatcccttcggcaaaattatattcagaaggattgctgccagagaacacggtacgattccggatccgccaaaaatcagctgtatataatacggcagctgagcagttgctccactggttgcaccaagaccgtatccaagtccgatagccacagagatgatcgtgatctcacgacttccaattggctctttcgtgatcagctgaataccagagatcaggattgatgcaaacatcataactgccgcaccacccagcacggactgtggcatcacagacatgaccgcaccgatcttcggacagaatccacagagtatcaggaagatcgcacccatagagattgcaaaccggttcactaccttcgtcatggataccaggcctacattctgtgaaaaggaagtgttcggcagcacaccaaacagtgctgcaaaggaagaaccaagtccatcacagatcacgccgccggacagttcagaatctgttgcttcccgattcataccgccttcgatacaggccgagatatcgccaactgtctcaattgcagtgacaatgaacataattccaattggaatgatcgcatttgcctggaatacaatcttcatatcagccagtgcgccgaatccgataaaacttgggacagcgatccatgctgcatttttgatctgttcaaaattaacgacccaggaataggtatattctgctccatctgcattgattcctactgtaggaagaaccagcgtcatgatcacagccaccacatagcctgccagaataccaaacaaaatagctgcggaagaaagtacactgtcctgcggagcaaaatgcttcagtaaaataatcacgatcagaacaacgaatccaaggaacagattcggcaaagagccataatctgctttaccgcttccgccacagaaatagttgattcccactcccagaagagaaaggccgatagcaattaccaccgaaccggtcacaatagccggaaaaaatctacgaagcggtttcaggaacattccaagaacaccttcaaaaataccgcctacaatacaggctcccatgatcgcactgtaagcaaggataccaccgccgcaggcagcaaccgtattattcaggacgccaaggaaaccagacgatgttcccataacgatcggcactttacctcctaccggtccaatggaaaacatctgaaccagtgtcacaatacctgccatgatcatagcattctgtaaaagtgctgtgcgaagtgctccataaccggcatctgctgtcagtccgcagagtcccatcacgatgatcagcggagtcagatttccgataaacattgccattacatgctgcaatcccagcggaatcgcctgcgtaagcgggattcttccctcaaattcataaggagttgaaatttttttcataaaacaaagcctccaaaacttttgtatattgataatcaaaccgactaatattttacggatttccacttccctggtcaatcctgctattgtctattttttctactgaatttttattagctacacttatatattgtagtaattcatcacttatgctacaatcgtcatgaactatggaaactgtatcttaaaggaataactattttatgaataaacgtaattaccaaaaggagctggatcaggtgcttgatcagctctgtacagataaagaagaaatcgcgcctacattgctgctccatagctgctgcgccccttgcagcagttatgtactggaatacctgtccaggtatttcagaatcacagttctttattacaatcctaatatttatccggagagtgaatatcacaaccgggtacaggaacagatgcgactgatccgggaacttcccacccgttatccagtgaattttctggagggtgattatattccagccgatttttatcactgtgcaaaagggatggaagagatcccagagggcggcaaacggtgctttgcctgctaccgcctcagacttgcagaagcagtccgcacggcaaaagaaaagggctgtgactatgttgccacaaccctgtcaatcagtccgctgaagaatgcggaaaaactcaatgaaatcggggaagaattagcagaacagtacggtgttcgctggcttcccaatgattttaaaaaacgtaacggctacaaacgttccacagaattgtccaaagagtacgatctataccgtcaggactattgtggatgcatcttctcctatcgggagcgtcacccggaagcatccgtttaagtaactttcatcttatctggctggaaccacttccagccctgcatatctgcaggcaccggtgctgtaaagtaaacctcgtctccactgaccggatgagtaaatgcaagtctccaggaatggagcaattgtctttcttcccgaagcgcatgcgggttatacaaaaaatccccaaccagcggatgtccaattgcttgcatatgcacccggatctgatgggttctgcctgtctccagctgacattttaccagtgtctgatccgttcttgcttccagcacttcgtaatgggtcactgcccgttctccgtgtgttttgtcaacgcagcgctcaatgacggattcggattttcgcccgatgggcagatcaatggttccactctctgtcagttttcctgacactactgccagataggtacggtggatcttccgccccttcatctgctcatagaggattgccgaactgtatacattttttgcaagaattaaaagtcctgtggttccgccatccagccgatttacacaccggaatggaaaataatcattcctctgccggcacaaccagctcaccccattagccagagtattttcaaaatgattaacagacggatgcaccggcagattgcccggcttgttgatgaccatcagatcttcatcttcatatataatagaaaattcctgccggaccggcacaatggtactggtatcctgctcttgcggcaatgtcagttccaccacgtctcctgcctgcagcggatctctgaaataaggtttctctccattgttcaaaaggctgccctcatgattctttatcacagacagaacctgcttggaacagcccttttctcttaaccagtcaatgagtcgttttccttcctgggacttatccaccgtccaggtcaaatgacgttccattaatccacaagtaccttctcaatttccaccacatacatggtgtgataatccttttgcggataccatttcgtatcacactctttatcaataaatcccgccggatccagtggctgcgcaaacagctttctacataccatgactgtgtttgcctcttcaaaatacggagttacaccttcatgttctacatgaagtcctgatttactgatcttatcctcatcccgacctgatacggttcccagataagacaatgtctttctgtgctcctcacccagaatggacagggagaacgtatctgtcccatcaataaattccttggtatatctctgcggtctaatgaacacataggccaccggttttccccacatgatgccaacaccgccccaggaagccgtcatggtattgacttttccatccttttcagcagttaccagcatccattccttcccgatcatatgaaatggattctttgtaagctcttctggtttgatctcttttttcatgtttgtctctcctctcgtatgatcagcggatacgctccgggaaacctacttttttctgtaccttacgcagtgtcttattggctacatatccggccttttccgcattttccttgatgatccggtcaatgtaatctttgttcttctccagatctgcgaaacggtcctgtaatggtttcagaacactgacaacagactcaccgactgccagtttgaagtcaccataaccttttccatcaaattctttgacaacttcttccggagtcttgcccgtacatgcactgtaaatatcgatcaggttacggatacccggctgttcttcccggtacagaatctgcccttcagaatcagtcactgctcgtttgcatttacggataatggtatccggatcatccatcagatagatcgatgcgttcggattctcatctgacttggacatctttcgactcggatcctgaaggctcatgatcttggctcctactttaccgatatatgcctccggaatcgtaaatacatctccatagataccattaaaacgctgtgcaatatctctggtcagctccagatgctgcatctgatcaataccgaccggaaccacatccgcctggtacaacagaatatcagcagccatcagtactggatatgtaaagagacctgcgttgatattgtctgcatgttttgcagacttatctttaaactgcgtcatacggttcagctctcccatataggtaaagcagttcaggatccatgccagctctgcgtgaccggatacatgggactggtaatacagacagttcttctccgggtcaatacctgccgcaatgtagatcatcagcagtgtccgggcacgtttccgaagagttgccggatcctgtctgaccgtgatggaatgcatatccaccacactgtagaagcactcatactcgtcacagagtcccacccagtttttcagtgctccaagataatttccaagagtcagatttcctgttgcctgcatgccgctgaacagcactttctttccatttaacataatttcatatctccttctatttcacaactgtgtatttgtaaattcatcagatagccagtaatctgcaggcaatctgaaaatatacgatcagactgcatgcatctacgatggttgagatcaacggagccgccatgatcgccggatccagatgaaggatctgtgccaggatcggcaatgtacatccaatggtcttcgccagaataatggtcacgaccagactcaccacaaccgtgatacacaccatcgtctctcccggatattgaaccatcagccttataaaattcagtgatgccaggataatgccaaccaccactgccacgcggatctctttccagacaattttcagaatatctttcggctccacatctccgatcgtcatggcacggatcaccgtagtactggactgacttcctgcatttcctcccgtacctgtcagcataggtacaaagcttacaagcagcggtaatgctgcaaatgcagtctcataatgggtcagaatacttcctgtgatcatggaactgagcatcagtaccgtcagccagacgatccggttcctcgccagttcaaggatacctgtcttcagataaggcttgtcactgggaagcatagctgccatcttctcaatatcctcggtagcctcctcttccatgacatccaccacgtcatcgactgtaacgattcctaccagacgatcctcgtgatccactaccggcagacacatcaggtcatacttgttgaacagatccacaacttcttcctgatcttctgtagtcaccgccttgatcacattttcatccataatgtcctgaatcttcatatcataaggattcatcagaagatccttgatcgtcaccacgccttccagccttcgctgggcgtccgtgacaaaacaggtataaatggtctccttatccacaccatgagcacgaatataggcaaaggcctgctccacattcatgtattttttcaggccgatatactctgccgtcataatacttccagcactgttttccgggtatttcaagaactggttgatcagtgatctggtctccgggcctgcggtacgcataactcgctttacaacggtagccggaagctcctcaagcatgtccacggcatcatccacgaacaggtcttcaatgatcttggcaagctccgcatctgtaatactgttaataatgtgttcctgcacatccggttccagaaatgcaaacacatctgccgccagctccttgggcagcatacggaataccatgaccttcggattatcctccagttctcccagaaattctgcaatatccgcttcattcatctcagaaagacgggcccgcagcagtcggaattttcgctcttgtatatattgcatcaattcttctgcatcatattgttccatagatcccatcctctcattcagaaaagaaagagccgaacacgaattccggctcttttattcttcattttatctatattatcaggctttgtcaacctaccaaaaagaccagacaatcctcatcggttctcgtctggtcttatcaatcatattctgttaaatcttcccctgctgacgcatctttcttctatggatcagccggtaccgtctgggtgttaccccgtaacgcatcttaaactgacgatgaaaataactctgattctcatagcccacattcaaggcaatttcttccaccggaaggttcgtctccagcaaaagcactgctgctttttcaaatctgcgcttcatcagaagttcctggaatgtacttccagtaccttccttgatcagcttactcagtgatggcaatgccagatggtagtcctcagcaatcttgccgagtcttgcagtccggtactggatctctatgtatttcagagtttcctgaatgatctcatccttataattctccacaggatcatgctcctcccggtccatctgttccgccagatataaaaagagcagccccatggtatattggctgatctcctcgctggctccgttgccttccataatggattctatcagattttccatgaggttttccagggcatgccgacctttgatatgaaagatcagatactgcggctttctagtattccgcctgagcatctccaccagaaaatccatgatcttattctgttttttcagcatctgaaatggcttttcaaaaaattccggtaccgcaatgatattgattccaatattctcttcaccggactccaccacacagtgctccacatactggttcatcacaagaaggtctccctcttccaggagcactttctcctcaccaaatctatgtgtaaatgtacccttatacgcatacatcagttcaatgtaaccatgtcggtgcagtggaacatttctttcattgtcatacagcctgaccgctgcactctgacgaccggttaaataatcccgtctgttgaccacctgaacaacatcttcatcctgtccatacttttcctgaatatactgacgctcttctatggcctgttcttgtaaagttctgattatctgctcatccacaatgatgtcacccccaagtctgttctgtgagacttttaatcagtataaacatatacggttgtagtataacaaaaaggccggtttcttttaaggttctcatttagtagaattactaacctaaatttcccataaattttagatttagagcagttgtacaaatacaatagcttcttctgatgattgatccgtattctcttatctgactgcacaattggatgcagttcccgtcaggatctcaagcccatgctccagagacggtaaaatgtactccaaagattcttttactgcttttggacttcccggaagattaatgatcaacgtatatttccggataccagcagctgcacggctcagcatagctctgggtgtgatcgtcatactgtatgcccggatagcttccggaatccccggcaccgcccgttctgtaatatccatggttgcctccggcatacaatccctgggtgaaaatcctgttcctcctgtagtcacgaggagttctgccaccccttcatctgcaatacgactcatttcctgtgccagcatttctctgtcatctggcaaaaggatcgtatgaaccacctgataaccattctcctccaggatcttccgaatcgtcggtccgcttacatcctcccgttctcctgcatagccagaatcactggctgtcaggatcgccgctctcaagggacgcttttcaaccgtgatctcatctccctccgagatcataccaccccttagaacctttgcaaaaatcccttctcttggcatgatacaatcacccataagccggaaaatctcacatccattgtggcattgcttgccaatctgcgtcacttccagcagcacctctccgcatgcaagccttgttcccaccggaagatgtctcagatcaattccctgaatgatcagattttcaccaaaagcaccttcatccaccggtgctcctttttttctgaattcttctattttctcataagagagcaggctgacctgtcgatgccattttccggcatgcgcatcatgttcaattccccagtcttcgatcaatctggcagaatgcacatttttcttctgcgttcctctctcttcgctgatattcacagccataatttttcccatgacctatgcctcctgtcagatctccatattgattcttatggtactccatctggcacttttaagcaactgatttccaaatttgacaggttttctgacgctgggtataataaaacaaaatacttgcaggagaatcaagcatgggtgaatttacacattttaatcagcatggagatgccattatggtagatataagtgaaaagaccgaaaccgcaagagaagccatcgctgaaggacgtatctccatgaatcaggaatgttttgatcaattaaaagcaggaagcataggaaaaggtgatgtgctgggtgtttccagaattgccggcatcatgggagcaaaaaagacttcggagctgatccctctctgccatcttctaaatctgacaaaaacagagatcgattttgagctggaagatgagacttgttctgtccgtaccatctgtacagtgcgaacaaccgggaagactggtgtggagatggaagctctgaccggagtacagattgctcttctgaccatctatgatatgtgtaaagcagttgataagggaatggaaatgaatggtatccacctttgtcagaaaagcggtgggaaaagcggtatttatataagaaaggcaaaacaagaagtatgaaagatcagttcggaagaaccatcgactatatgaggatctcgatcactgaccgatgcaatcttcgctgtcgctattgcatgccggaaaggatcgaatggcttccaaaggaagaattattgtctctggaagagattgcagaaatctgccggcttgcttcttctcttggtatccgcaagatcaaaataaccggaggcgagcctcttgtccgaaacggctgtgaccgtctgatcggtatgatcagtcagattccaggcattgatcaggtatcgctgacgaccaatggtatccttcttgccgactatgcagaaagcctccgccgccagggacttcacgctgtcaatgtcagcctggatgctcttgacccggatatctatgctcagatcaccggatatcacaagcttccacaggtactggacgggcttcatgccatggagcagcaacagattccaaccaagatcaatgtcgttctccaacgaggtgtcaatgagactgaatgccttgctctggcagagctggccagacaccatgcttttgatgtccgttttatcgagctgatgccgattggtcatggaaagcagctgacctgtgtctctaatacagaagtattccagaaattatctgatcattatggcacactacttccagacccagatacacacggaaatggtcccgcacgttactatactgtagaagggtttcagggaagcattggtttcatcagtgctattcatggaaaattctgtaatagctgcaaccggatccggctgactgctacaggcgatctcaagccctgcctgtgttatcaggaacgtatcttggtcaaagacgcactcagaagcggtgacacgaaagaagctcagaaattgctggctcaggctatttttcaaaaacctgccgcccattgctttgagactctttcctccatcactgaagacgccgaaatgtcacgcattggcggctgatacaatacaattatctcaataccatcacatccgcaggatccacatgcaaccacaggctctcctgtggatgttctttttcacaaaacgtcctccagaattcttttgttgtctccacacggatcctgttaaaatgatttctgctgctttcttccgactgctctgcatgctccggcatcaccatgatcaccgttgaaaatacatcatcgatcactttttcgatccgacaccgaaatgtattgtccggatgtgtcttcgcctcagtctcactgaccggatatatatagtgactccgcacacctacataatagatttctcctgccttcgtccctgtacaggtcagatactctccccagtctcttacatagaccgtttttttcacatccgcttctgcaagctgcgcccttgcaaaattcttacatccagacaacacagctgccgctttcgactctggcgcctcaaataactgtctgaccgagatgaccggactggaaatgccttgatccatcacacacgctttaccacagatgcgatagatctcatccctgctgtgcgacacaaacaatgccggacctgagaattgtcgcagcacctccagaagctcctgttccagattccacctgagatattcatccagtgccgaaaacggttcatccagcatcagtatgtccggctcagacaagaagatacgcaccagagcaactctctgctgctggccgcctgacagctgtgaaggccggtgcttctcaagcccggtcagttcaaatctggcaagcatttcccggacttttattctggcttttgttctgtccttttctccgaacagcagtccagccatcagattctgctccaccgtcatattcggaaacagggcataattctgaaacagcaatcccacatgacgttcctgtggacgaagatttattttattcttggaatcataaaataccttcccattcagttcaatatatccttcatccggcttttcgattcctgcaatgcaccggagtgtcatactcttaccacatcccgaagctcccagtatacctgtcacgccttctgatgcttcaaattgtgtcttcaacgtaaaatgattcagttttttacaaatatctacccgtaatgccatcgtttctacttcccacttgtcgatttaccagaagaacattcttttttctccagaagattgaccagcaaaagaacaactgccgagatcgccacatttaccagtacccatcgaaatgccaacgtatcattattagttctccacagttgatagacggttgttgagatcgtcgctgtctttcccggtgtgtaaccagctaccatactggttgctccatactctcccagtgcccgtgcaaatgccaggaccgcacctgccaggattccctgtctgcaggccggcatgcgaatgtgccagaaaatataagtattcgacaatccaagagtctgacctgcatatgccagagtctgatcaaagctttcaaaggctcctcgggcagtccggtacatcaacggaaatgcgacgatcgatgctgcaaagatgcctgcataccaggtcatcacaagctttgtatcaaagatctgaagaaaccaggctcccagcaatctacgcggccccaggatcatcagcagaaaatatccgacaaccgtaggtggaagaaccagcggaagagtcagcaccacatccagaattcccttcactgcaggcggaagctttgcaatataataagctgcaaagatccccgtaaaaaacacaaatatgctggaaaccaatgcgatccgaagagaattatataacgggaaccaatccataagcccctcctgctttctttattttacagctgtaaatccaacctctccaaacaccttcatgcagtcatctgtcttcagataatcaaggaaggcttctgctgcgtcctgattttcagaaatattcagaactgctgccggatagatcacctgcttgcacatggtatcatctgcctgagccaccacctgaagtcctgctgaatatgcatccgtggcatagataatacctgcatccgctgctgcttcagatacttgtgtggtaacctccttcacattggatccatatgtgatcttattctcctgttcaagctgatccagtattccaagattggtgaggatctcttctgaatactgtcctaccggtacgtcctcattgcccaatgccagaagagaaagcttgtcggttccaagatccgcaaagctctctatccctttcggatttccgtccggaacagccagtacaaccttattctccagcagatttatacgggttccttcaagcacataatcaagaccttctgtgttcacttccggatctgcatctttatccagctgattcatctgtttctgagctgcggatataaatacatcacagtctgcaccttcctgaatctgcgtcttcaaagttcctgaagaatcaaaattaaataccagtgtcacattcggcgccacttctttatacatttcctgaatctcggtcaatgtctctgtcatggatgctgctgcaaatacatttaaagtcacctctgctgcctcagcattttccttcgtctctgttgcttgagatgttccgcatccagccaaagacaaaaccatggagcacatagttacacacgcaaatacttttctcaatttcatcattctggtcctcatctttcattataaacagtttccaaacccacagttcggataatggcagggcttacacccaagacaaaatccgccatttcccatgtgtgacagctgctttttcgtcacttccactcctgcagcaacgctgggcagaaccagatcaaacacggttgctttcgcatacatcacacagcccggcaatcccatcactggtgttccatcctcaaaataagccagcaaaaacatggcacccggcagaaccggcgccccataagacacgatccttgctcctgtatttttgattgctcccggtgtcctgtcatccggatctacactcataccaccagtacagaggatcatatccgccccgtcctctttcagctttaagatagcctcggtgatcttgtccatattatcatcacacagaatatgtccgcagacttcgatcccatatgctgacagtttctccacgatcactggtgtaaatgtatcttcaatccttccataatagacctcattgcctgttgtaacaatacctgctttcatagatctgaacggagtcagagacaccagcggctctgttcctgccacagttctgacctgctccatcttatctttcgcaataacaagcggaatcacacgggttcccagaagccggtcgccttttttcacagctgtatgtgaatgtctggtggcgatcatgatctcatcgatctcgttgatcgcatccagacgcgctacatccacccgaaacaatccatcgcagtcagcaatcagctcgatcttcccttcttttacttctgttggatgcatgtttgcattttcacatatctcacagagaatctgtgctgcttcattttcatgaagcatgctctcatccttctcccagacatagagatgatcctttcccagcgacaacagcaccggaatatctttctctgtaacaatatgccccttccgaaatgcggtatcctttgtcacgtccttcacaattcttgtaatatcatgacaaagaacatgtcccacggcatcaactgtgtttatacatttcatattgcttctcctcttcttttgcgctgtcatatctgtctcctagtttatcatagctattgtaaactttcactctttttttccgtacttgctttttcggacatatgccactacaataagattacagggattttgatcccaacagttgttacaccaaaattctatgatttcagaggagattttccatgatcgcacttcagattgccgatatccggcatttcatgaaaaaattactattaagtgaatcctttgaccggttccttcttctggaaggaagtattactactttttgtacctttcatatggatgggcagcttcagaaagcttattataccggcgaagagcaggaacagatcgatgaccgttcgctggcttactgggaggaaatccgtcccttctgttttgagctgatcaaaggaaaacgaacccctttggcatttcgttttaccttccagctgtctacttccaatacagaaaagctgctccatcagaccggtgtagccatcccgcctgagcagatccgcggcctgctgctgaatatccgctacgatggaaggacactccaatgcaccaccggaacctcactcaccgtgttcaccatggataaaaccctcgaccaggcctgggacagcatgattcaaaaattcctccatcagcaggaaatcccattcgagctgatgtaaaaattcgaagaaccgtacatgagaacgagcagcggaatcatatgagctcgtatgcagtgaataagaacagccatgcatgatttatacgccttattcggacataaatgtccgcctaattcgtacaaatcatgcatggctgtcttcttcaatgtatacagcgcagcatattgattccactgcccgttctcatgtacggctgttcaaatatatcagttcagatttactttgtcagcagcatcataatctcattgctgcggttcacgaacttggtcattgcttccggtgaaagcggctgatggctgatcattgccagatcgtagagctgctcacagatcatattgctgtgctctccttccggattctcgaacaggtattttaccagtgcattattggcattgagtaccagtgtagtcgtggttccgaacatagacggatccattccgtacatattatacatcttcatcatatcctgcatccggcgattttcttcggaaagtgtgaccatagaagaaacatttacattcttcagcttctctaccttaacctccagcttgtcattgttcaatgcttttctgaacagggctgtcagtgcatcggtctcacccttcagttcttcttcagatacctcttccttcatggaatctgttacatctgcatcaatacgctggaatttaaccttctcattcttagcttccagatggctgataaacggattatcaatgttatccttcagaacaactgcgttcatcttctgctcacggaacatattgatatactggctctgctgtaccacgtcggtcacatagtagatcgttgtcttcggagctttcttctcttcaccgtcggccttttcatctgccttctcttccgtcttttcttctgccttgtcagtttctgcttctccgtcagccggtttctgtgcttccaggtactcgttcatagtagtatatttaccatccagatccttgaacagtacatactccatcatacgttcacagaacttctcgtccttgatgcagccaaatttgatgaacggactgatatcatcccagtatttctcataattctcacggtcagtcttgcacataccgcttaatttgtctgctactttcttggtgatgtaatcagagattttctttacaaatccatcattctgcaatgcacttctggatacattcagtggaagatccggacagtcaatgacacctttgagcagcatcaggaactccggaattacttccttgatattgtcagcaataaacacctgattgttataaagcttgatcgttccttcaatagactcatactccatattgatcttcgggaagtacaggatacctttcaggttaaacggatagtccatattcagatgaatccagaacagaggctccttgtaatccataaatactttccggtaaaattctttataatcttcgtcactgcactcgttcggatgttttgtccacagcggatgcggatcacttaaagataccggtctcttgttgatctttacctgctccttggccggagagatttctttggtctccttggttccgtcctcattctcaatctcttccgtcttggcatccacatggatatgctcaacaactacatcatcctctgtcagttcactctcatcgatggtctcatactcctgcggtgcattttccttggcaaggaaaatctccactggcatgaaagaacaatacttactgatgacttcgcgggcgcggtattcattagcaaattccagactgtcctcgttcaggaacagggtaatctctgtacctacttctgtccgcttaccggtctccatggaatactcagttccaccgtcacactcccagtgtaccggttcagctccctctttataggaaagcgtatcaatatgaacctcatctgctaccataaatgcagaatagaatcccagaccaaaatgtccgatgatctgatcctcgttcgtcttatccttatactgtgcaaggaaatcggttgcgccggaaaatgcgatctgattgatatattcttcaacctcatctgccgtcataccaagaccgttatcaataaatttcaaagtcttttcatccggattcacaagtacctgtacctgggctttatatttctcaggcagagtgtactctcccatcatatccagcttcttcagctttgtgattgcatcacatccgttggagatcagctcacggaagaaaatatcatggtctgaatacaaccatttcttaataatcgggaaaatattgtcactgttaatggaaagtgatccatgtctttcgctcatgctatacactgcctttctttctcaaaatacagccattcaccttacaaatgactgttctatctatgcgttaacagtactataatcccaacttatgtaaatgtcaagaaaattttagcactcattgtgagtgagtgctaataatttacaatatttttataattactgtccccagcgcagatcctggtctttcatgctgactttggtatctgcaggaatcgaactggtgataaacacgttactgccgatgacggaattctttccgacaacggtttcaccaccaagaatggatgccccggaataaatcgtcacatcatcctcaatggtcggatgacgccgaacatcccgcagcttctgtcctcctcttgtggacagtgcaccaagagtcacaccctgataaatttttacacgatcaccgatgaccgttgtctctccaactaccacaccagtaccatggtcgataaagaaatattttccaatggttgctcccggatggatgtcaatacctgtgatgctatgggcatattcggtcatgatacgcgggatcagcggcacttccagcaggaacagctcatgagccagacgattgacggtaatcgcaaacatacccggataagacaggatgatctcatctctgtattttgcagccgggtctccctgaaaagctgcctccagatcggtctccagcatagcacggacatctggaatcttcttcaggaacgtaaccgtatctttttctgcctgttcggttaatttttctacatcattttcttcttttgctgtgtatttcaatgccagcaggatctgtttattcagatgataagccacatcttcgatcgtcactgtagaattgcttttaatgttatatattttataagagcgatctctgtaatatcctggatagacgatctttaacagatcctccacaatagcgataatttcctctttgcttggctggttgaaaagatccattttatcaatgtttcttccagttccataatcatccagaatgctttttgtaatctgactgatttcatgttcaataatgtttttcataacagcctcctgttgttcttttttttagtatatgaatcagcgcctgcggctgcttactcttttttctgtgtctgcagcttttgttcttccagtcggtcaaggacccactcccggatcagctggtaaataaatgcaaataccggtaccccaatgaccattccaacgattccaaatactccgccgaataacaaaatcgcaaacaatacccagaaactgctcaaattcgtagtgtttccaaggatcttcggtccaagaatatttccgtcaaactgctgaaggataataacaaaaataacaaaatacacacattggatcgggctgaccatcagaatcaggatcgcactggggattgctccgataaacggtccgaagaaaggaatgatattcgtcactcctatcaccacactgatcagtaccgcataaggcatattggtacaggctgtgaacaccatacagatcaagccaatgatcagggaatccagaagctttcctttaataaatccacccagatatacattcagaatatgaagttcccggatcatccagtctgccctctgttctactggctttccgttctttttaggcggatactccttatatggaagcaatgcgtgaatcaccagctttgtctgtctgcggaatatctttcgactatttaataaatacaccgctacgatcagaccaataccaagatttttcaccatagtcaccatggtccacaggctggcagacacaccgctgatgatattgttaatattcggcaacagatgcacctttgcaaaattctgcacactctccataatgtctgcagaatactgctccacatagcttaacataaccggattgtcctgcacaagcttttcgatccagtcgctgaccgtctgtatgtatccaggcatggcttctaccaggagcagaatactgttgatcacctgcggaaccagcatagctactaatgcatagataatcagacagaacaacagcaggctcaaaagaatggaaatccctttaaaaaatttccggtatttttctgctgtcttctccggttttttatccagagctgccagatctgccagatgccgttcaaaccaaccgcacaccggcgatagaagataggcaattacccctccgtaaataaacggcatcaggattttgatcactatcccaatatattttcgcagatcatcaaatcggaataccacgaaaaaaaacaatatacacatggcaaccgttaaaaatactgcggcacctttatagaaataatctttccatttttcgtccatatatgaccacctttctccagtcctgcaaaacaaatgccgaaaccgtactattatttattatagtacagtcccggcaattttgaaagtcattttcacagtatgaatttgtctttacagtttctttacagctttttacagatttgtatatcccatcaatgactcatccacttctcttgcgacgtctcttccttcacggatcgcacgaacgaccagtgactgacccatatgcatatcgcctgcggtgaagacatttttcacattggtggcatgtttgcccggctcggtggctacattggttcttccatccacattaacaccgaatgccttcgtcacatattcctgacttcccagaaaacctgcggcgatcagcaccagatccacatccagaaggaactcgcttccttcaactggcaccatcatcatacgtccggtcttctcgtcctttttgctctcaagcttgacgatcttcgcctgcttcacattaccattcttgtccttgataaattcctgaacagtagtctgatagatccgcggatcatgaccaaatttggcaatagcctcctgctgaccataatcggtcttgcagactctcggccagataggccacggattgttctctgctctcgtatccggaagcttcggcatcatctccagctgtgtcacagatttgcagcccagacggattgaagtacctacacaatcatttccggtatcaccaccgccaatgacaagtacattcttcccttctgccggaatgaatttcttatctgcaaaattagaatccagaagactcttggtggtagccgtcaggaagtccaccgcaaaatagatacccttggcatcacggcccggagctttgatatctcttggattggcagctccgcagcacagaaccactctgtcatactctttcagaagctgctctgccttcacatccacacctacattgcagttggtcacaaaggtcacgccttcttccttcatgatgttgatctttctctcaacaatatgcttttccagcttcatgttgggaattccatacatgagcagtccgcccacacggtcgcggcgctcgtaaacagtgacagaatgtcctctgcggttcagctgatcggctgttgccagaccggaaggtccgcttccgatgactgctactttcttcccgctacggaccttcggtggtcttgcatgggcatagcccatcttatatgcattttcaataatagccagctcattacttttggttcctaccggatcaccattcagattacaggtacaggcagcctcgcagagtcccggacacacacggccggtgaactccgggaagttgctggtactggacagacggtaatatgcttcctcccagttgcccagatataccagatcattccattcaggcaccaggttctgcagcggacagccggacatcataccgcccagcatctgtcctgcctggcagaacggaacaccacatgccatacatctggctccctgtttctgttgttcctcgtgggacagcggtgtatgaaattcattaaaatgtttgattctctctaacggcgcttctgcttttgcatttttgcgctcatattccaaaaagcctgttggttttcccatttgcctgtacctcctaacctctcttgatcgcgtagaatgcttcgatctgtgcctgctcggtattcatacctttttcttccatctgaacgatcagacttaacatcttcttgtaatcattcggaatgatcttcttgaatttcggcagatactgttcaaagttatcgaggatcaggttacctttttcagagttggtgtaagccacatgctcctggatcatatctttgagttcctgcacatcatatttattggtgacttcttccagcgttatcatggatttattcaccttcatgtacaagtcacaatcttcatccagcacataagccacaccgccgctcataccggctgcaaagtttttgccgacttttccaaggatgaccacacatccaccagtcatgtactcacatccatgatcgccggtaccttctaccactgcatgtgctccggagtttctgacgcagaaacgctcacctgccacaccgttaatataggctttaccactggtagctccatacagtgccacattgccgatgatgatattctcatcttccttataggtaattcccttcggaggatacacgatcagtttaccaccggaaagtccttttccgaagtagtcattggaatctcctacgagctccagtgtcagtcctttcgggatgaatgcgccaaagctctgtcctccggcaccggtacattttacagtaaaggtatcctccggcagtccttccggataatggctggtgatctcagaaccaaacatggtaccaaacgcacgattggtatttcttacatccagctcaatacttctcttctggcctttttccagcgcagatttgaattctttaataaggaccttctcatccagagtcttttccagttcaaagttatatacctgtttgggatcaaagatcactttctgaccttttcctgcaaacgggttatcaagaatccggctaaagtcaatggttgcctgtcttccggttctgtcctctttgacacaaagcatatcagaacggcctaccagttcatcaatggtacggattcccagttttgccatgtattcacgcagctcttctgcgataaatttcatgaaatttactacatattccggttttccacggaatctcttacgaagctccggattctgagttgcaacgcccaccggacaggtatccaggttgcagacacgcatcatgacacatcccatggttaccagcggagcagttgcaaagccaaattcctctgctcccagcatggctgcgatggctacgtcacgaccactcataagtttaccatctgtctcgatgcgaactttatttctcagaccattcatcagcagagtctgatgagtctcggtaagaccaagctcccacggaagtcccgcattgtgaatggagcttgccggagctgcaccggtacctccatcataaccagagatcaggataacctgtgcacctgcttttgctacaccagctgctaccgtaccaacaccagcttcagataccagttttacagagatacgtgccttcgggtttgcatttttcaggtcgtagatcagctgtgccagatcctcgatggaataaatatcatgatgaggcggcggagagatcaggctcacacctggtgtggacagacgggtctttgcgatccacggatagacttttccacccggcagatgtccgccctctcctggttttgcaccctgagccatcttgatctggatctcctgtgcacttaccagatatctggaagtaacaccaaaacgtccacttgccacctgcttgatcgcagagcatttattcaatccatccgatccgacagtcagacgttcaatactctcaccgccctcaccggtattggatttaccatggagctgattcatggcaatagccagacactcatgggcttcctgagaaatagatccataggacatggcaccggtcttaaaacgggtcacaat

SEQ ID NO: 2031 - DNA, 32759 bp, Unknown
  16S sequences of unknown bacteria
cggcgaagcggcgcgggacgaatacacagattcaaaggcggaaataagaaccgacggccttagggtagatatcgtgcttgccgataacgacacgataaagctgggcaaagaaaccgtgcgggcgctcgaaacaaaggggcatacggactgctcgatgtcatatgctgtagagccgcagaaggtgctctttacatcggagagcacgggcgttgtcgtaccgcagaaggcgtatgtcagctcggaaatacttaagagtatggcggactcgctcgcagcatgcgacaaatgcgaggcgtatgctccggaaatcataatatgtccgcattacggcgtagttccgaaggtatttaacaaagagtatttcaagagcatgaaagcggatgccgagagaaaaaaggcgctcgtcaaggaatttgcagaccggggaatgaacgaagaagaaattctcgaagcatacagggacaagctctatgagcccggagaacagccgctttcggcatttcttgaaaacgcagcaaatgtaatacgcgtaatgctcaaagaaataaataaagactgaatataaaaaacacttgactgtacggtaacagtatactttagaatctaaataaagcaatatttgcaggtcgaaaatgcgtaaaatgcgcagtttcggccgcaccggacaggaagtgagagaatggttttaaaattaaagacgaaaatagcatatggatttacggccattgcggatcatgcgcttcatgacctctatgtgacgtttttcctgttttttatgacgacggccgctggcataagccccgcagccgcgggggttatcgtggcgctcggctcagtatgggaatgtataataacactctttgcggggcgtatttcggataaaactcattcaaagatgggaaaacgcaagccgtttatcgtctttctggcgtttccgatggcgctcacgagcagcctgatgtttgccgtgtttgatatacctatggcggcgagagtgatttactacctcgtaataacgatgctttactggacgctgtttccgatgttctacatcccgtttgtcgcctggggcgcggagcttaccgaggattacgacgagagaacatcgctccgttcgtacgcatttgtgggaaatatgttcggactctgtatttcgacaatctttccgaccgtgctgctcgattttctcataggaaaggggctgaatcaagctcacgcatggcacggctcggtcagcatagtttcagcatttatattcatatcgcttttcttcggtccgatgatgataaaatcggagagcaatgcgcttacacccgaggaaaaagcggagcttaagagaaggagaaaagagagaaaaaacggcgcggaagcgggaggcaaatccggacgggcagcttcgacatttctttcgctgaaaaatctgtttgcccatttcgcaagcattatgaagctcaaagcggcaagatatctcatatttgcgagcatactttttgcttcggcaaattcgatttttgcctcggataagatgtattacttcacatataatatgggaatttccggaatcagaattacggcgctgtttgcgattgttgcggcggcgggagtggtgttcgtgccggttgtaaatttcagcaaaaaatatttcgataagcgcacgcagtttatagcgggtatgagcatgtgcgcagccgtcatgatacttttccgctttatcggcgttgattcgatgctttcggcgtgcctgttcatgacggccttcggcatcggcagcatgtgctactggcagctcatgccgggcatgatatacgatgtgtgcggcctcgatgagcttaaatcgggcgagcagaggcagggaacgatagtatcgctgcagtcgatagcggagtcgatagccgacggcttaggagtgctcgtactcggattcatactcgaatttgccggttttgacgatgcggcatccgtccagtctgaaaacgcgctctcctgggttgaaaactgttttacgcttgttcccgcatttctcatgatacttgcggtaataatggtaataaaatatccgataacaaagaaaaattacggtgaagtactgtacgcgctcgaaaaaaagagaaacggagaggaagcggaccttacgccgtttgaagatattgtataaagagaggcaggatggcggaagtgcaaaaaaacggaaagcatcaagattattttacaacaggtgaatttgcgaagctgtgcggcgtaaagaagcagacgctttttcactatgacgagatagggattctgtcgccggagataacaggtgacaacggataccgctattattcatataaacagctggaagtgttttcggtgatatcgatgctgaaagagctcgatatgccgctcaaggatataaaaaagtatctggacggcagaagtcccgaggcctttatagagcttctcggaaatcaatcgcgtgcgatagacagaaaaattgcggaactcaaagcgctgaaagagtatataaaaatgaagctcgatgtgacgaaggaagccgtttccgcagagagcgaaacagtgttcatacaggaacagcccgaagaatatcttattatgagcgagtattcgggaagtggctcggcacgcgatcttgcagctgcatcggcggagaacagaagctattacagcagtctcggtatgtacagtgccgattcgataggcggaataatcccggcgtcggaaataccggaaggtgaaatatattcgtacagccatctctatacaagagtcagcggacgcattaaaaaagctgccgacatatatgtgaagcctgccggaaaatatgcggtaatctatcacagaaacggatacagcacggcttccgagagctaccgcacgctttttgaatttgttaaaaaaagcggatttgtcataggtgattatttttacgaagatgacattttggatgaactttcgatgaaaggctatgaaaattatatgataaagatatctgttaaaatagagagtccaaattgaaaaaaatcacttgctaagtgggacaaataatagtataatactactgttatatatgcaaatgatctgttcagcatctaagtatttagagacggtcaggaggtgagtaagatatggcacaggtagttgtaagagaaaacgagagcttggaaagtgctcttaagagatttaagagatcttgcgcaagggacggagtgatgtccgaactgagaaagagagaacattacgaaaagccgagcgtaagaagaaagaagaagtccgaagctgcaagaaaaaaggcaaaaaaatattaaaattttaatattataaaggacaaagaggtgtttaagtatgaccttaaaagaaaggttgacggaagacttcaaggaggcgatgaaagccaaggatgaagtcagaaaaaatacaataagtcttgctcgtgctgcgattaagcagtttgaagtagataatagaggtactgagcttgatgacgaaggcgtaatcgctattttgtcaaagcaggtaaaaatgagaaaagatgccctctctgattttgaaaaagcgggaagaacagatcttgctgatgcatataaggctgagatggaagtccttatggcgtacctgccgcagcagctttctgcagatgaaatcgcagatgttgtcaaggaaactgcatcggcgcttggtatagacggcggtaagcagaacatgggtaagcttatgggagccgtgatgggtaaggtcaaaggcgttgccgacggcggcgaagtaaaaaaggccgtggaggcatttctcgcatagcgccttatcggctgaaaagaacatagtgattataaaacaacctgaatattcgggttgtttttttatgtgtctcagcatagaatattccgaggcgtacttatatcaaagaggtgatgctatgagtcttaaagaagaatttatttttgattttgccgtaaaaatgccgagacttctcgtcagcggaaacaccgcggtgcttgataatataaaaaaagtggtgcttatttcagctagccagataataatagacagcggcagccgttttaccgctgtgacggggaaaaaccttgaaatcagcgagatagcggataggagaatgtttatagagggggaaatcgatgagattcgcttttacggtacatcgcaggaagattagaatagagggattcggcatcaatcgactgataactgactgccttgcaaagggtatagtgcttcaaaacgtaaaatttatatcggacatagaagctgtaatgtccgtgagcgctgaggactatccaaagcttaaaaagcttgctaaaagcaaatacagaataaccgtgagcaaggacgaaggctttatgccgtttgccctcaggctcagaacgaaaaaggccgcgcttttcggtctttcattatttttcataatactgtattaccaaagcctctttgtgagcgaaataagaatatacggatatgagcagtttacagagagtgaagtgcggcaggcgctttccgatattgggtttgaggtgggttctcgtaagctgaggactaaggatgaagccaatgaagttaagctgcacctttttcgtgagcttgagggcataagctgggtcggcatcacatacaagggtacgcttgcggaagtgacgattgtcgaaggtgaagaaagcaatgaaaatgaagcgaataagataccatgcgatatagttgcggataaaggcggttatgtagtagaggtgcttccgcgggaaggactgcgtgcggtagaggacggcgagtatgtagcgcctggtgatgtgctgataagcggagctgtgccttataaaagcacaaactatgctcggggcgatctcggagagctcataagatatgtgcacgcatcgggaacggtaaaggtgcatatcccgtattatgtcgaattttctatactgccgaatgctgtcgacagtttgtcgggaaatgatattatgtctgcgacaatatacgacggcgaaagtgattatgattttgtaaaaagggtatcagataaaagaatacgtcagtttatgagagaaaatgatttagataaggcgcaaataacaaataaagatttgaattttagtataaaagaaaatataatagaagtaagagtgcttatcgaaacgctgcaggagataggcactgaaagagaaatacagataaatcaggagattttggatggtagtgaacagtcagtttgacagagccgcgctctttggcaaccttgatgccaatattaagctcatagaagagcatttcggtgtggagataacggagcgcggaagcgaactcatagtaggaggagaaaaagcacaggaagcggaaaaggtcatttccgaacttataaaggtgctcgattccggtgaagcaatagatacccagaagataaattacattatcgggcttacagagcagggaatatcatacagggaaagtgatataagcaaagacattctctgttttactcatatgggaaagcctataaaagccaagacaataggacagaaaaaatacgcggacagcataagaaagaaggatgtcgttttcggcatcgggcctgccggaacgggaaagacctatcttgctgttgctatggcgatacacgcatataaaaataaggaagttgagaaaatcatactcgcgcgtccagcagtggaagcaggagagcggcttggttttttgccgggagatttacaggaaaaggttgatccgtatttaagaccgctttatgatgcgctctatgatatactcgggcgcgattcagcgctgcggcttaaggaaaaggaaacgatagaagttgtgccgcttgcgtatatgagagggcgcacgctcgataattcgtttataatccttgatgaagcgcaaaatacgacgcgcgagcagatgaagatgtttttaacaaggcttgggtttggctcaaaagcggtcatcacgggcgatataacccagatagacctgccgcgcggcaaaaaatccggacttgtagaagctcaaagggtgcttaagcctgtaaaagacatagatttctgctatttaaaagacattgatgtggtgagacacgagcttgttaagaaaataattaatgcatatgataaatattattctgaacatccggaggcacttgaagaatgagattgatatttgataaagaaagtgagcttaaaaatgtatgggcggacaagctgcgcgaagcggctgaaatctgccttgcaaacgagggtataacaaaatactcggagataagcgtatcgtttgtcagcgaggaagaaataagaaagctcaaccgcgagtacagagagaatgacagcgtaacggatgtgctgtcatttccgatgtttgaagcgggcgaattagcggcaatgtccgcacgcgttgcatctgaacgggaagcgctcggcgacacaggtgaggatggtttttatatgccgcttggcgatgttgttatctgcgaagaacaggcaaggaaacaggctgaggaatacggacattcgtacgagcgtgaagtcgtgtacctctttgtacacagcgttctccatctgctcggctatgatcatatgaacgaggaagaaaaatctgtgatgcgcgctcaagaagaaatagtgatgcgcgagatgaatttgactcgcagcgcgcttgtgagcggtaacagcgcagaatttgcgagtgcggatacgggcggcggttatgccggcaaaaagtcaggcaagactcaggccgaagagaaagtctttatgccgtttgctgccgcaggcaaaagcaaaaaagatatgtacgaagcgcttataaaaattgcagagaagcagcttgtttattcatatgcgccgttttcaaaatttaatgtcggtgcggcgctgctcacaaaggatgattttgtgtgcacgggtgtaaacatagaaaattcttcgtttggcgctaccatatgtgcggagcgcaccgcatttgcaaaagcaatatcgtgcggagtacgcgagtttaaggcgattgcagtagtttcatctgcgggaagcgcttggccgtgcgggatctgccgtcaatttatgaaggagttttgcgatgatgattttgagataataagttacgacgaaaaaggaaaaataaagtcatataaaatgacggaaattttaccggagggatttagattatgaaatcgggctttgtaagcatagtaggaagacccaatgtaggaaaatctacgcttcttaactccatactcggggaaaaaatagccataacgacatcaaagccgcagaccacaagaaataccattcgcggtatctacacaaatatggaaagcgaagtgcagatagtgtttatagatacacccggcattcacaaaccgagaacgaagctgggggagtatatgacggacacggctataaacacatttaaggaagtagatgcgctcgtgctcatagttgacgatgagcttgcagcaggaccgggagataaatatatacttgatcttgtcaaagatgcggatactccaaagatactcgtcataaataaaatcgatgcgctcccgcccgataaattcaaacgcatttacgaagaatacgagcagctcgcaatctttaaggaaatattcggtatatcagcgcgcgaaggaacaaatgtagacaggcttgtcgcggcgattaccgagcttatggacgagggacctatgtattttccggcggaaatggtgacggatcatccggaacgttttatagtgagtgaaattataagagaaaagctgcttctctatctgaatgaggaaattcctcacggcgtggcggttgaaattgaaacatacaaagaaacgccaaaactaacgaagataggcgcggtgatatactgcgaaaaaaaatcacataaaggcataataataggaaaagaaggcaaaaaacttaaaggcataggcaaagacgcgagaatggaaattgagggccttttgggaacgaaagtttttctcgagctttgggtaaaggtaaaagaacactggcgtgacagcgacgttgcgctgtcaaacttcggatataaggaataatattatgtatactgacagcgagggtatcatactgcggcagataaagacggcaaacggcaggcgtatgatactgcttttttcaagaaaatacggcaaaataagcgcaggaagcagcgtcagtgaaaagggaagaagcaaagcggcgcttgcgatgcggccttttacattcggacgctacgagctatttaaaaacagggacagctacaacataaacagcggtgaggtaataaagagcttctacaagataggcgaagatgtggataaatatatgtgtgcatcttacgtgctcgaatataccgagaaaatactcgcagaagaacagccgatgccgaagatttttgaccttcttatagaatttttcgggcttttgtccgaacggcagaaaaaatatgaaacgctcgtttcagcttatcagataaagacgctggctcttctgggaaacacgccgatactcgattcgtgcgtcatctgcgggagaaaagacgagctcacagctttcagcgtcaaagacggcggcgcggtctgcacgagctgccaaaataaaatgagcgcgggaagcaatgtttcattgatttttaatgctgagtttggtacaataggcatattaaagtatcttttgaataattctcttacaagccttgaaaaaataggacttgatgaggaagcgcagacgcttgtgcgaaatatacttaaaagttacggcgaatatcatctcgatatcgccgctcttaaaagcgaaagcttttttatgataaaataaaatcagggaggtaagtttatggagattactttggaaaaaatcgaacttgttaaggacagaacaggagtgagctataaggaagcaaaagaggcgctggaggccgcagacggcagtgttgtggatgctattatcagtatcgaagagaacattgacgccaaaggcaagggcaaatttacggacagcactgcggccgttatcgacaaactgaaagaaataataagaaagggcaatgtttccaagatacttgtaaagaagaacgatgaaacaattctcaatcttccgatcaatgtaggcatagtaggagcggtaatcgcaccggttgctatggttgcaggtgtaattgcagcgcttggcacaaaatgtaaagtagaagtggtaaaagaagacggcagtatcatcgacgtaagttcgatggcaagcgatgcggctgaatatgcggctgaaaagggcagtgaaatagcagaagaggttaaagggcgcagttctgatttttacgaggcagtaaaggagaaaagcgtcgatgcatacgaatccgtaaaggataaagcggcagatgtcttaaaacgcgacggcaaattcagtggttacggtgattatgatgacggcagctattacgatgacggagcgtgcagcttctgtgatgaagaagactgcgaaaattgcgatgcagaggaaaagaaggagtaaaagataaactatgagcagagaagtaacaatggaaaaaatcgtagcactttgtaagaacagaggatatatatttccgggctcagaaatctatggaggccttgcaaatacttgggactatggtccgcttggcgtggagttcaagaataatgtgaaaaaggcgtggatgagaaaattcgtacaagaatcgaagtataatgtcggccttgacgcagcaattcttatgaatcccaagacttgggttgcgtccggtcatgtgggcggatttgctgacccgcttatagactgcaaatcgtgcaaggctaggttcagagccgataagctcatagaagaatatatgcaggaaaataatattacaggtatagccgttgacggctggtctaatgaaaagcttgaaaagtacattgcagataatagcattccctgcccggagtgcggtaaatcggattttacagcgataaggcagtttaacctgatgttcaagacattccaaggagttacagaggatgcgaaagcggagatttatttgagaccagagacggcacagggtatttttgtaaactttaagaatgtagcgagaacttcgagaagaaagataccgtttggtatcgcgcagattggcaaatcgtttagaaatgaaattacgccgggtaattttacgttcagaacgagagaatttgagcagatggagcttgaatttttctgcaaaccgggcacggatctcgagtggttttcatactggaaggattactgtgtgaatttcctgcgtgcgctcggcgtcaaagaagaaaatataagacttcgtgaccatgagcaggaagagctttctcattacagcaatgcgacaacagatatagaatatctgttcccgtttggctggggcgagctctggggtatagcagacagaactgactttgatttaaagcagcatatggaatactcgggtcaggatatgagctatgtagatcctgagacaaacgaaaaatatgtgccgtattgtatcgagccttcactcggagcggacagggtggcacttgcacttctctgcgatgcatacgacgaggaaaaacttgtttcagagaacggaaaagaagatacgagagtagtaatgcaccttcatccggcacttgcgccttataaagcagcggtgctgccgctggcaaagaagctggcacctgttgccgagcctatttatgaggaactttcaaagtactttatggtagaatacgatgcggcagggtctatcggcaagagatacagaagagaagatgagataggcacaccgttttcaatttgcgtcgattttgacacggaaactgacggctgcgttactataagggacagagatactatggaacaggtgagaatacctgttgctgaagttaagtcatatattgaggaacggctgatgttctaaacaggagactgaaaatgagacaatttgtctattcattcgtcgaaggttctaaggatatgggaggactgctcggacgcaagggtgccagccttgcggaaatggcgagaactggacttcccgttccttttggatttatcgtaactacagatgcctgccgcagttactatgaggacggaaatattatttccgaggaaatatcgaaagagatttttgaaaagcttgcagagcttgaaaatgtgacgggaaaatcttttggagacagagaaaatcctctgatagtatcggtgaggacaggggcggaaatttatgtacctggacttgtagatacggtgctcaatctcggccttaacgatgagactgttttaggcctttctgccctttcgggaaatgaaagttttgcctatgattcatataaaaggtttatccggatgttcggcgaggccgttatgaatgtgcctaaggaaaagttcgactctctggctgattccgaggctttgagcgagccgaaaaaagccgtggaagcgtataaggcgctcgtctttgccgagacaaaagaggaatttccgcagaacccgaaatatcagctcataaaggcggtatcagctgcttttgattcgtggagcggggaagaagcagaaaattacagaaagaaaaacaagattctgtttgatataggaatggccgtgagcattcaatctatggtgttcggcaatatgggcgaaacatcgggttcggggatggcgtgtacaagaaacccagaaacgggagacagagagctctcaggtaaattcgccatcaatacccaaggtggaattctgcgtttaaaagaagaagagatgcattcgatagatgaacttgcggaatggctgccggatgtatataagagctttgtaaaaatagccgaaattctcgaaaaacactatcacgatgcacaggatatagaattcacgatagaaaatggtaagctctatatattgcagacaagccgcagtgagcttacacctattgcggctatgaaaaccgcagtcgatatggaagctgaagggcttatagacaaacgtacggcactgctgcgtcttaaaccgcagcagatggatgtgcttttcaacaaagaatattctgagtcagttattacggaactttcaagttatatttctgtgataatgaagtggacggatgaagtaggcaggcttaaaataagaacgaatgtagatgatttgaatgatgctgagtttaccgtaaaattcggtgctgacggtatagggctttgcagaactgaaagcacatttctgcggcctaagcgcatatccgcggtgatgaagatgatacttgcagattcggaaaaggaaaggaatgaggcgataagcgtactgcttccgcttcagacggccgattttaagaagctgtttgagacagtcggagaaaagccgattgccataagactgctcgattcgctcccataccacgaatttgaaactgctttgggtcacagaggctgccgcatagctatcgcttatccggaaatagcagcgatgcagaccgaggctataattacggctgcgatagcggtgaagaaagaaagcggtatagaaattgcaccggaaataatggtgccgctcgtaagtatggacaaggaatttatctttgtgaagaagactgtcaccgataccgcgcagcgctgttttgaaaagcttggagatgaagtggaatactcggtggggacgatgatagaagtaccgagagctgcattgacagctgatcagcttgcgcgtgaagccgatttcttttcgtttggtatgaatgatttgacgcagatgacatttgggctttcaaacgagaacaatgaaaaaatagtaaaagagtatatgggcaatctcatacttgattacgatccctttgcttcgatagataaggatggtgtggggaagcttgtaaaaatagcggttgagcttggaaaatcggtaaaaccgaatctcaaattcggaatgtgcggagaccatgcgggcgatcaaaatgcggtggaattctgctgtaatataggagtaaattatatatcctgtccgccgatgaaggtgccgatggcgaagctgatagcggcgcagtatgtagcaagatgtgaggcggaaaatgatgtataaagcgcgtataaatatagttatatctgcgtatatgtgtgaataaataatgaaaagaagtataatattaagacgcaaaaaagagcaggacgaagtcctgctcttttttattgctatcttggctgaggtctgttaggacgatttggtctgtgaggcggacgaggcggcggtgtcggagcacattcattgcaggaattgttgcagccatcgttgcagctgttattgcagttatcgttgcacccgttattacatccatcattgcatccgttattgcagctatcacagcagtcatctttacatggatcgcatttgtcacagcagttgtcgttgcagcggtcgttacaaggatcgctgcatccgcagttacagtcgctttcacctgagacagagccgcagttggcgatcgtgtcgctgactttaatctgctgtgggaagagcgtagggaatgtcgtgcagacaggattctgctgaggctgtatctgagtaaagccagtcgaaagtacgcagagctgcacaggaacaatgattttcttttcgcatgttacgcagagcgcgatgatgagattgccgctgacttcaccgtttgtgccgatgcagagatctcttcccatattgtttgttgccagtctcgtttcgcaggcaatgttgcagaattctgtgaaacgaggcagaaatgcggtgtcgtgaacagacggcatacacatttcaaagaagtttgtaagtacgagtggctgcgacttgtcagcaatatttacctcggcgcatactgtgaataccgtttcgttgttgcatctgtcgcataaaagcaaatctaagtatacgagcacatttcccgaaatgcagatattctgtgtgccgaaaatcggcgtgcccatacatttttcgtcgcattccgaagtctccgcatagagaattctctcggagaagctgccgtccgggcctactactctgagctgctctccctgcgcattctgaagaaaagtagcgccggaaatgcttgtgtttacatcgagctttaagtttctgtcgtcgtctacattttccgggttaaaaaaccgcctgcagcgaatgtctataactctcttaactctgtaatctctcggaagtcttggttcaaaagcctgattctgcacggtcttcataccctgaaggttgaaaagtactgcatcataaactttctgaacatatagaggttctgttacaagatcctcaagacggccggagaactcacagagcgtatttgcgttgcagcaattctgatagaggtcggttgatactcggttaccgaaacaactcatatgtttccctcctttaaaggtccaatatatttcttggatattatatgaacacggggctttcggtgttacaaatttatggcaaacttgtccttggggtagaaataaataacaggtttgtggtataatactaatattatcattaatcatagggggataatttctaatgagaagcaaggcattaaaaagagcggcatcatttgtacttgtaggtataatttcatttgtcagtcttacggggtttaacagttatagcggtcttggtacggcgtattacgaatcgtctatggacatattcacgggcgtaagctacagcgagataatttccggacacagcactaatggattgcagcatgctcattatgtggaagccgatatagagagcggcagcataaagccgattgtatttaacggtgaagtaaggggtacttacagcatagaagatatgataaaatacgcaggtgagcagggatataaggtaatcgcagccattaacggggatatatatgatatgtcgtcgggtactcccaagggccttgtaatacacagcggaaatatcgtgacatcgggatacgcgcctgacagggtgattgcgttttacaacgacggaagcgctgagcttgtaccggctaagctttcttataaagtgaagggtacgattgcctatgatcagcaggtaccagtttcgcctgaagaaggtacagatcaggcagcaggaacagacggtacgtctggtacagatggcttggtacagaacgagaccgtgcattacgaagaagagtggaacggcactgtagattttttcaatgtgcctcatggagcggcaaatggtctgcatttatataacaggcattattcgtcgagcacaaaaacatcgggtacatgtgcggaagtcgtaatcgaatgcgatgatattcaattaaaagtaaacgatactattaaggggacagttaaacaggtaaatacagcgacaaacaatacccctataaccgataataccgtagtgctgtcaacggtctacggctctgcgacatataattatctctcagcgcttaaagtcggcagtgaaatcgaaatttctgtagaagatgtcggcggtgcagatcttgagaacgcagatgaatgcataggaatatattattctctggtggagaacggccgcaatgtaacatcaggaacggcagcgaatccaagaacagcgcttggcataaaagaggatggaagcataatgctttttgagcttgacggcagacaagcttcggtatctaaagggcttgggctctatgatcttgccgatgctatgatagaactcggatgtgagacggcggtaaacctcgatggcggcggcagcagcgtaatttatgtgcggcagccgggtaaagatgcagatgcggtaatacagtcctctccgtcatcaggaagcgagcgaaaagtagccaacggaatacttctcgtatataaggaaaatgcgggcagcagcgttgagcacctcaatgtatatccggagcttacacttgcaatgccgggggcaaaggtgcagttaaacacatatgcatcaaatgaactttatgaaaaaacgagcctcagcggcagcgtgaaatacagcgtagaggattctgcttacggtgctgtagatgaaagcggtatattcactgcgggaagcaagacggggagagcagtaattgaagcaaagtcgggaaatagcaccggatatacggaagttgaaattgtggacgatattataatagtaccgtccgtgactaagcttacaatagaatcaggtgagacgcgcgatataaatgttacggcctgtgttggcgcttacggcgcatcggtgccagtaaattccagcgacgacctcttcacattcagatgcgatgaaaatataggaacgatagatgagcttggtgtgtttactgctactacggcatctgcggtgtcgcagagcggaaatatatatgttgaatataataataacagcatagagatacctgtgcaggtaggggcttatatagtggaatttacggatacgacaaatcactgggccaagacttatataggaactctcgcgggaatgaatattctcgatggaatgggcgataatacattcgcaccggatggctcgcttacgagagcacagtttgtggctatgctcgccaagatgacagacggaatagatataacagcagcggcttcggcgggatttacagatgttaatgaaaaagactggtacttcggttatgtgaactggggatacgaaaatggcatagtaaacggaatgggcgacgggacattcagtccaaatgctagcattacgagagagcagatggcagtaatgctctgcaattatgcacgctcggtgggatttgcacttccgcagacagtatcaggagtatctttcagtgatgcgtcatctataagctcgtgggcggccgattatgttgccacggcggctggcgcaggcataataaacggatttgacacgggcgatttcaggccgcagggcgtggcaacgagagcacaggcggcgactgttatctacaagatgtgtgagatacgcggtatgctttaataaaaatacgaaatgtttgcaggctttcacaatttttaaaagcctatatgcacacagcatagcatgctgtggaacatttggaggtaatatgataaaggtaaagaatcttaaatgtggtatcagaatggtacttgaagaaattccgtatgtgcagtcggtgtctcttggcatttgggtgcgtgcgggggcacgtgacgaaagcagagagctttcgggcgtatcacactttatagaacacatgatgttcaaaggtacggagaagagaacggcgaaagagatagcagaggataccgacagaatatcgggacagatgaatgcatttacaggcaaggaggctacttgctactatataaagacgctttcgtcaaatgcggagtctgcggcggaaattctttctgatatgttcatgcactctaagttcgataaaaaagagatggcgcgcgaaaagaaagtaatatatgaagagatgaaaatggtaaatgattctccagaagatgtggtgcatgatactatatgcgagctcgtatttaaaaacaacccgctggcaaagtcgatactcggtacgcagagctcgctgcgcggtatttcacgcgacatgcttaaaaaatatatagaagatgaatatacgaaggacagcgttgttgtggctgtaagcggcaattttgacgaggatgcagtttgcgcggtatttgaaaaggagcttggtggtcttaaagataaaaagctgttaaaagcatatgaagaagccccatataaaccgagctataaggtaatcgtaaaggatatagaacagagccatatatgtcttggtacacggggggttaaaattgatgatgacttgtattacgcgctttcgctgctttcaaatattttcggcggcacaatgagttcaaggcttttccagaatataagagaacagaagggacttgcgtactcagtgtattcgcatatgtcatcgttttcggatatgggctattttaatatatatgcgggagttgcacataataaaattgaagcggcgcttttagggattaaaggcgagataagcagcctcaaaaataactttgtgacggaagatgaactgtcaatggctaaagagcagctcaagggcaattacatctttgggcaggaaaatataaacagcaggatgttcagcgccggtaagaatatgctgattctcggcaggacatttactatggaagaggttatagaggaaatagacagcgtgactatggatgaaataagggcggcagccgaaatcatttcagacatttcaaattacagtgcagtaatcgtgacgaacgaaaagataaatctaaaaaggataatgagtggtctttaatgaaaataaaaatatatagcgtcagtggtattctgcctgcatatgagacggtaggcgcatccggtatggatatgagggcatacatttccgagacggtgacgatagcgccggggaaaagagcaatgattccaacgggaatatcaatagagcttccgcctggttttgaagctcagataagagcgcgttcggggcttgccgccaagtacggcatatgtctggcaaacggtattggtacgatagacagcgattaccgcggtgaaataaaaatagctctcataaacttaggtgatgaagattttatcgtaaaaaacggagaccgcatagcgcagatggtgattgcaaggtacgaaagagcagaatgggaagtttcagattcgctttcctttactgagcgcggagaaggtggttttggccacacgggaagaaattaaaatcacaggcaggcaaaacaaagtccgcatgcatatattaacttgaggtgatatatgatgacggactttttgtttatggatgaaatagccgagtttataaaatgccagagagtgccgcggcttttatacaagaagggtatgtgtacagagggatattttacgccgtatatggatctttccgattatacgagtgctgaatttttgacggatactgaagctgaaattcccgttaccgttcgcttttcaaaggtgttttccgagtatggggcaagcgatactaagagagacgccgccggattttttgtccgctttttcacaaaaaacggacgctttgatatgcttgcgcatagtatacccgttccggaggaaataagaaatccaaagagcattatcaagctgatagaaaaattcagaaaggcggacacgggtgcagctcctgaaaacaaggcgatatttgaactggcggcagaagacgaagcgtttgtaccttttctcataagctatttttcagacgatacgaccgtcaaaagctatagaaatataatgggatacgcgatgaatgattacgagcttgtcagtgctgagggaaagagaagcggagtttcgtttgtctggcgtcctgtaagcggtaaaaagaatatttcgcggcaggaggcagaattcctcgccggatatgacagcgatgctgctatgcgcgatatggcggacgctgtgttttctgagaaatatcctgcgtatgagctggaaatgacatttaaggatggtgatgctatgacagtcggacgacttacggtgaacgcgcttgccgatagttgcgcgagtgaggaaataggttttacgcctgtaaatttggtgccgggcatcgagcttgccgataatgaattcaataattttacggcgtttgcatttaacgaaagcgcacgtgtaaggggtggaatgagatgacggaaaaagaactcaaagcaaccgcggataatatatcggattcgctcttttttgctccagatgatataagagatatggtaataaaaaatatagaaaagaaagataaaaaactggcagagatgataaaagaaaacattattttttgttaagcgcttgtgctgcgaggcttgtatgtaatataataaaattgtaaagaagctttgtaaaaccattataattcgttatgttttgtatgcacgggggaaaaagatgataggcaaaaataagggagatatttttctgactcttttgagcgaggaaatggaaaaggtaaagatcaccggtgaaacatttctcgatcttgtaaacaattacgaggatgtaaacaataagattgcaggaatgaaggtacttgagaccgagtgcgatatgcaagcgcataagatacttaacgcgatgaatacgacaagaacaccgctttttgcaagagaagaccttttttcgctcataagagaaattgacgatattgtagacgggctcgaggaagtagcaaatagattcggtgtttttaatgtggaggagataaggcctgatgccaaaaaaatggcggatatagtgatacaggctataaatgagctttccgcgatgtttgagcacctttccgagataaaaaagccggcggcgcttctcgaacatataatcgaagtgaacagaatagaaaatgagggcgatctcatatacagaaaagcactcgctaatctcttcagcgatgaaaaagacccgatagagataataaaatggaagcatatatacgaaaaaatggaaacgagtatagatgcgtgcgagagtgtggcaaatatgatcgaaggggtaattatgaagtatgcatagcggaaaaataggcagaattgagcttgaaaagagagaatatgagatattaagccctttggcagcgaagtctaaggagagcttgggacgcgattttgaagaggaaaaatgcgctgtcagaacggagtatcagcgcgaccgagatagaataattcactccaaggcattcagacgcctgatgcataagactcaggtttttcttgcgccggagggagatcacttccgcacacgtcttacacatacgatagaagtatcgcaaatagcgagaacaatagcaagagcgcttgcgctcaatgaagatctgacagaggcaatagcgcttggtcacgatctcgggcatacgccgtttggacacagcggagagagtgtactaaatgagatacatccaggcggattcaagcacaatgtacagagtctcagggttgttgaggtgttggaatcacataacggcaatcgcggtatgaatttgacgcgcgaagtacgcgacggcattgtaaatcacacaggaccggtgctgcccatgacgcttgaaggtcagatagtgaaaataagcgatagaattgcttacataaaccacgatatagatgacgcgctgagaagcggcgttataagcgagtccgagctgccgaaggactgtatagaagttctcggaacaacgcatggaagcaggatagatacgcttgttacgagtatgatagaaagcagcgttggcaaagatatcatatctatggcgccagagtgccttgagagtatgaataagctgcgcgcttttatgtttgaaaatgtttatcataacaataaagtgaagagggatgaagaccttgcggatgtcgataaaataatacgttttctgtattcatactatatagagcatcccgatgaaatgtcagatgacaggaagagcatgatagcggagttcggcataaacgaggtggtaaaagatctcatagcgggaatgaccgacagatatgcaagcagcgtatataataagataatgcatagtaaaaaataagcggataatgtaagacgcaggaaagctgcttctggcttctgcgtcttatttttttgaacagaaaaaaggaaacgcaaacaatttgtagaataataagatatataaaattatattgtgtataaaaacataggaaaggaggcacgctaagctttatgcagagaaataatgcggttgaagaaataaagtcgagatgtaatatagtggatgtaatagggcgtgtcgttcctttaaaaaaagcaggaagcaattacaaaggcatatgtccatttcataacgaaaaaacatcgtcgtttatagtgtcggagcagaagcagattttcacctgtttcggatgcggagctacgggtgatgttattgcatttgtacagaagtattacaatttggatttccttgatgcgatagagcggctggcaaacgagtacggaataacgatagacaaaagctcttttcgtaaaaacgaaaaaaacgacaagctttatgaaataaaccgtgacgcggctaattttttctataaggcactgacaacaaaagcaaacgcgggctacgcatatatgaaaaaccgcggcatagagcctgcaacacttaaaaaattcggtatcggctatgccgatgaaaaatgggacagtctttatacatatctgaaatcaaagggtcacgacgatagtatgctgcttgatctcggtttaatttcaaattcaaagggtaaatattatgataagtttagaaatcgcgtaatgtttccgataataaatacgcgtggcaaggtgatcggctttggcggcagaataataggtgatggtgagccaaaatatttaaattcgcaggaatcgccgatttttcttaaaaaaaataatctctatggtctgaatttgacaaagcatgatataagtaaagaaaactgtgcaattcttgtcgaaggatatatggatgtgatatcgctatatcagtctggcgtgcagaatgtttcagcatcgctcggaacggcgcttacagacaaccaggcggcgctgcttaagcgttataccgatggggtgatactttcatatgatgccgacgacgctggcagaaaagcggcgctgcgcgggctcgatatcctctacggtgcaggaatgaacgtaaaagtactccacgttaccgacgggaaagatccggatgaatttgtaaagaaaaaaggaaaagaggcgttcatagaactgacaaagaaagctctgccatatgcagactacaagatagagcatataaagcgcgaggtcgatattgcgaccacagagggcagggtagagtttattaaaagggcgataacggtgcttaaagtgctgtcgccttcggaagccgatatatatataaagaagattgctgcggatatgaaaatatccgagggagctataagaatggagctttacggaaatgacggcggcgcggttatgaatgcgcaagctttaggcagcggacggagaaatccgggagccggaagcgacgcggtaaatatgagcggacaagcgtcggtacctaaagctataaagaatgcaaagccgataagcgctatcgaaaagcatctaattaaaataacactgacggacgcatcatattaccataaagtagctgcttattcgtatattttcagaaacgaaaaggcttctgcgatatggaaggcgataaaatcagtgtatcgtgaaggcgaggaaatagatgcggcatctgtaagggaagctctcgaaatcggcgagcaggatgttttcgacgatataatgaaaaatacgctcgtcgcgggatacgaggaacagatatatcttgacagcgtcagaagaatagaaatcagcgagatgaaaaaaagggaaagtgaaataaaggtaatgctttctttggctgatgaagaggaaaacggagaaaatataaaagaactgacagaagagttaatggaaatacagaaatggataaatgagcagggaggttcgcagtaatgaattacgatgaaaatcaggaaaagaaaacacagtgtatcaacgatttgattgaaaaggcacgtgcgagaggaaaaattactttcagagaagtagctgttttcctcgagggtacagatcttgataaggatcagattgatgatatatatgataacctcaatgctatgggcatagaagtaatctctgaaatcgagcctgaggattttgaaattatggatatcgaagcggaagctgaagcggagagcgacgatgttgatcttgttgtggacgagtcgggagaaatagacattgaagcatcgctgcctaaaggtgttaccgtggacgatcctgtaaggatgtaccttaaggaaataggcaaagtgccgcttctttcggcagacgaagaaattgagcttgcaaagaggatggaacagggtgatgaagaagcaaagaaaatgctctgcgaagctaatctcagactcgttgtaagcatagctaagcgctatgtaggccgcggtatgctgttcctcgatctcattcaggaaggaaatctcggactcataaaagctgtggacaagtttgattatagaaaaggatacaaattcagcacatatgctacctggtggataagacaggcaattacgcgttcaattgcagatcaggcgagaacaatcagaattcctgtgcatatggtggagacgataaacaaactcataagaatatcgcgtcagctccttcaggaatatggaagagagccaaccccggaagaaattgccgccgaaatggaaatttccgaggaaaaggtaagagaaataatgaagatagcgcaggagcctgtttcactcgaaacgcctatcggtgaagaggaagattcgcaccttggagattttataccggatgaagatgtaccggcacctgctgaggccgcggcattttcgatgctcaaagaacagctcgtcgaagtactcgatacgctcacggaaagagagcagcgagtgctcaaactgaggttcggacttgaggatggacgtgcaagaacgcttgaagaggtgggcaagacattcgatgttacgcgcgaaagaataaggcagatagaggcaaaggcactgcgaaagctgaggcatccttcgcgaagcaagaagctcaaggattatcttgagtgattttgaaaaaacaaaggcagattacggagcggtgttatatggtaaagctttccgagagacttatgcttatagcagaacaaataaaaaagaatgaaattgcagcggatatcggcacggatcacggttttctgccgatgtaccttgctgatgaaagcatctgccctaaagtgatactcgccgatgtcagcacaggctcgcttgataaggcaaaaagcaatgtacgagagctgcttaaagcgagagaagaagcagggtgcccgcttgaccctgctatatttgattttaggcttggagacggaataaaggtactcgcgccgggagaggctgatgttattgtaatagctggaatgggcggtatactcatatctgagatacttgcaggaaatagagaaaccgcgcatagagcgagacgcatcattatgcagccgcggaacggaagcggcaggctcagatattatcttataaaaaacggctttaaaatagagcgcgatcttctcgttcgcgaaggcaaatttatctgcgaagtgatagttgcctcaatctcggaggcaccaaaccgggaaatgggcatagacgcgcagaatgggaaaattgaccgcattcttgacgatggcgaaatgccggcaccatacggtgatatttcttatgacgtaccgaagacgctgcttaaaaacggagaaatagcgcgcgaatacatagagcgtaagctgtgcacagagaaaaaaatactcgcggagatttctgcagcaaatgcgcaaaacactgagaaaagcaaagacagtaatgcagaagaagcagctttagacagcgccgaaagcggcgaagagatcagaagcaggctcaaagaagtaaaagcaaaaatattgtattacgagaaactgcttgcggacggaggcacatataaatgataacgataaacgaattgagaaaagcgcttaatcgtatagcgccggaagagagcgcagaatcgtgggataactgtggatttcagataaatacgggcagagaaagctatagccgtatactcgtatgtcttgaaatcacaaaagcggtcatagaagaagcaaaggagaaaaaggcggaattgattataacgcaccatcctctttatttcggctctttcaaggaagttgacaataataaaattatcggaaactacacgatagaacttataaaagcggatatttccgtatattcttcacatacatgttttgataaagcggagggaggcaataataccaagctctgcgagctttttgggcttattaacgcagcgccgctctttacaggagacggtaagtttgactatgtcggctatacggctgagctgcctgaagaaaagactgtcagcgaaattgcaatgctcgtgtcagaaacactcgcgcttgctcccggagaactaagatatacgggagacggcgcaaaacgcataaaaaagataggtgtttgcagcggagcaggagctgatatcgctttttctgcggctgccaaaggctgcgagcttttcataacgggcgatgtcaaatatcatgaggcgcagaatgcacgcgagacaggaatcgcgctcatagacgccggacattttggaacagaaaagatatttgcaagcaatatggcggaaaggctttccgcagagatcggagataaagcggaagtactcgtttcgacaacggacataaatccatttgtatgcatatgagaagataaaaaagagtgatgaaggttgatatttaaaaagaaaacgccggcagaataaaaaaacagtttgccgaagataaatattgtggtaaaatgtaaaagttggctttgggtattcggacagtcgcgtggtttttgccatgaggaaagtccgggctccgcagggcaaggatgccggataacgtccggcgtaggtaactatagggaaagtgcaacagaaacattccgccgaacgggcgatttttcgctgcgtggtaaggttgaaatggtgaggtaagagctcaccggcggtatggtaacataccggccgtgtaaaccccatccggagcaagaccaagatagggcttaaaaggcggcggcccgtcgctgcccgggaggtaggtcgcatgagcatatcagcaatgttatgcctagatagatgactgtctattacagaacccggcttatagaatgcccaaagctgatttttatatttttattgcagtattttaaagaagggcattttgagactatgcaggaaaatttgaaacaagaaaataagatgggcgtaatgcctataggaagattgctggcaagtatggcttggccggcaattatttcgatgactataaacgcgctgtacaatatagttgacagcatgtttgtcgctaagataagcgaggatgcgcttgcggccgtaacatatgtgtttcccataaatatgctgatagtggcgtttggtgtgggaacaggagtcggcgtaaattcgctgattgcgagaagacttggtgcgaagaactttgaagaagccaactatgctgcagagcacggactcaggcttgcgctcataaactgggctctgtttgctgtattcggcgccttttttgcaaagctgtttatgtcgtcttattcagatattccacacattgtggacgatggcacggcctatatgcgcataactacaataggcagtatattcgtgatgatttcgatgatgacggaaaagacactgcaggcgcgcggcaatatgatacttccgatggtgagttcacttattggcgcgcttacgaacatagttctcgatccaatactcatattcggatactttggtatgccgaagctcggcgtaacgggtgcagccgcggcaactgttatcggacagtttttaagtatgtgcttttgtataatagtgctttttaaaatagacaacttttataaaataaggataaaaggcttcaaattcagtgcaaaaattataaaagacatatatgaagtgggaatgccgggaatcgttatgcaggcaataggctcagtaatgctgcttggatttaatgccattctcggtgaacatacgacggcagttgctgtgcttggagtatatttcagattgcagtcgtttatatttatgccggtattcgggcttaatcagggctcgatgccgattatgggctacaactacggcgcgggaaacagggaaagacttatgcgtacatttaaggtggcgtttacagcagcgctcgtgtatatgctgtttggatttttactgtttcagatattcccgaaaaatttgctcgatatatttgaagcatcgtcgcagatgaaaatgataggtatctcggcgctgaggatgatatctttttgttttataccggcctcatttggtataatggcaacggccatatttcaggcgacagcccacggtgttttcagcctgctgtcgtcgtttataaggcagcttgcatcgctgcttccgatagcctgggtgctgatgaggacactcggcgtacaatatgtatggctcgcgtttccgcttgccgaaatcatcggatttatattttcgttaattgcgctcaaatatgtttacagcagggatataaaaaatttgcagagtataacaatagccgccgtttaaaaacggcgctttttaataaagcctttttcttaagtgtgaggaaagatggtcgataatccatacgagaatgacaagcccgataaagatagagcctgcttgtggccacgcgtagtgattcatggcgaaaatgagcggagctcctatacctccggcacctacgagaccgagcactgaggcctcacggatgtttacatcaaaccgatagagcaccgcgcctgcaaagacaggcgcaagctgaacgagtatagtgtggcgtatgcgcagaagaagcggaactcccatatcggagagcgcgttgtatgctctgaaatcgagtgattcgatagcctcggtaaagcgcttgcttaaaagtcccacgctgcacatagcgagtgtaagtactcctgtaaatgcacctggaccagatacgcgtataaagatgagtccgtatattagaaatggtaccgagcggatggccgctatgagggcgcggaaaaatacggcaaaaggcataggtacgagacgcggcgtgcttaaaaacgaaagcggagctgcgatcagagcgcctataaaagtgccgacaagtgaaatagccagcgtttcaaggagcagatagaagagcccgccgctgcctgtttgaaagaaaaattcgagatccggatgaataaatccggaaaacatattcgctactaaactcaggctcgtatgtgagaaatcaggcggatcaagtgtcagcgtgcagaatacgaagagagcagaaacagataagataataagacgcagtgccaagcgcggaatttttctttcgctgcgtacgatttctgtaagaaaagagctcagcacttctataatgcataccgcaataaacaaagtcagaagtatcataccgactttggaaaattcaagccatgaaactttttcgttgagaataaggccgagacctcccgctcccacatatccgagaatagagctgtgacggacattcgtttcgagaaggtagagcgcattggtgagatatgagggtgcaatttcgggcacgacagcgcggaaatatgcgcgcgcagaagaggctcccatagcgcagagcgcttggtgcggtcccatatgcgtgctttcaatatcttcatatgtaagacgcgtcattatggcaaatgtgtaaatcgtgattgcaacggtgccggcaaaggtaccgagaccgaagataaaagtggccataagggcaagaataagagccggaaacgatctgagaagctgcactaaaattctcagaacaaagcttacggactttggactgccgaggtttgaagcacagagcggcgctaaaataagagcaaaagcggcaccaagaaaagtgcctgtaactgacatctgtacagtggcaaagagcggagctaatatttttggtaaatacgaaaaatccggcggaatcatctcaaaaactatatcggtaaaatgacttcggcgggcccaaaactgcgagaacgagcagtctgtaaaatatgcggccgcgatcaacaccacagccgcagctatcagtttaaggagtgtaaacaaaaatttctttggtgcggaagtcataataaagcctcccgcatattgccgctttccgacgaggtgccatagatggcgtcaataattttcggcgaaacatattcaggctttccgtcaaaaactacagcgccggcgttcagtccgataatgcggcttgaaaattcaagcgaaaattcgaggttgtggctgttcataagtactgtgagctcctgagttttctgtatgtcggaaagaagctcgagaatctgcctgccggttacgggatcgagtgaagacgccggctcgtcggcaaggaggacggaagggcggcgcataagagcgcgggctatggctacgcgctgtttttgtccgcctgataaattcttcacaggttcgtccgccttatctttaagccctacgcgttcaagcaggcgcagcgcttctttgtttctttcctgtccgaaaagcccgagtacagccggtataaaggccatatcgggaagacaggcggaaagcacattgtgaatacagctgacattttcgacaagagcaaagtcctgatagatagttccgatatttttttgaatagctctgcgcgcttttcctttcgccttttcaagatgcctgccgtctatgattacagcgccgctttcggcgctttcggcgccgtttaagatacggaagagcgtagttttaccagcaccagaaggtcctattacggatacaaattctccgcgttttaccgaaaaatttacagcggacagagctacagtgccgtttgcaaactgtttggtgatattttgaagctcaactatcattactgctgctcctttttgtctttaagtgacgttttgttattcttcaagagtttttaagagctcctgagcagctctttcgccgtcgtaatcagaatcttgaccgaaggtatagcccacctggctgaatacgcttattatttcacggccttcttcagtctcggctatttcgatgaaagcttcgccgacagcctgacggaaattttcgtcggccatagtatccgatgttttgctgtaggcaatcatatcgttatatataccttcagtaacacctatgatacctgtatcattgaccatttctccggtgccgccgaattcgctctgccagataggagcgtttttaatacgaatgtgaccgtaggaaaccattacgtctacctgctcgctggcaagacgggcaacggaagtggtatgagaatcggactgaacgacattgtcaaggtcgctgatgcctttgccgtagttttcctgaagccaaagacaagggtagatgtagcctgatgctgatgtaggattgagcaccgcccaggtagcgctgttgagatcatcccaggtgagctcttcacctgcgtttactttggcaagaagctcctggcctttttcgctcggacctgccagtattatgcagcggtaatatgtactcatctcatcggtgttttcttcaatagtgccgtcattccaatcggcaggattttcggaatccttgttgatggcatatctgagagctgttaaaagcacatcgcagtcatcggaaaacaaaacatagtttccgcctgaaataaatccaagatctgcgctgccagcggcaagcgcctggcccacagctgtgtaattagtgccgacagacatatcaatgttatttacatcgtaacctttttcaagaagcttagctttgagaaggtcggtaagcggctctgtcgccgttataatctgatcagcgtcggcataaggtgaaaatgcgattgtgagattgtcaatagtcttgacatcgctgacatctccgtcatcatcaccgcttccgccgcagccagaaagcgcagcgaggcacatacaaagtacaagtaatagtgataaaattctctttttcatatcagattcctccgaattatagatttctgctttataacaaaaaagacatatgcacctgccgcatatgccgagcctgacgataaagcagatgctgataatccgcataatactaaatgcggataatttttcggtcgaccatatgtgatcctctcaacccggcacacgggctccctcgcaatccggttttcgtcatctgtatagagcgcggcgccagggagctccccctttcgccgcattccgcaaaccgattaaattgtaccatattttatatataaatgcaacagagaaccggtaatttagcaggaaacagtgcataaataaaaacaaacactctcgccttgggcgccgctcacagttagtttggtattgagcaaattgaaaaagtataattaaaagaatcattcggcttttttcacaattgtaagcggaactttgccgtatatgcggtcgtctgagtccatacgtacgaggtcgtatatcagagggtcgcggataaggtgtttccagacggtatatgtggccttaataaagctgtcattaagtttcatcttgtctcttataagcgggcaggaatacgggagctcgagcggactcagtatgagctcgagctcatcatcgagattgagatgcggtgcaagcggaaaaaacctgcactggagcggtcgcatactgcggtgacatacgggaggggtattgcatcttataaaataaactttgccgaaccaagaatcgggaaaatcgtaatcctcagcgtactcagcgctccagtttatccaatcttctttcatcgtaaatagcttttcctcgcctggaagcagataaatacccatatcaaaatcatctgcggcagcttcgctttctccataggtgcagcagactgcgccgcagaggagaccgcagtcataatctacgggtgagacagtatcgagcagcctgtaaattgctttgtatgtagatttttttattgtacttttcaaatattattcctcgcacttctttaattggcgccggcgccgcataatttttatagtgtaataattatacatcattataccataaaacgcaaaagacggaaaattatgaaaacggcgttaagatagcgttaagaacgcgttaagaatattttaccgctatgctaaagttttctgagaat

SEQ ID NO: 2032 - DNA, 8164 bp, Unknown
  16S sequences of unknown bacteria
caggcggtcgacggcggcggcgggatagagtgtatcggaaattgtccgcacatcccccgtgggtatcgtgtcactttggcacgaggggacacccctgctcttctccacgaacgccgctaataggtgtagcgagtggtgtagttgctgccgttgccgacgaactgcgcgtcgccgccagtcgcctcgaaggtcacgtcgatgcgcccccattcgtcgacgctcgcctgaatgttcgtcgtgatccaccccttgtcctgcaggtagaccatattccacgaatgatagatgtcgttgggctgcacgtagcccgtgatgagcttgcaggggatctgctgactgcggatcatcgccgccgcaagcgacgcataatcgaagcagatgcccttcttggttgaaagcgtgcgatcgggatcgggcacgtagccgttgcccgggttcttggcgaaatcgtagtcgtactggatcgtcttgctcagccactggtagatcaccgagaccttctcggtatcggtcgaaagccccgcgcacagcgattgcgcctgtgcgaccgccgccgacttctcgtcgtagctagaaaacacgttggggtgcatgaagggttggaactcgttgtcgagcttgacgtcgatgctcttcgtgccctcggtcgagtacttgttgcccgtcacgttgcgatacaccgtgagcttgtaggtgccatcgcccatctgcaacgggtagtagttgggcgtgccgtcgctgctcaagtcgtacgtgtaggtctcgtccttctcgaggcgcaccttgaacgtgccctcatcgctcatcttcacgccgaggtagccctgcgccgcatggctcgtgtcgacgcgtgccgcgcccacgctcaccgcagcgccgtcgtcaaaactcgcatacaccgaatccgtcgcgatgggagcggccgcatcctccgcagagccgccgccgggattcccagccggctgcgagccgcccgacaggaggccgtccatcaccttgccgaactgctggccctgctcgttgacgtcggacaagctgcacgcgcacatacagaaggcgagcacgagcgagcatacgacgctcacgagaagcgacgcgatgcgtctgccgcgcacgcgacgacgccgaatgtcacaagcgcgccgcatacactatgccccgaggatgaagcgcgtcgtgaagacgccatctgcgagcgaatagcgaatctgtccgccgcagcgctcgacactcgtgcgcgccgagcgcgtcccgataccgcctgcgccgtgcttctggcttgcgggcagaccgctgctgtcaaacgagacgtcgtcgcgcgaagagtttttgatctggcagatgagcttgcccttgcggtacgtcatcttgaagtcgatgaagcgctggcgctcgctgcgctcgaggcgcaggcacgcctcgtaggcgttctcgagcaggttgctcacgagcgagcccagctccatagaatcgacgtcgagcttctcggggacatccgcgcgaatctgaatgtcgatgccctggtcctgggcgcggtacgaccagaccttgaggatggagttgaccgtcaggttcttgcagtagtcgaagtccggaacgaggctgtcgccgcgcaaccgcacgagcttctcgcgtacctcgtcgacctcgccgcagtcgagctcgtcgatcatcacctgatagaagtgccgctggtcatggcggatgcgacgctccttgttctcgttctcgcggcgctccttctcgagtttctcctgtatttgctgctgagagcgcagcagcctgacgtcggcctcgaggttgaccgattcgtagaggcgcttgaaaaagtagaagaacgtccccagcgagatgaaggcgaacaggaacgcgatgcccgacagcgtgagcaccatgtagacttccatatgccggtagaataggaagcacacgagaacgaaggcgttacccgcgatggggagcagactgtagacgacccacccggactctatcttttcctggatggaacggtacaggtcgcgcacgaagtgctgcacgagcagggctgccacgagcgacaggccgccgagcgagacggtgaacagcagcggaccgcgcccgctcacgccaagccagactagagagagacacgcctcgaactggatgaacagcgcgatgctcgtgagcgagaagatgaagcggccatcgttgtatttgcgaaacagcagccccttgagcgcgagcagcaggtacagggtggccgaacacagcgtggtcagcccgtcgacgcccgcaaagaccaggatcgccgtgtttatcgccgagatgagcaggctcagcaccacctcgagcaccacatgccatctggtaggatattccgtcatcccaatctgcgcggacaagacgtcagccgtggcgacgatgatcgcggggaccgcgcacatctcgaagaaatagccgggcatgcgctagatgccctcgaacgagaagtcgaaaaacgcgtcttccagctctttgcggctgcgcgcgggcaccgtgatggcctcgccgttcacaaacgtcacgtcgcgcccctggatggagcgcacgttgtcgagattgaggatgtaggagctgcccgctttgaaaaagcgcctgtcttgcgacagacggttgaacagcgcctgagacgagctgcgcgtggagacggtcgccttgctctgcaagtggatgacctggtcgtggtcactcgtctcggcaaacatcatgtcgtcgtagctcaggcggtacaggccatcgcgcgccttgatgggaatcgacgcgcggcgttccttctcgatggcggtcaacacgcgcccgagcacggtcgagaactgctccatcgtgtagggtttgaccaagtagccgtcggcatgcagcccgaaggcctcgtaggcatggtcggcggatgtggtgaggaagacgacatggacgttgctgtcgttgtcgcgcagctcttggatggcctcggtgccgagcaggcccggcatgtagatatcgcacaagatgaggtcgaagaccttgcccccgtcgatttccgccagcatgtcggtcgggttgtcgaaggtgtcgatgctcacgttttccacgtgcttgagctgcatgaactcgcgcgtgagctcttcggcgtgaaggcggtcgccttggtcgtcgtcgcagatggaaactttgatcatccatcctcctttcacgagaccttcgtttttgccacaccatcttgcgaattatacaatagtcgtgtttcccaccgggagaggagcagctcttgaacgagcacctgaaccacgagcaagtcgccttgttctgcgaaaaccttggcatgatgtaccaggcgggtatctcgactccggaagccgtgcgcctcgtcgccgaagacagcggcaagggggcgttcgcgagcacggtcgaggacgtgagcaggcacctcgagaacggcaagagcctgtccgaggcactgcgcgcaaccggcgcctttcccgtccacgtcgtcaagatggtcgaagcggcagaccgcgccgggcgtctcgagcagacgatgttcacgctctccgactactacctcgagcaaatgcgcctgcaagaccgcctgcgctccgcgctcatctacccgatggtgctgctgctgttgatgacgggcgtcctgctcgttttgacagtagccgtgctccccatcttctccaacgtgtacatgaccatggccggcagcatcacgccgacctctctcggctatgcgagcgtcgcgcaggccgtctcgtatgtcgccgtcgctctcgtgctcatcgtcgccgtcttcttcctcgtgggcgcgtgcctggtctactttggccgccgtacgacaacggtctcgaaggtcctcgacacgctgcccttcaccgcgaaggcctcttacgcgagcgcgctgtcgcgcgtcatgagctcgctttcgacctacgtcgcatctggcatcgacaccgaagacgcactgtcgagcatcacgaacgagatcggcaacaagaagctgcgcgcccgtctggacgcgtgcctgaagcgcattcacgacggcgagagctttgcccaggcggcgcttgccgaaaacgtgctcgacccgctgtacgcgcgcatgctcgtgaacggcgagcgctccggcacctacgacgagacgctctcctacctcacctcgctcatcggcgaagacgcggcgcggcgcaccgatcgggtcgtctcggtcatcgagcccgcctgcgcggcgctgctcaccattgccgtcgcgctctcgctgatcgcgatcatcatcccgctcatgggcgtcttgggcgccatcgggtgaccgatgcgcacgaccagcagacatatcctgctcgcggtgattctcatcatcgtcgccctcgccatcgcgctcgtcgcatggtctgccatcgtgcgcgtctccgcggatatggccgagcagagcgcgggcaccatcaaggccgaggtcgtggacgcggccgtccagtgctttgccatcgaggggagctacccgtcgtcgcttgcgcacctggaagacgattacggcctgaagatcaaccacgacgactacatcgtgacgtacaactgctttgcctccaacgtcatgccccaggtggaggtgctcgcccgtgataagtaaccgccgttccaaccgcgggcacgtgtggacgctcctgctgtttgccgtcgtgatgctgctgatgctcgtctcgatcgtgttcggcgtgcgcgtctatgacacggccacgcgcgccaacgccgcgacaacgcagctgcgcgccgtggagggctacctttcgtccgccttgaaggcaaacgacgagaacagcgcagtgagcgtggttgctggcccacaaggcgacgtcttgcgcattgccacgagcgatggcaacgccacgtccatctacctgtccgacggcaggctcgttgaggagtacggcgctgccggcaacgcgctcgacccgcaatccgccgtccccattgccaagctggagagcttctccgccgaggtctcgaacaatcgcgtcaccgtaatcacagatgtgggcacggtcgtcgcctcgctgcgaagtgcaggtgatgaccgatgagacccctcaagtcgcgcccgcacgaggcaggcggcaacgggcgctccatcgccttctacatcgagacgatcgtcgtcgtgctcatgctcttcgtggtgctgagcgtcgtcgtgcagttcttcgtgaagtcctacgtcgccacacaggaatcgcaggtccgcatggacgaggtggcgacggcgcgccaggttgccgagctgttccagtcgtcggcgagccccgacgagcttgccgacgcgctgcaaggcgagcgttccggcatcgacgaggcaacggtcaatgcgaatgtcgagtatgtatccggggcgcccatgcgcgttaacgtcaccatcagctcgcgggacacgggcgccggcacgatctacaccgccgacattaccgtttccgaccgggcggggtcgcgcccctacacgctgacgagcgagcgctacgcctctgacaacgtggcaaaggggggctcccagtgaacaagaactccattcgcacgggaagcctgaccttgctgctgctcatcacgactgtcgcgctggcggcgctgggccttctctcgtaccagacggcgcacgccaacctgagccggaccaacgcctacattgacggcaccgagacctactaccaaaacgatgcggccggccaagaacttgtggcaatgctcgacgccgcgcttttgagcggagaggaccccgaggccgcgctccccgacgcatgcgagatcgacggtgagcacgtgcggatctaccttgtggacggcaagcccgtctcccccgccgccgtgagcaccgagcccagctcgctcggcgagaccggcatctcggcaagcgggctgccttcttccgacaccgacgatgccggcaagccggcacttgccatcaccatcgcgtacggcaacggcacctgcgacgtgcagtcgtgggaccaggtgcgcgtctacgagtaaaggagcatccgtggcagacggacatgcagatatcgaacaggtcacggccctgctcaagcaggcgatagacgacaacgcatcggatgtgttcctcatccccggcgcaccggtgacgttcaaggttggcgagacacaccagccccaaggcgagcgcctcacgcccggcatggcgcgcgagcacatcgcggccatctacgtgctcgcgaagcgtatcccccactacgacgaagtcccgcacaccgacgacgacttctcgtttgccatcccgggcatcgggcgcttcaggctcaacgtgtactaccagcgcaacacgcttgccgcggtgctgcgcgtcatcaagttcgggcttcccgatgccgccgcgagcaacatccccgaagaggtcatgcgctgcgccgacctcaagcaggggctcgtgctcgtgacgggacctgccggcaacggcaagtcgaccacactcgcctgcatcgtcgataaaatcaacgagacgcgctgcggccatatcatcacggtggaagaccctatcgaattcgtgcacaaccacaagaagagcctcgtctcccagcgtgaaatcgcgaccgatgtggagagctacgagcttgccttggcatcggcgctgcgcgagaaccccgacgtgatcatgttcggcgagatgcgcacgcgaagcgtcatcgaagtggccatgcgcgccgcggaaacggggcagctcatgctgtcgtcgttgcacacgctggggtccgccgcaaccatcacgcggatcatcgacacctttcccgccgcgcaacaggaccaggcgcgcacgcagctctcgcagacgctcgaggcgatcatcagccagaagctgctgccgagcgtcgacggcaccgagcgcatccccgcgttcgaaatcatgttcgccaaccccgcgatccgcaacctcatccgcgagaacaagatccaccagattcccaacgtcatccagtcaagcagccaagcgggaatgcgcaccttcgataacgacctgctcaggctgtacaacgagggcaagattacgaaagacaccgtattgggcaactgcctcgatgcggacgccataaggcgccgcatatagctcagcaaaagcgcagacgcctccagcttccacgagaaagacgcaagagaaacggagagggcggccccgatggccgccctctttgcgtcgtagtctctgttggcccgcgctaggcgaagacttggttcttgcgaagcgcgtcgacgagctcgtactcgtcgttgtactgagcgacttcttgaatctgctctttgccctcttcgttgacctggtacttggaaagcgagccttcccaggtatcgaccacgagcttgttgtcatcgtcgcgatgcgcctgaaagcgcttggtgtccacaatgtacttggggtcgtagctctcggggcggtctgcgacctcgaagccgtactcgagcgccgcatatacatcggcggcaaagcggtcgaactcctcggcggtgttctgcgggagggcatcggcgcgccgagcccctccgaactcggggttgtagaccgtcgccggcgagatgtagaaccgtctgatcagacgcttgcgcacggattcgcgccagtacaggatgccggcaaaaacggcgatgatggcaacccagaggatgccgaggtacacgtcgagatagttgtctacgtgctggaagccaagcgcgaagtacagcatgacgagcagggcagctgcgacaactgcaacgacggcgatgagccagttgatctttttcatctcaaacctccttttgagtagtgggggcgacgttcgggcgccgcccccgtgccagtcagttagacgttcttgccctttcctgctacagcgcgcagggagttgatgttcttctggcgacgaatcaccacaccgatgtagtacagcgaagcgagcagcgtgcccaggatgatgagccagtggacccagcaatcgacatgctcagccggcgcggtaggcgtgccgttctcgtccaccgtcacgaggccgtcatctgccggagcggcgggcgtcggagctgcgacgatgtaggttaccgtcggagtcgtgggcgccggtatcacggtgacagtcgtgccaggtgcgggcggcgtcggcgtaggcggcgtcggcgcaggcggcgtcggcgtgtcggg

SEQ ID NO: 2033 - DNA, 18622 bp, Unknown
  16S sequences of unknown bacteria
gcggatgcgccctactgcagttttcatatgccggttcaggatcagcgcgtggaagtggtgttcctgatgaatgaggcggggctttccaagctgaaacacacatggctggaagagcagaaagcccggctggagagcgggcagtggctgacccatacgcgggaggatggcagaaccggcgcgctggaagcggtgatgatcggcctggactatcggattggactgctttaccgtctggaaaaggacgggacgcggttccaaattttcctgcagccggatggtactgcggcggaacatgccatttgggaagaggagcctccggaggcgggcggagaaaaaacgtctgcagcgcagcaggaggatgacgatgaccggaccggttcctttgttggctttgtgctgctgcagcaggcacagtggagcagggaacagctgatcggcgatctgaaaacagaatggggcatcgatgctgccgaagataaagcggaagaaccggagggcagcgacgatgtgatggtcttttccgtggaagatatgatggtggcggtcagcctgatgccggctccggtgccggatcatgaagcggaggccaacgccgggaataactatatgtggccggaagcggtggaagcagccagagcgcatcagggccaccttatggtggcggtactggggaagaatgcagacctgtttgagcggggcaagctgtttgtcaaagtgatggcctgctgctgcaggcagcaatacgccagcggcgtatacaccagcggtaccgtgtttgagccgcggttttaccagtgctttgccgagatgatgaaagaggacgagctgcccatcttcaactggatctggtttggtctgtatcgcaccgaacagggtgtgtgcagttatacctacggcatggatgtgtttgggaaagaggaaatggaggtgctcgatgctgccgcccagccttctgaggtgcgcgattttcttgccagtctggtgtcctatgtgctggggtgcgatgtgacgctgcaggacggtgagaccatcgggttttcgccggaggacaagcattcgatcacccgcgggcccggcgtgtcgctgccgggaaccactttgaaaatcagctacgaagcgatggaagaatgaacaggtattgcggcgggaacgcggggcgtctgcagcgctgccctgcgctgctgcagaatgggaaaggagcgtgaggcaatgttgcccgaagtgtacagtgaagaagaaagaaaagcggtggaggagcatatcgaggcatgttttggggcctttgaaacggtgctgcatgaggtggtatcgccggacatccatgtggacgtctgcgtgattccgccggcgaaagaccggaactattacaccctggtgactatggggatgggcgcccatcggatgaacgtgccggcggaactggcggaatataagctggaacgggcggaactggcgattgcgctgcctgcggactggaaagtggatcaggaagctttccgggacgagcgatggtactggccggttcggctgctcaaaaccctggcccgtctgccaggcgagtgtcacacctggctgggctgggggcatacggtagacaatcaggagccgtttgcgcagaatacggagttgtgtgcatctatgctcatcgcgccgcagcatgtgaaggagggcggcgaggtgtgtgccctgcccggcggcggggaagtcaatttttatcagctgcttcccctgtatcgggaggaaatggagtttaaacaggcctatgatgccgaagcgctgctggatgagatggccggcgtgagttttgtggtgcagccggatcgggccgacgcgttttccgccggtgtgtcagaggaggaataccaggcgctgcttatggacgacgctgcatggcatttggaggatctgcgcgaaaagcatctgccggtggaagaaattacagcctataaccatctggccatatatctgcgttggtgtatggagcatcagctgatgggcgaggtgtttttggagcggtatccggacgtgacagcccggcttcaggcagatccggaacacaccgatttgcgccccttcctccgcgatgaactggatgggaagctgctgcgggtttactttaatgatccgggcgaggcgttttcgcactattattacggtagcggcgacgcgccctatttcccttcggatattgacgattacgcactgcattatttcggtgcggagcgttatcattccgatgaattccaggacgaggcgtatctgtttattccctttgacgaagcgtactatcaggccatggcggagcggataaaccagcgctgggaggcatggcagcatcagggggcggacactgcggacgaagagtctgaaccttccgcgctggcgaaagctatgatggaatatctcgagtatgagtgccagtattttccgcccatgctggacgacgaccccattattgccgcgctgagctatgcccggcggcgcggactgcgggagggatttgtccccatgctgatcgcggtggatgaaacgctgtgggagtgtctggtcatgaactccggggagcgtcaggatgagacgcaagacgatacctttgacttcgactgcgtgacgcagtaccgcagggcgattctgtcacaaccggtgaaaaacggtcgaatggttttggagcgccggtgcggcgaacgcagaagcgaagcggaggacgatgcgatggactgggatacggaggtgctgggcgaaatggctggcggtggggtaaatgaccgcttcctgggctattgggactacgaaacccggaaaaccatgcccctgatattggcgcatatcccggtcaagcatccgtgggaagtgtttgcctatctgccctttggcggctggaatgaatgtcctgacacagatgagttgatggcggtgacgaaatactggtttgagcagtacggcgcagtgccggcggtgatgacgcatgatgtgctggaattcgatcttccggcgcctgttccgcaggagcgggccatggaagtggcgcaggagcagtatgcgttttgcccggatgtggtggaccaaggcggggaggatgccacggtgggcgccctggcggatacgctgcggcagtcggacaagtggtatttctggtgggattgacaaccggcgtacagcggctgaaacgacggaggagcagcagagaaaggaatcgtggaaatgggacttgacatttacgccggaacactgacccgatattatgcgcacaactggaaaacggtggtgcagcagtgggcagagaaaaacggctggggctttcagcgcgttacgccggaaggagatgcgattgcgcaggaggaagagctgacgcccactgagattcagaaggcgatagagcactggcgcgacggaattctcgaagccctcgtcccggagggccagccgccgtttccggcctggacggaagataacgaaacgccctattataccgacaaaccggattgggatgcatttgaagcgttgctgctgttcggcgcctgtcggatttatgacatgccggtgccggagcagtttcccaaacacgggcagtttgagcagtttgaagcggccgggcgcatgcaggcggatgagaacatgaattggtcccttttcacgggggccgtctggtggctgccgctggaggagtgctttgtgttccgcgcaccgctgcccaccggcgacgaagcggtgctcggcacggccgggacgctgttggcggagctgaagcgtatcaacgagttgtcctggcaggcggatgagaaggagatctgcgcctggagccgcacagaggggtatccggcagaggcagaggtggggcagggcggtgtgctcaccaaacagaatatcccggcgcacacgcgctttgatacggagtctctggcaaaatttgcgttttcgatcttatatcaggcggcgcgcttttctctggcgcagcgggtgccggtgctcctggattattgaggaggcggaacaatgggctttgatgtgagttttcaccccatttcccccgcagaaatggacatgtggtattttacgccgctggaatgggtgcggcaggggcagaaggacaaagtactggatctggcggagcagtatggcatggaagcggtttatgcgcagaagtatctcagcgtgctgcaggcgggggccgctgtggaggaacaggagctgtttgacaaaagccacggcttctacctggcggtggtgcagggctttttcctaacgtattattacactcggggcagcgccttttcctttctcattgaagaaaagccggtctatcggcgctataccacgccctggtgcggcgtgacgccccgcgcgtttcccaatccggcggaaaacggcattgtggaaaactactgtgccggcgtttatcttgctccagcgcaggttgtgcagctgctggaggatttggagcgcgatcccaaggtgcgttcggatctggaacggcaatggtgcggaggccagctgccagtgctggtaaaagcgctgcaggcggcccgggaacaggaacgcgggctgttggaggccacggaagttgtggagccgaaccctatttcgcccaatgaaagccgcagttattccaatctgttccactgcgataaagacggggtgtatctgtttcttgacacggccctgaaacagcttacccaggcgatggaggaatcgaaatgaacgctgaaacaggattttctcaggagggatttgatgccgtttcccgtgcgctcgagaggctctattccggccaggaaggtattttttaccgtacggtgatcccttatgctctgggaggcaaggacccgctggacggcatagaggtttggaaaagcgaacatggagtcccccactggcactatgtcacttacgggtttacagagctttacgaaaaagagagcgacatttctcaggagagcggttacgggtttgaactgaccttccgtctgaagcggggagcggaagagcagccgccggcctggccggtgaacctgctgcagaacctggcccggtatgtgttttctaccggcaatggttttgggccgggccatcatatgagctgcaatggtccgattgctctggataccgacacgaaattgacggcactgggctttcgcgtggacccggaactgggagagctggacacgcccaacggccatatgcgctttttgcaggccgtggctctcaccggcgacgagatggaggccatgatgtgctgggatgggcagcgttttctggaggagctggagcgctgcattccgttgtgtcttaccgatctgaagcgcgtttcgcagatggggcaggcggcgttttccgaagcctggaaggctggtgtggagcgggatggatcatccgttggcgttctttatctggacgaggtggaagcgcagccggaggacggctgcgggtaccttcgtctgggagccggccgtgctccgcttctggcccgcatgcttcgggcgcgagtgggaaaggggcgggatctgtgtctgtacggccgggacagcacagtccgctttcgttccggtgtgcggccggtgctggcgtgggaagacggtatcctgactgtgacgctggatgaagcagcaatggaggaactgtgtacggtgctcccattccatgcggggaaatatcccttgtccgctgtgccgctaagcattgtgttgattcctacgcggatcaccgatgcggagggacatgtgctggaagtaattgaataaaagaggaagagccgatggatccggcgtttctggaccgattggcactttcgtatggctatgcgctgtaccggctgagtcgggagaaagagacgctgccgtattttcacagggtgctgaatctgatctcagacggcgcgcagacgaaaaaatttttcgccggactgcatgcgcagcactgctgcgccgtggaggggaaatgcggcgaagcggacagaaaaacatggtattgttggccaatatctggtataataacaacaggaagcaaagcgcggaaagaaccggagggaacggtgcgccggttcggtgcctgaagggaaccggcggccgggaaaggaagcatgcccggacagcgcagagatgtgaaaggaggagttccatgaaagttgttatcgtcggcggcgtggcgggcggagccaccgcggcagcccgaatccgccgcctggatgaatatgcggagattgtggtgtttgagcgaacaggatatgtgtcctatgccaattgcggcctgccctattatatcggtggtgtaattaccgatccggcggagcttgcgctgcagacgccagagcgttttcgtacgcgcttcggcattgacgtgcgggtgcgccacgaggtcaccgcgatttatccggaacggaaagccgttcgtgtgcagaatttggataccggcaccgtgtttgaagaacattacgacaagctgctgctctcaccaggggcgcagcccacgcagcctgagctgcccggcgtggaagcggagcgggtgttcacgttgcgcaccgtggaagatacgctgcgtatccgcgcgtttgtagagcgggagaagccgcgctccgcgattttggcgggcggcggattcatcagcctggagttggcggaaaacctgcgggaactgggcgtcgatgtgaccatcgttcagcgtccggcgcagttgctcaatccgctggatcctgagatggccagttttattcatgccgaaatgcgccgcaggggcgtccggctgatgctcgggcattccgtgactgggttccaggaggaacacggcggcgtgcaggtgcttttaaagggagaaccttccctgcgggctgacatggtggtactggccatcggcgtgacaccggatacacggctggcccgggaagcagggctggcgctgggccgaaagggcagcattgcagtcaacgaacgcatggagacctcggccaaagatgtttacgccgtgggtgacgcggtagaaatctggcatacggtcaccgggcagaaaacgctgctgtctctggcaggtccggccaataagcagggacgcattgcggcggacaatatatgcggcggcagcagcgtctaccgcggtgcgcagggttcctttgtactcaagctgtttgacctgactgcggcggcgacgggtatcaatgagcaaacggcgcgggaggccggcatcgggtgtgataaaatctatctctccccctccagccacgcggggtattatcccggcggccagaccatgaccataaaggttgtttttgaaacaggaacgttccgtctgctgggcgcgcagatcgtgggtagagaaggggtggacaagcgcatcgatgtgctggctgccgccatccgcgcaggcatgaccgggccggagctgagcgagctggacctggcgtacgcgccgccttattcatcggctaaagatccggtaaatatggccggctttatgatggaaaacctggccggtgggctgctgcagcagttccactgggacacgatcgacacccttcccagggatggcagcattacgctgttagacacccggacggcagaggaatacggctccggccacgccaggggctttgtcaatattccgctggacgagctgcgggggcggctgacagagctgtgcgccggcaagcctgtgtatgtgatgtgccaaagcggcctgcgcagctatcttgcctgccgcatgttggcgcagcggggcttttcctgcttcaatttctccggcggctaccggctgtacgcatcggttaaagaagagcaggcggcggcggagcagacgctgccttgcggcatgaaccggacgtgcgtgtaatccggcggaaaaaagctgctttgcaggggtatactaaaaagcagagcacggtgctgcagttgcgatgcctgcgtttttggcggtacggctgggaactgcggtggaatagggtatagacgtacaaacagaagaacagaggaggcagttcaatggaacatatttacgatatggttattatcggcggcggcccaggcgggtacaccgctgcgctgtacggtgcccggtctgggttggatacactgattttggaaaggctctccgccggcgggcagatggcgctgaccgatcagattgataactatccgggatttgaggacggaatcgacggtttttccctgggtgaaaaaatgctgcgcggcgcagagcggttcggtgcgcagacaaagatggcggaggtgcgtgccgtccggctgaacggcgcggtgaaagagatcgaaaccgccggcggcacgctgtatggacgcacggtgatccttgccaccggcgcgacgccccgggcgctgggcgtcgcgggagaacaggagctgatcggccgcggcgtcagttactgcgcttcctgcgacggcatgttttaccggggcaagacggtggtgatcgtcggcggcggaaacaccgcagcggcagacgccatcctgctctcgcgcatttgcgagaaggtgttcgttgtgcaccggcgcgataccctgcgcgccacaaaaatctatcatgagccgttgatgaaggctgagaacattgcgttttgctggaacagcacggtgagcgaactgctccacggggacaagctgaccggcgtgaaggtgcgtaatatccagaccggcgaggaaacggaaatttcctgcgacggcctgtttgtgtgcattggccgggagccggcgtcggaattggtcaaaggtcagctggaactggacggtgcgggttatatcgtagccgacgagtctacccgaaccagcctgcccggcgtgtatgccgtgggcgatgtgcgcacaaaggcgttccggcaggtggtcaccgctgtgggcgacggcgctacggcagcctactacgcggacgaatatctgaccgagaccaagcaggcacaggaggacggcgcgcttgatcgttgaactgctgctgagcgatgcaggaaaactgctggccggacttatgcttccgctgttgggtacaacgctgggagcggggaccgtgttttttttgaagagggagtttcagccggcggtgcagaaaaccttactgggctttgccgccggtgtgatgatcgcggcctctgtatggtcgctgctgatcccggccattgatatggccgaagcgtccggcgttgtcgcgtgggtgccggctgtggccggttttctgagcggtgtgggtttcctccttctgctggacacctttgtgccccatcttcacctggatacggagcgcccggagggaaaagcctgcggcttgggcaaatcttcgatgctgatgttggcggttacgctgcataatatcccggaggggatggcggtgggtgtagtgctggccggcatgctgtcgggtggtgcgatcagcgccgctgcggcatttacactggcgctcggtatcgccattcaaaactttccggagggagctgtcatttccatgcctctggtgggatccgggctaagccggcgtaaagcttttgggtatggctttttgtccggagtggtggaaccgctgggggcagcggctaccatccttcttaccgcttggatcacgcccatccttccgtatatcctcgcctttgccgccggcgccatgatctatgtggttgtggaagagttgattccggaggctcaggcgggcgatcattccaatgtaggcaccatcggtgcggcgctgggctttgcgctgatgatgctgctggatgtggctttgggataaagcgcgctgcacaaacgaaaacaacctcggtggctattcatgcaccgaggttgttttatctgtttcagaatgcgtgccgccgccgctcaggccaggaatttgtcatacaggccgaagaagaaaataaacagcacgatcaccggcaggatataggtgagataaggccgcgcccaattgggcattttcaggcctgttccggtgttggcttctttttggaacttgtcccagccccaaccgtaacggctgacgcagaacagcagatataccagtgagcccaaaggcaggaacaggttgctgacgaggaaatcctccagatccataatggtgccgccgaatacggcgaaaccgtcccagctccatagattgtagcccagtatgcagggcatcgacaggagaatgatcagcaccagattgacaaaacccgatttgcggcggctgcagccggtcagttccatgccgcagcagatgatgttttcaaatacggcgaacaccgtggacagggccgcaaaagccataaacaggaagaagaggcttccccagaagcgtcccatgaacatattggcaaaaatgttgggcagcgtgataaaaatcaggttgggaccggaggtctgatctacatgataggtgaaacaggccggaaaaatgatcagccctgcagtgatggcgacaaaggtgtccagcacgaccacgcgggcagattcacccagcagggagtgctctttgccaatatagctgccgaatattgccatggcaccgatgccgaggctcagcgtgaaaaaagcctggttcatggtgctcaccagcgtactgattacgccgacttcccgcatccgtgcaaagtccggcagcagatagaaagaaagcccctctttggcaccgggcaggaaaaagctgttgatcgccaggatcaccataatggccaacagcgccagcatcatgatcttggtgattcgttccaggccgctctgcaggcctcggatgcagaccagaatgccgattacgaccaccacgaccatccagaacgtcattacgctggggttggccagcacgtctgcaaagaccccttccacagcggcagcgtccagtccttcaaaacggccggcggcggtcagataaaaatagtgcagcatccagccggcaactgtggtgtagaacatcatcaaaagatagcagccgatcagggtgatatagccgtggatatgccatttctgcccgggtttttcaagggcctggtaagcccgcacagggcttttctggctggcgcggcccacggcgaattccatgctcagaattggcaggccgaggatgatcaggaaaataatataaaaaagcacgaaagtgccgcccccgccctggccggcaatgtacggaaatttccatacgttgccaatgccgatggcgcagcctgcggaaagcaggataaatcccagtctggaacgcaattgatctcgtttcatggtgtatacctccccctattgcaatttccgattgtaccataaaaggttggaaattgataataggataatcccatgctataattgcgttatcttataatacgggggagtttccatgaatacaacccagttggaatattttgtcagtgtggcggagctgcacagttttacaaaagcagcgcagaagcactatgtgtcacagacagcggttacgcagcagattcaaaacctggaggaaattctgaataccacgctgtttgaccgcaccaagcggcccattcagctgaccgacgaaggaaccatgctgcttacagacgccaaagcgattttggagcggatgtacggtgctgttgcgaaactgtccaatgtgtccagcagcgtcggcggttccctgcgcatcggatatacaaaaggttacgagcgcagcagtctgtccgcgatgctgcgacgctatcaccgggattaccccaatgtgtttctttcctgctgccgtcacaatagcaaggaattgaccgaagcgctgttgtccggcgcgctggacatgattttcacttgggatcacgacccgattatggccatgcctcagatcgaatatgtggaagtggagcactcatcgttggatgtggtgctctacaacgcccacccgcttgtgtaccgttcgttcctgcgccgggaagatttgagggaggaaaagttcatttatctgacgccctcaggcaccatttgcgacgatagctatatccgcctttaccaggaagcggggtatgaaccgaatatcatctattacacggacgatatcgacagtattttgatgatggtcgccgcagaggaggggatctcagtgatgccgacgtatattacccgaaaactgtatcacacggaaggcattgtatgtgttccgctgcggggcgagcaggagtgcgccgccattctcgcggtgtggaaagcggaccgtgccaaccagcgcctgcaggaattcaaagaatatctgcaccgatgagcgctggattgggccggccttttggcgctggccttgcagcactgcagcaacggcaggatgaaacgctatctctgcgggcggttctgtcaacagaatctggatgtcctgcggaagatcctgcaccgggcgcaggtggtagaaggagatgctgaaacgcgcaacaaaacctttcaggtcattgtcttcggcgtgctggcggaagtgaaaagggaaaacacagaaggggctgatttcccccaagcccccaaggtttagatgccgtagacctctttggccatgttgaaagcggcccaggctttgggccagccggcataaaaggcggcatgggtcaaaacttctgccatttcttcctgtgtgacgccgttatttttggcattctccagatgaaaacggaacgaagaatccaccagcccctgtgccatcagggccactacggtaacgagagagcgatcccgcagggaaagctgtgcttcccggctccaaacctgtccgaagaggatatcatcattcagttcagcaaattttggggcgaaagcgcccaaggcgtctcggcctgctgttactttttccatttctgtacgtcctttctgaaatttaatgggttagggcaatgtgcagtaaaactgtatcggcaatcgcctccagccattcgctggagacgccctctgcaggagcttccgccgccaggtgggggaagcaactgtccggtgcagcgccgtgccagtgttttgcttcatggggaattggcgccacatcaccgggatgcagttcccgaaccgggcggccccagtgctggtaatatctgcgccctgtgttgattttgcgcggtgtaagccactgcgggctgacgtttgcagcagctttattgtagaacggtgcggcttgacagggaagagagaaaccgttaagatagtatcaaccaatagtttaagccgaagggggcggcgaaatgtaccatccgcatctgaaagcgtttttgtgtgtggcggagtgcggcagtttttccaaagcggcggaaaaactgtttgtatctgccactgcggtgatgaagcagatgaatcagctggaagcgcatctgggactgcacctgctggagcgaacgaaccacggtgtcgttttgacgccggcgggggaatctgtctgccgggacgcccgttttcttgtggcttattcggaggaagctctggcccgggccagagcgatagagggacagaccgcgagtattctgcgggtgggcacgtccattttgaatccctgcggggtatttatggatctgtggcagaaggtgagcggacaatttccgcagtataaggtgcagattgtgccgtttgaggacgatcacagagggattctgtccgtcctcgaccatatggggcagagcatcgattttctggcaggggtgtgcgacagtgctcagtggctgcggcggtgccgcttttatccgtttggcgtttaccaaaagtgcgtggcggtgccgctggggcatcgcctggcgcagcgggagtgtttgacgctgcgggatctggagggagaaacgctgatgatggtgcgccggggcgattctgccgtcaatgatcggatccgggatgcgctggagcggcagcaccctgccatacgcatcgaagataccgagccgttttacgacatttccgtttataaccgctgcgtgcagcagggaaatctactgctgaatgtggagtgctggaagaatgtgcatccgctgctgcgcactattcccgtggattgggcgtataccatcccttatggcctgctctatgccaaggagccgccggagcgggtgtgtgcggtcctgcgtgcgctggatgcgctggggcaggcggagaaaaacggattataatatgccgcatgctgtgcggaaaaaggaggaacccgatatgccaatggacgctgcgaccctgggcgctgccgcgcaggaagtgcgcaaggcacttgtgggggcgcgaattgataaaatccagcagccgacccgggatcagatcgttatgctgctgccccggggacagcggctgctgctcaatgccggggccaaccagccgcggctgcagctcaccgggctgctgcgggagaatcctgcgcagccgcccatgttctgcatgttgttgcgcaagcatctgaccggggccaggctgattgaagttacgcagccggagatggagcgcgtagtctgcctgcatctggagggccgggacgaattgggtgaactgtgccgccgcactctggtgctggaggccatgggccgacaggcgaatctgattctgctcgacgacggggggcgcattgtggactgtatgcgtcgggtggatttggatgtttccgatcgccgccagctgctgccgggcctgttttatcgtcttccgcctgcccaggcggataagcggtctccgctgtctctggcggagggggaatttgccgcccttctttccggtgtggaggaggatgagccgctgcatcgctggttgctgcgttcctttttcggactctcgcctctggtgtgccgggagctggtgtaccgttcctgcggcagcaccgacgccccggcggccgcgctggacgaggtgcagcgcagccgcttgtgcgcggcgtgggatgatctgcttcggcgcatccgggaagaagagtatgcgccgacgatgctggtgcagcagggaaagcctatggactattcctgctttccgatcgcgcagtacgaaggtgcggcggaggcggtatcctttgggagtatgggggaactgctagacgctttttacgaaacccgggagcgggccgaacgggtgcggcagctgggccacgatctgcgccagaccgctacggtggcccgggaccgcgtacgccgcaagattgcggtgcaggagaaggaataccagaccacccagaaccgcgacgccctgcgccgcgccggggatttaatcacggccaacctttaccgcatggaaaagggagtcgccgtcctggaggcagaggactattatcaggagaacatgccggtagtacagattgccctggatcccctgcttacgccgcagcagaacgcagcaaaatattataaacgctacaacaaagccaagacagccgagaaggtgcttcgggaacagattgaaaaaggaaaagtggaactggagtatcttgaaagtattctggaagagctttgggaagcggaaggcgagcaggacttccgcgacatccgtgctgaattgaaagacggcgggtatctcaagcagcataagggtgaaaaaaagcagatcaaacgtgcttccaagcctcgcctgttccgttccagtgccgggctgcgtatcagtgtaggccgcaataaccggcagaatgacttgcttacttgcaaggaggcggcccccggcgatctttggtttcatacccagaagatccatggttctcatgtgatcctgcacactgccgggcagccggccgacgagcagagtatgcgggaggcggcgcagctggctgcctattattcccgggcgcgggagagtcagaatgtaccagtggattacacgccggtgcgctatgtgaaaaaaccggcgggggcaaagcctggcatggtgatttacacgacgtaccgcaccgtttatgttacgccggaagagagtcaggtgaaaacacttcgggaggaatgaatgaggatgatcgaacgggtggatgaggggaagcaggcttatctcccgctcctcctgttggccgatgaacaggaggacatgatcgagcgctatctggaccggggcgcattgtacgtgctgcgcgaaaatgacatggtactggccgtatgtgtggtgacggaagaaggcggcggcatttttgaggtgaaaaatctggcggtggcgccggaacatcagagaaaggggttgggccgggctatgctggattttgtgcaggcacgttatcggggctgcggccgcttcctgcaggtcggtaccggagaaagtccgctgacggtcccgttttatcagcgctgcggctttgtttattcccaccgtattccggattttttcacgcagtactatgaccatcccattgtagaagccggcgtgcggctggaagatatggtttattttcggcggccgctgtaatgacgctgcctcgaccgctttggcgggatttcttggatgggcatggggtaggatacaaggcggatgtgtgcgttaccggctgcgggaaagacaaagtgtggcaaatgtgctatgctggaggggaaacatccgatcgtattcatgatattcctctggaacagagcagggaggaacaacggattgaaacaggaagcgtttgccggacaaaagaatatatacccagtgccgccgcaggcggtgctgaacgtagatgtcctgctgcaggaggtcattgcccaggcaaagacgctgcatatcccggtgtcggaacatatccagccccatgtgcgtattaaccggcgtgccacgggccggttcggcgcctgttttgccgatcggaggacgggcacgtttcaaattgaaatatccgacgtgctgctgacggcacggcggcaggtatgctgccagacgttggctcatgaggtgctgcatacctgctacggctgccaaaaccataaaaaacgctggcagcagtatgccgagcgcatgaactgtgcgtatggctatgccattgcccggacggacagtccggaacggctgggggtggagaataaacgggtggtgcgttatttggtgcgctgcggcggatgcggagcggagattccccgcgcgcggcgctcccgtttggtggagcacccagaggagttccgctgcgccaaatgcggcggaacgctgacggtggagcgtgtggcggagcagaagtcatgacatcggaacgttatgaaaagctcgtagcgccgttgcggcgccatccccgggctgtcgccgcgctggcgggggtgaatcaggcattgactgcgctttgttatacagtttacccgttgttgcttcttttccttctgggggagagggatgcgcgattttggcgctgtctgttggtgccggcggtttcctttgccgccgtcacgctgttccgctcggcctgtaacgcgccccgtccctatgagcaagggattgacgcgctgctgaaaaagaagcggacgggccattcttttcccagccgccatgtattttctgcagtgatgatcgctgtcacagcggcttatctgttaccggcgctgtctgtaccgctttttgtggcagcggccttgctggcgctgattcgtgtgctgggtgggattcattatcccagggatgttttctgtggagcgctctttgcactgatcgccggcggaatcggcttttggctgatcccctgaaaaacagaaaaacaggaaccgatcctgacacgatcggttcctgtttttgtttgccatattcaccggcggcctccaaagccgccgccgcgggagccgcctccaaagccaccgccccggtggcctccgccgaaacttccgcccccgaatccgccgcggcctccgaagccgccgccccggtggctgcttccgctgaaactgccgctgccgaatccaccaaaaccgcctccaaagccgccgccccgatggtcattgcggtggttgctgtgcggcgtctgcggcctgggcggcggagggcggtagcccatatgccgcccccagaaaataggacggtagatcacaggaggcacgcccatgccgggctgccagtaacgccggcgataggaactgtaacgcacgtaatcgagtatccaccaggaaaagagaaccagcaacacaagccccagcgtcagagcagccatggaaacgacattcacacgcggctctaccatctgataggtcaccgtgtcctgaggcagaatctccacgctataataggtctcgtaccagcgcagcagggcgtcgaaagtatcgattacaccccggtcataattgtggctgtaaaacggctcttgaaggtatgtaaccagagtctgcgtcagatcctggtctgtcagggcgtggtagatcccgtcgccctgcacggccacggcgccgctgatgctgtcgtcgccgttttcggtgtccagcagcaggacaatgccgttgttgcgctggctgtcccccacgcccagttcgttgcccagctgaagcgcataatcatacaaatctccgtcgtagctggagacggtaaccacggcaatctggccgccggtcaggctgaccagaccgttgttcatgcgggtaatgtagcgctccgtttcggcgctgaggatgtcggcatagtcgtaaacgtaggagaactccagggggatgccttcctcgttctgttcatatacgggcggccgtttagtctgaccgattaaaatacccaggacaatggcggcgaggaggacgatcagcgccgtgctccgccgttgtaagattttcaaatcaagttcctcctttggggatgcggctgatggaagcttttgtacggccggc

SEQ ID NO: 2034 - DNA, 5765 bp, Unknown
  16S sequences of unknown bacteria
aaaaatatcacttatgttttgaacggatgtaggcggcccttacggtccttatgttcaaagcgagagaaaacctatatacaaaaaatatgcggaacagcttgttgaatcaggtcacgcttactactgtttctgcacaaaggaaagacttgaagaagtaaacagaatcaaaaagctttccggccagccaacaggctatgacggacactgccgcaacctttcaaaggaagaagttcaggcaagacttgacgccggcgaagaatatgttatcagacagaaaattccgcagacaggggaaacatattttgacgatatgatctacggcagaatcacagttgaaaacagcactcttgacgatcagattttgcttaaagcagacggtatgcctacctataactttgctaacgttatcgacgaccaccttatgcttatcaacccggttatcagaggtgcggaatatctttcctctgcacctaagtacaatcttctttatcaggcattcggttgggaaattcctgcctatgttcactgcccgcctgttatgagagacgctcacaacaaattgtccaagagacacggcgacgcatcctatgaggatttggtacggatgggctttttgaaagaggctatcatcaactacatcgcacttttgggctggtcaccgaagtcagagcaggaaaaattctctttgaaggaacttgaacaggtatttgacccggctaatatttcaaaatcaccggctattttcgatatggccaagttgagaagccttaacggcgaatacattcgtgaccttacacacgaagaatttaaggaaaaagcattgccgtttatccgcaagacagttaagagcgactgcgatattgatcttttggttgaaaccttgcagccgagatgcgattgtctgtcggaaatttccgagcaggttgactttatcgacgctttgccggagtatgacatttctctttacacaaacaaaaagatgaaaacaaacccggaaaattcaaaggctgttttgcaggctcttgttcctattttggaaggtattgaggattggagcgttcagcctattcacgatgccttggcaaaattggttgcggatttgggcgttaagaacggccaggtgttctatccgctgcgtgttgcggtttccggcaaacagtttacaccgggcggcggcgttgaactttccgctatcctgggcaaggaaagaacaatcgaaagagtaaaaattgctatcgaaaaattgtaattgacctcgactaaaaacttaatatttagccacggattagtctccgtggctttttcttttgcaaaattgttgtttaaatttactgtattttgtactatcacggaatatggcaaattattttattccctgcggatataatatctttaaattatattggcgaaagggtgtaaatatgtctgccgtaagtaaaaaaataaagagtgtaaatcaaaagtttcccgaaatttataaaatctgtacatatatcttctcttttgcgtcggggtttggctctttaagagccgccccgtcagatgtgcctgtgacattttttatcgtcacgcttttgtactgccaaagaagtttggaaaaacagctttgtcttttggcagggtttatggtcggttttgttttaaatgccgccaatgcttttgaaaactttgggtatttaatagccattatattactttttgttataaaatattacataaaaaaagaaaaagccgccttaatcatctccgcagcggcaatgacggcttattctctgtttacaaaccttttatacgccccatggcaatataaagccctggcgctggtaggcggtacggtgcttatatatttttccgttatggcggaatacggtgcagaaatccttaaagggggaaaattttcttcttcgttttccgaatatttttgctgtgtttgctttatggcagccagtgtttttctgctgtcggggcttaacagcgcatttttaatgccgggggttatgttatcaacggcttgtgcttggaaaagcgcagaaagcggaaatatggccttttctcttacaagtttgattttgtgtttggctttgacagacgacataggtttgtttgcccggtattttgcttgttttttgattatttgggcggcaggttgcttggcggcggaaaagggtgaacttaaactgtttgcgtctgttgctttggcggctttgattttaaacttaatttttttatctgattttttaaatttttctctttttcttaccgttgtcggggcaattttggcttatccttttatgccggctataaaaccggcaggcaatttgcaaacgggaaagaatttgaacataagccggcggattgaaaatatggccgattcgataggttatatttccgactgtataaccggcatctatcgggtacaggagaaaatcttttcttattccgccgccgataatgtggcggaaacgatttgccgaaagtgccctaaaaaccacatatgttggtttgaaaattacgattttacatacggcgagtttttgaaaaaggaaaaagaaccctgtggggatttttctcggggctttttggcaagatgcgctaaaaccgaagagataaatcggcggtttgaaaaggaaaatcaacttaggaggataaaaaaatacgcctccggccggcaaaaagcaaatcggcaaatgctgcggcatacactgggggaaatttcatcttctgtggctgatctgtcagctcaaatagccacgcaaaggcttgcggacatggatcttaccgcaaaattggacaatctgctaaatgatataggtatattgcacagccattgcatttgcggtaaagagccggaagaggtgcaatttaccgccaaggataagccgacgaaagaggcaatagcaattataaagtcgaaaatcgaaaatatgtacgggcgaaaatttcaaaatccacagatagacaaacgcccggaaggctacacggcggtgttcacacctgtgccgaaattgaaagcccggtgggcggtaagcgaaagacctttggggccggtaagcggtgacggcggaactgtttttataaacggcacaaagctgtatgctgttttaagcgacggaatgggtaccggcaaccttgcggcaggtgacagccaaacggtgttgtcccttttgcaaaggcttataacaggggggattgcaccggacagggcgctggatatggcaaacattacctttaatcttcgccgtgacggaagttgcgcaaccggagacataaccgtgattaaccttgaaaccggggattgccggatgtacaagtgcggcgcagtaaatacagcggttataaggggcggacgggttataaattacggcggcgacagcttgccgttagggggcagcggaaaaattaaaccctaccgacggcaaactcttttaaaaaaaggtgacacggtgataatgaccaccgatggaattaaaaatttgcccggggatatagcggattttgcatctgaaagtccggacacaatttccgcacatgtgtgcgccgccggagaaaataatgacgatataaccgcattggtgataaaaataaactgataatcgaagatctgtatgttgcccttgtgtaagttaaattgacaaataatccccaaggggctataattgccgtggatagagggtttgaagaaataagattgtatccttaaatcagagaatgaaaggttaaaatgtcatcaagtaaggattatttgcagttcataaccgaacaactgtcgggcttggaggaaatttcttatcgtcctatgatgggcgaatatataatatattatcgtggtaaaatcgtcggcggtatttacgataacaggttgcttataaagccggtgaaatcggcagtttcttatatgccacggcctgtttaccggttgccctatgagggagcaagggaaatgatttttgtcaatgatgtggaggacaaagactttttgacagggctttttaatgcaatgtacgatgaattgcccccgccgaaatcaaaaaagaaaaaataaaatttgcaactgtacaaagtgtggatatgtgatataatatcagttagttaaggctaattcaaaataaaaggtctgatattatgttaaaatacggtatttacgctaaggcggtggagctgttgtgctttaagtccgccttgaaaaaactgtcggttctacacccggaaattgatataaaagaatataagaaaaaggttaaacaggagtataaagccatgcttttgcgcaccccggatataggtggcagttccttggaaatgaacttatacatagcggcttttgtgttctctttacacaaggcccatccggagaaaatcaccccggaggttgtggacgaaatggttacggcggtatttgagtcgccgtttatgataaaagctcacaaaaacaaaaaatgcaccctgtttaccgacaaagtacaggacaaaaaggttaaggagagtatagcaagccaaaattcaccatatgaacttgattggaagtttaaatacgaaaaaggcaaggacgaattttacaatacttataccgaatgcggaatttgcaaattgggaacaagggaaaactgctttgaatttgtaccctgcctgtgtaatatggacgatagaaactaccgcaacgagggcggcaagttacaccgcacaaaaacactggcacagggggatgattgctgcaatttccatgttacaaaaataataaaatagctatatttcaaggggatttgattatgaggataaaacaacaaaatcggataaaagattttttaacccgtgaatatggccggggaaaggctgtcgatttatttgctcgtcaggagagcgagctaaataaggctattgaaaatacctgtgataaaaccaaaaatcagatgaaaactcttacaaacaccgttttgccgagagttgctttgtacaaggctttacaagaaaaaggttttacgcaggagcaggcttacgaatgtttgcgaaaatatatgattggcgttgtgggggttaaaaaacatggatcaaccgcaagaatggaaatcgtaccgggattttatttcctgtacagcaatatctttcttaaaattatgcaaattaccgacttacagcaaagccgacaggcaaagggcaaagattattttgatgtgacgattacaaaatgcctttggcataccgcatgtgttgaaaacggatgcggagaattgtgccgtcttttctgcgatgtagatgatattacatacggcggacttaaaaagatggggtttacccgtacaaaaactttgggttatggcggcgattgctgtgattttcacttttttaaaaaacaataggcaatttaaagtgcctttgaaaaaattccataggagaaataaaaatgagcagtaaaaaaagatttgaagtaatacattccgagggcggtttcagcggcgttgtggaaattttggttgataaagaaaccggcgtaaattacctttttagagccagcggttgtggcagcggtttgacgccgttacttgacagagaaggcaaacctgttgtttcacctgttttgcaggaagaataaaatataaaaataaattaagccgtaggtgggagtatttaccgtctgtacaggcgcagatttgcactgttcggtagctgtaatagtccttacgaaagtgaatatcgtatgtaaacaaaatgtttatcaatctctcagtcagctacgctgacagctctctttaccaaagagagccttgcaa

SEQ ID NO: 2035 - DNA, 6269 bp, Unknown
  16S sequences of unknown bacteria
cctaataaggtaagcgcgtccccgatgttgatggaaaaccctccatctagggacaatgttcctatgcccagcaagcaaaggacagccgcgatcacattaaatttatccggccgaatatggcggacaccccaaagcataaacggcaccagcaccacatacacagccgttaaaaatgcatttttgcctgctgttgtatattgcaacgctacggtttgcaataggtatgccccatacatcaacaccccaaccactaggccggccaaccattcctttgcggagattcctccgagctttttccacataaaaattcccatcagcacagccgcaatggtaaagcgaaacgccaggatataattcggcgttatggcgtccagggcatccttcatgacggcaaaggcgcatccccaaatcacgcaggcaatcaacatcatgctctctgcaacccaagtcttcaatccatctatccctttcaaaatataagtatcgcaacttttttagtatatcatgttcttctcttttctccaagattctgcccttctggcaaacaaaaaggaaagcgcagcatgctgcgctttcctaaggatggtttgcctgctttatgttgtcttttttctaaggatccaaagcccggctgccgctgctgcggacagcacagcgcctgctagatacaccaacatgccggctttatctccggtttgcacggccgtatcgccgtgcaacgtattgtttcccaacagcggcgtttgttcttcgcccccgctgcccgccaaggattctgccgggtctccatacaccaaagcaaagggcgaaaagcgttgcgtttcaaaggtaacgattccgttttcaaagtgtgccgggagctcaaaggtctgtccgtcatgcatggtcagcaccttaaagatgcggcctgtgcgctgcatctgcgtgggcacagcaatgctgaatcgaacaggtgcggatagctctgaaagctgacccagcactgtggaatccgcccgtacgatggcgctgatatccatcaaactcccaacttcaaagcgatagtgcccctggttaagtgttgtcatcgcctgttgcagccaggcgtcctgtgctttgccctgtttcatctgggcaatcgccagctgtgttgtgacatgcttgccttcccgcaaagctttttgaatacttgccacaagctgagcgtcgtttccgttgatggatgcgatattttgaatggtatccaccagcgtctgctgcgcttgcagccggtccgcctcctgcatgccagcaataacctctttgtcatccggctgcgtaacagttggaagctgctcctctattctctgccaaactgccgtcagcgtcatgcttttggccatgttttggatgataggcgaaacgcttgctccggtttcatcctgccagcccaggaaatcgtagccttcccgatagggcgcttccagcgcaatgctgtcctccacggtaaactcgatgggtgccctgtctatgtttccaaaggtgatggtatattgattccgcgtccattttgcatacagcgtgccgcccgccataaccggctgcgccacatccacgcggtgctccggcagataggtattctgcgaataccagccttccaatgtgtagccctttctttgaggcgccaggctttccggcaacagcgctccctggcctacggaaattttgtaagcggggtttacgccgtcatggatggtaagggtaactacgttccggctccaaaccgcatacaggcgaatctgccctccctgctcattggtcaggtttttgacctctgcctggtcctggtatacggccgccccatccggctcggtggcccatccggcaaaagtgtagtttgctttggtaaactgattttgcggcaacgcgtgggtttggtcatacttcatttgcaaaccggacaccatcgcctctggattgtccgcgccgttgccatccagcacaatcgtatactgaatgggggtaaagtctgctgtcagcgtcagatcctgcatcacaggatcctcctgctgccaaagcatatccgtgccctcttgcttccagccgttgaacacatatcccgtcttttccggcgtgggcagcgtaagcgtatcgccctggtttagggttttttgctctgtctgctctccgtttttcagcgtcacggccacggtattctgctgccatacggcatataaattgatgaccgcgccttcagtatccgccgcctccacgacattggccctatcgatatagacgacctcgccgtttggtacagctgcccatcccataaaggtatggtatggcttggtaaatgcgttttgcggcaataggccttcctggttaaacttcaaggtcaaactgctatgctccatggcattttcgttctctgcgccattgccatgaaacgcgatggtataggaaatcggctcaaacttggcaaacagcgtcgtttcttgcaccacgggcgtctgtacttcccatttgccgcccccttcggtataccagccgtcaaacgtatatcctctcttttgcggtatttgcggaaatacaatgaggtcgccgtgcgctacattttgcatctggctttcactgccgtttatcagcataacagggtaagtctgcttttcccaaacggcatagagatccagcgcctcgccattgaggtgctgcggatgctggataagaacggaggtctcatcctcatacacggcctgtccgccgctttccaaggcccaccccacaaaccgatggttttctttggcaaacgaatgggccggcagggtatacgccgtgccatatacggcgtcttgcaagttggcgtcttcgcccgtaccaccgttggcgtgcaggttgatggcatacgcttcgccggtataatcgcgttcggtccaggtggcggtcagcgtaacgacctgatcctttttgaaggtgaggttttctacctgttggccgtcggtcaaaattttgccgttcggcattttccagcctgcaaaagtatagtgctctttggtatattcattgggctttaacgcctgtgcctggtcataggtaaaggtctgcggctccatggccccgttaccgccgcccggtagaaactgcacggtatattggatgggctggtaagcggcgtacaacgtctgcccctctaggcgaagggtctgcgttttgctgggatccagcgcctgggtacgttgaggatcggtataccacaccgtttggtacccgcttcccattcctttggggaaggactgctccgccaaaaactccgtccactgatacgactggccattgtttggcagcttgacgctctccaaattgttgtaataagcgataaagcgaatgttcatcggattttggctgagatccagcgtggtaagcagattctcccccgccgataggaaatccagggcgttgaggtttgttagatccagcgcagtgagctgattggcaaacacatccaaatgcgttaaagtatcattggcctgttgattgggcagcgttaggctggttagctgattgttgcccgcatacagcgctgcgagctttttgttttgtgaaacgtccaaggtggtaagccggtttagttccacatgcagcgtttttagattgggaaagtgctcaatgccggtcaggtcgctgatgccggcatagtttaggtatagataggttacggcgccagcctcctctgtgctaagggtatcgtcgtcgtttttatccaggttttctttgatataggttcgaaatttttcatctggaaattgggtgtcgttgatctcgacgccctgtgttctgctttgctgtgcaagcgccaaaggcacattgcccacgagtaagaagcatcccgcgagaaccgttgataatagtctttgcagtttgtgtttcaaactcattcctccttttgtgatgccgctataatagcatagttttcatactaaataaatatgatattgggcggtaagttttggatggtattcattggcaatctactaaaaaaggcccgcaaaagcgggccttccatgcgcgattttaattttcaaagtattgggccaatcgtgtggcaaacggcgccagcagccccagatcgaacaatatctgtaacaagccgtagcgattgcgcagctccttggcatacaatacgccgtcctcgatctgctgggcggaaatgcccacctcatgcgggttaacgggggcgccatagccggctagcattttgcgtatctcttcgcttttgggcagccatacctgggcaaaggctttcatgtccgcaaagtgcttttctatggcgtcgatacggcgcaacacgccctccgtgctgtttttgcctgtttcacgttccaacgccaatacaccctccgccgcatccggataagcgcgccgaatttccttggcccacgtatcgaatgaacgtgtctgggccgcctgacgcgcagcggcaaaatccaccggcgtttcccatagccaatcgtacattttggaaacggccaccgttccaatgccaactttggtgccatgcagcacggcctttttgccttcgtgtaggaacatcatctcccagtaatgcgaaatgtgatgttcgctgcccgaggccgggcgggaatttcctacaaagctcatggcaatgccagtcaaaaccaacgcctccatgatcttgcctaccgtctgttcatcacgggctgcggccttatcaagattctccgccacagctcgcaacgaagtacgcaccatttgtacgatggcctcacagtaatactccccgttgatgatctgcgccattttccaatccgtcaggcaggtatatttgccaaggatatccgcaatgcccgccataatcatgggcatcggcgcttggctcaatatctttgtatccccaatgatggcgtccgctacgcccacctcataggtggtttttagattatttacaatcaacggcgccacagaggaagcaaagccgtccatgctgggggccgttgctacgatgcaatacggcatctttgtcttaaaggcggtaaacttgcatagatcgttgatcgagcctgtgcccacgccgatgagcagatcgcaggcagggtctagcgctatgagaaggcgtcccaatgcagattcatccggaaccaactcctcatcttcaaacatataggaggccacgccaagccccgcctttacaagcagcgtttccagctgcgcggccgcggccctgtgcgtatggacgtcggacaccacaaacacctttttcgcacccaaggccatagccacctccggtgtcttttgcagcgcatccggcccgatcacgacatgcttgagcgaggtgtggtgcgctttgccgcattcacaggcaaacgattgatttaaatagtcctgaatggaaaatgtatcgggttgtattttcatcagcgaactcatctcctatttgtatcatagcccgcgctttgcacagggtcaagcgcgccctacataaaagcgccgggccttatcggcctggcgcttttcctttgtcttatgttatacgttggtcatggctgcgtgcgcttcctttaggcgctggatgatggggatatgctgcgggcatttcttttcgcaggccccgcactgcacgcagtgatcggccgagttgccagaatcgatgcgtcgctgatagcgctccttgatggtctcatacccgccgtacatggcgccgtcgttatacagctcaaagacgctgggaatattgacgcccttggggcacggtacacagtatgagcatccggtgcacggcaccttaatgagctttttatacgtttcgcgcacggtatcgatcatcttgagctcatcctcgctcatgctgttgggctgagcgttctcaaagatgcggatgttatcctgcagctgttccatggtggatacgccggaaagaatacaggaaacttccgggaaattatacataaagcggagcgcccactctaccgggcttcgcttatcgggatagctgcggtagatctcttggatgggttccggcggattggccaacccaccgccgcgcagcggctccatgattacgatggccatgcccttggaagcagcatatttcatcccttcaatggtcgcttgattgtctacgtccaaaatattcatctggatctggctcatatcccagggataataatcgatgacttccttataggtctcaaaatcgtcgtggaacgaacaggcaatggccttgatctttccctgtgccttggccttttccatcatggagaccatattgatttttttcagctgggcaaaggattcct

SEQ ID NO: 2036 - DNA, 8328 bp, Unknown
  16S sequences of unknown bacteria
agggatataaggcgcaggcgattgcggacgatctgaaagcaagaaacttccgccgcaaatgcgggaaacatcttacgcagaaatttatctataaagtactgcacgacaaacgttatacgggtatcgttacgcatcagggaacggaatacgacaacatctttcccccgatcattacaaaggagctatggaatcaagtggacgcgatcaatgaagaaaacaaaaatgcacccggccgtaaaaaagagatcttcgactacatactttcgggaaaactcatatgcggcgactgcaagcataaaatggtaggcgagagcggcacgagcaagacgggagatatccattattattatacctgcctttccaaacgccgtggcaaatcggaatgcgggtgtaaagcgatcaaaaagcaggtattggaagattacgttatcaacgctaccgtggctatgctgcggaggaacagcgtcatcacaaagatcgcggaaaccattgtcaaagtccatgagaaaatcatccgagacagttcgggattacagacgctcgttaagaagcgcgacgaggcgaagaaagcggctgataatatcgtaaaagcgatagaaaaaggtatcatcaccgattttaccaaagacaggttagcggctctgcaagacgaggtgaactgcctggatatagagattaacaaggaaacgcagaaaacctatgcgcatctgacagtcgaggaagtagaaaaatatctcctctccaaagtgttcgaggatcccgacgatatgaaaacccggaagacgattgtaaatacctttatccgcgatattatctggtacggcgaccgtatcgtgattacctataacttccaggagaacatatttacggaaagattttccaaaaactatgtggaaaaagctgaaaagcagatcggggacgcttcccggtctgcctcttctttctctttgagttcgtacttattccctcaatcggcgccataaaaaaagttcgaatagcgatgtagctattcgaacttttttatatataaaggaattttttataagaagacagacgcgttaatgcgtctgtctttattttaataaaataaataatgtgttataataaatgtgaatatcattcagaaaggggatgattccattgggtttttgatcgttaaaaaagaaaaatggaataatttggtaaaagtccgaacttttactgtaattgaattttgtataataaaaaggagtgataatgatgagaaaaagacattgaagaaagcaaagataaagtggatcgtaaaacgcctctcttatattaagaaaatgatgaaagagaataaggtggaagcggattttcggatcggcaagaaaaaagaacacatcgttatcgatgacgatgtgataaaggttttggcgatcatggatgaaatcatagaaaacgaaaagactaaatggctgcaaaaatgtttgtctgatgtaaagaaagggagaaaaggcataaccattatagttgacagcccctttgaaaaaggcaagttttatttgacaaaagaacgatttatcaataaaatttacgaatgttgtatttataaaggatacgtgtcgtatgacgacataatgaacgaagatatcgggtgaggcaatgcgtaagaaaagtgcggaagaggtattagaacttctaatgcggcatttaatagtcgggatagaagagttgttcgattataagaatatcgaaggggaagagtttcaatacggcgagagagtggcatacacggaatgcctggaatgtttacaacagtggaccaatgcggaccggcacggattagatttcgatatcgaaaagagatatccgttatgaaccaagagcgaaataagccatatttatcgcaagcgcgtataaatatggcttacttttttctaatggcacatataattttttgtgataaatcgaatttcttctgaatcattgacaaaacggcgggcaaagaattataatttgggcataaaattcaaacgggcaacaaaggcgttgcggcggagacttcaaaggcgaggtcttctccgcggcgccttttgcttttgcaggaggtaaaccatgaaagtccccgaattgttcgcatcgaacgtattcaaccgtcagatcatgcaggataaactgccgaaagaaatttacagatcgctcttaaaaaccatcgacgagggcgcgccgctggatatgagcgtggcaaacgtggtcgccaacgcgatgaaggattgggcggtggaaaagggcgccacgcactttacccattggttccagcccatgacgggcgtcaccgccgaaaagcacgattcttttatatcgcccaccaaagacggcaaagtcatcatggaattttcgggcaaggaactggtcgtgggcgaacccgatgcgtcgagtttccccagcggcggcgtgcgcgcgactttcgaggcgcgcggctataccgcgtgggacccgacctccttcgccttcgtcaaggacggcaccctttatatccccacggcattcttttcgtacagcggcgaagtactggataaaaagacgccgcttctcaaaagtatggctgcgctcaacgagcaggcgctgcgcatattgcgcctgttcggcaacgaaacggtcaagcgcgtgtatcccaccatcggcgcggaacaggaatatttcctcatcgatcgtaaaatgtacgacgcgcgcaaagatcttgtttttacgggacgcacgctgttcggtgcgaaagccccgaaagggcaggagttggaagaccattatttcggagcgattaagacacgcgtttccgaatacatgaaggacttggacgaagaattgtggaaactgggcattttggcaaagacaaaacacaacgaagtcgcgcccagccaacacgaactcgcccccgtctttacgagcacgaacgtcgcctccgatcagaaccaactcgtgatggaaacgatgaaaaaggtcgcaggccgtcacggattgtattgcttgcttcatgaaaagccttttgcgggcatcaacggcagcggcaagcacaataactggtcgatgagtacggatacgggaatgaacctgctcgatcccggctccacacctgcggaaaacgggcagttcatgctctttctgacggcggtcatcaaggctgtcaacgagcatcaggatcttctgcgcctgtccgtcgcgagcgccggcaacgaccatcgtcttggcgcgaacgaagcgccgcccgccatcgtatcggtgtttttgggcgaagaactggaagcggtcatcgattcgttggagaggggcgtcaagtacagcgacaagggaagaaaaacgatgaaactcggcgtagatacgctgcccgagttgccgaaggatacgaccgaccgcaaccgcacttctccctttgcttttacgggcaataaattcgaattccgcatggtcggcgcttctctgtcgcttgcgggtccgaacatcatcatcaacaccatcgtcgcggacgcgctgcgtacctttgccgaagaactggaaggggcaaaagatttcaatgcggcattgcacgatctggtggtacgcgagttgaaggagaacgggcggatcctgttcaacggcaacaactattcggaggaatgggcgaaagaagcggcgcggcgcggcttgctgaacttgaaaaatgcggcggaagcgctccctctctttgcggataaaaagaatatcggtctttttgagcgcaacggcgtattcaccgcgcgcgaagtcgtcacccgcacggatatcatgctcgaaaattactgcaaggtgctcaacatagaggctcttaccatgattgagatggcaaagcgggatatctggcccgccgtcaacgaatacatcgaaacgctgtgcaacaccgctcgcagtaaaaaggaggcgggcgccgcagcggctgcggatcgtcggctcatacaaaaactgtccgccgacaacgatgcgatgttcgagagggcggaggcgctggaagggctgctcgtggaaggcaaagcgtgcgggacgcccgcgctgctcgcggcattttttgcggaaaaagtcatacccgtcatgtgcgaactgcgcatgtacgcggacggaatggagttggataccgccgcgaaggtctggcctttcccgacatacggcgatatacttttcagcatgtaagacgtaaaaaactgcaacaaacaataaattttcggaggtatttcgaatgggtatattcggttcgacgggcatatggtttttgataggcgccatactcgtctggtttatgcaggcagggtttgcgatggtggaaacgggtttcacgcgcgcgaaaaacgcgggcaacatcatcatgaaaaaccttatggatttctgcctcggcacgatcgtgttcgtattgctcggcgcggggctgatgatgggcgaggacgtacttttcggcttggtcgggctccccaatctcggcatttttaccgattttgcaaattacgattggtcggcgtttttcttcaacctcgtattttgcgcgacgaccgcgaccatcgtttcgggcgcgatggccgagcgtacgaaatttttgtcctattgcatctattcttgtgtgatcagcgcgatcgtctatcccgtcgaggcgcactgggcgtggggcggcggatggctctccaaagaaattctgggcgtgacatacattgattttgcgggatcctcgctgatccacatggtcggcggcatctcctcgtttatcggtgcgctcattctcggtccccgctggggcaagtatctggataaggataaaaggcccacgcttgaccgcagaaaagcagtgcacgtccgtgcgattcccgggcacaacctcaccatcggcgcgctgggcgtattcattctctggttctgctggtacggattcaacggcgcggcagcgtccgatatgacgcagttggcgcagatcctcgtcgtaacgacggtcgcgacggccgcagccacctgcgccacgatgatatttacctggatcaagaataaaaaaccggacgtttccatgacgctcaacggttcgctcgcgggactggtcgcgatcacggcaggctgcgcggcggtggacgtggtcggcgcgttttttatcggcgtagttgccgggatcctcgtagtggtcgccgttgaattcatcgataaaaagttacatatagacgaccccgtcggcgcgatcgcggtgcatggctgcaacggtctgtggggcacgcttgcatgcggactgttctcggtcggcacgggcttgttctatacgggtaacttcgcgcaattactggtacagttcatcggtgtcgtcagcattgcggcgtggacgatcgtgtgcatggtcgctctgttcctcattctcaaacgcacggtcgggctccgcgcttccaaaacggaagaggtggaagggctcgacaagcacgaacacggtctgcccagcgcatatgcggatttcgtggccgcgccgctcgcggctgaaatgctcgatcccgaagggatacctgccgagcctgcgggcgtgccggtggtcgatacttcggcgcccgcgttgcggcagagttccgaaaaagacgaaaagttatcgaaggtagtcatccttaccaaacagtccaaattcgaagacctcaaacagtcattgagcgctatcggcgtgacgggtatcacggtcacgcaggtactcggctgcggcgtgcagaagggcgcgggcgaatattacagaggcgtcaaggtggatatggatctgctgcccaaggtcaaagtcgaagtggtcgtcagcaaagtacccgtagccgaagtggtcgcggcggcgcgcagcgcgctgtatacagggcatatcggtgacgggaaaatattcgtctacgacgtggaagacgtagtccgcatccgcacgggtgaaacgggttacgacgccttgcaggacgagaacggataaacgggtgcgatttgttccgcacgttgctcgcgcaatgggagagccccgcctgaaaattctcaggcggggctcttccgtataaactcccgttatacggtgtatcagcataacaaaacgcaagtttttcttatggtttccataaaaaatggcgaaaaaacgaatttttctccattgcttgacggtacgcacgggcgaaactataataaaacgcgtattgaaaagtgcaagggagagcgacaatgattttatatgaaggtcaattcagaaacccgtcgggctgcgcggtcgcgggcgttatagacaggagcggcaggcccatgagcggcgagggaatgatcgaggcgatctctgtcatgcacgatcgttccaacggtctgggcggcgggtttgcgggttacgggatctatccgcattacaaagatttttatgcctttcatctcttttacagcaaaaaggaggcgcaggaggaaacggaagcctttctcggcagacattttgagatcgtctattcctcggaaatgcagacgcgcaagatcccttccgttcgggacgaaccgatcatttaccgctattttttcgcgcctcttccgcaaaaacttgcgcgcagccatctggacgaacgcgaatacgtcgcaaggtgcgtcaaccgcgtcaatgcgcagataagcggcgcctatgtcttttcctgcggcaaaaacatggggatcttaaagggcgtcgggtatcccgaagatatcggcagattttaccgtctggaagaatacgagggatacgcctggacgtgccacggccgttacccgaccaacacgcccggctggtggggcggcgcgcacccgttcgggcttttggatctttccgtcgttcacaacggcgaaatttcctcctatgacgcgaaccggcgttatatcgaaatgttcggctacaaatgcacgttgcagacggacacggaagtcattacgtatatcatcgattaccttatgcgcaagcaagggctcacgcttgaagaaaccgcgcacgtcattgcggcgtctttttggagcaccatcgccgaaaaggaagcgggggcaagagaacaggaaacgctcctgcgccgtatgtttccctcgctgctcgtaaccggaccgttctccgttattctgggctatacgggcggactgatggcgctgaacgaccgcttgaaactacgttccatgatctgtgcggaaaagggcgataaggcatacatttccagcgaggagagcgcgatcaggcgcatcgagccgtcactcgataagatctgggcgccggcaggcggcgaacccgtcgttttcgaactgtacgataaaaaaggagagcgcgagcaatgaatatgtatatacagcccgattatgaagtcgtccgcagcgaaaaaaaatgtattgtttgccgtgtttgcgagcggcagtgcgccaacctggtgcactctttcgatgcgcggacaggaaaaatgctcgcggacgattccaaatgcgtaaactgtcaccgctgcgtatgcctgtgcccgacgcacgcgctaaaaatcgtgagatcggacgatgtctataaaccgaacgccaactgggataagccgacgatcgacgaagtatataagcaggcagacacgggcggcgtgctcctttcctcgatgggcacgcccaaaacgtatccgatctattgggataaaatgctgctcaacgcctcgcaggtcacgaatccgcccatcgatcctttgcgcgagccgatggaaacgcaggtatatctgggcaaacgcaccgttaggatcgaacgggacgaaaagggcaggatcaaaaacaatctgccgccgcaactgaaattaaaggtgcccgtcctgttttcggcgatgagttacggttccatttcttacaatgcgcacgagtcgctcgcgcgtgcggcggagacgctgggtatctattataatacgggcgagggcggactgcacaaggatttctacaaatacgggaaaaataccgtcgtgcaggtggcgagcggccgattcggcgtattcaaagattatctggaaaacgcagccgccatcgaaatcaagatggggcaaggcgcgaaacccgggatcggcggacatctgccgggtacgaaaatttcggcggacgtttccgaaacgcgcatgatcccgcaaggtgcggacgccatctctcccgcgccgcatcacgatatctattccatcgaggatctgcgccaactcgtatattctgtcaaggaagcgaccgaatataaaaagcccgtcatcgtaaagatcgcggcggtccataacgtcgcggcgatcgcgagcggcattgcccgaagcggtgcggacgtcatcgccgtcgacggtttccgcggcggcaccggcgcggcgcccacgcgcatccgcgacaacgtagtgatcc

SEQ ID NO: 2037 - DNA, 3371 bp, Unknown
  16S sequences of unknown bacteria
tacttgttatgttacccctctctattcttcctgtccactttttatgctaacaccagtcattattgatctattcaatctcattacaaatatcaactttctgcatattctgataaaatgaatcgcgatagcaatcaaagtacttgaaaggagataatgatgggaaactttcctatagtaaacaaaataagcagagatgaattctttcggttgaaagagcgagatctgttattcatcacaaatcccggaagaatggcagatgtgtctggctccacattgatcgttcatataccagaagggtataaagtatatcgaatcgacggttggtattttgaaaaccgaaacagacacgagcagatttcctattcagaaatgatggaagcctttccgatctggcgttccatgatcaaaagcatcgatcagaaagataatctgctatataaatatataaacatggggtttggtaatggtttatgtgtaaagaaagacatacatgccttatttatgcaatatttgcaacctgcaatcgatcagtatgccgaagtcaatcatatcgatcctgaagaaaagatcagacgtcgcgccatgattatttttagcgtatgggataaagctgtgataaacatggctgcagataaaaacatagtcctgttataaaaaggagccctttgctcaaaagctcctttgtgtgatcagttgatctcgatctcgttcttccaaagtccgtgcaggttgcagtattcgtatacctcagccttgcctttgaagtcgcccatggcgaatgatgcttccggcgcttcaccaggcttcaggtcggcgcgcatcactttattgccggcaatgacccagatgttagtgatggagtgttcttccagcatcggatgagcgacagagccgacgctcactttgagcacgccgtcagcataggctgcctgaggcacgtgcttttccagcgcgccgtcactcgtgtttgccgtcagctcgaccatcggcttgccgcagcacatgaccgggacgcccttatcgatgactttttcgatgatgtttccgcagatttcgcatttgtacagtttcatgttctcaacctcctgtgtatattcttttcctttacgatcacattataccgtctgcggcagcgaatcggaagcgtaatgctcatgatcttttttatttctcattgcctgaaggcatcgcacagcgtataataacgttgttttttggcgaatgggggaaatcgtcttggggaaaatgaaaaatctgtgcaaaaaggaaactgtattctgcgtatcattcatgctggcgcttttatcgatgttattcgtcacaccggatctgacctatctgaactatccggattaccgcacgctttcgctgttgttttctctgatgatcgtcgttgccggactgcagtcgctggggatctttgagcggctgggcaatctattgatgcggcgcgcgaaaggagcagagcggctgaccctgacgttgatcctgctttgtttcttcagcagcatgatcatcaccaacgatgtggcactgatcacgttcgtccctttctccatcctcgtctgccgcatgatcaagcgggaagatcttgtgatgcgcacggtgatcatggagacgatcgcggccaatcttggcagcatggccacgccgatcggcaatccgcagaacctgtatctgttcactgcttccacgctttctctcgctgattttgcccgcgcgacatggccttatgcgctgatctccttgcttttgatcatcctttttcatcctcggggcacggcgcccatcgaactgcggctcaacataccgcagccgctggcttcccgctggcctgcgctgatcgtttatctcatcatgctggggctcagcctgctggtcgtcttccgcgtcctgccgtttctgcccgtgttagcgatcaccatcctcggcgtactgttcgtcgatcgcaggctgtttctgcatgtggattattttctattgctcactttcctatgtttcttcatctttatcggcaatatggagcgcatcccttccctgcaagcgatgctgcgaaatttagtgtccggacgagaactgatcgctggcgtcttatgcagtcagttcatcagcaatgtgcctgccgccatgctgctcagcggctttgcgagcgatatgccggcattgctcactggagtgaacctgggcggactgggaacgctgatcgcctcgctggccagcctgatttcctttaagtatttcgcttccgcttttccgcagcagaagggacgctatctgcgcgccttcacattgtggaacctgttgttcctgctcgtgctcgtcattgcggccgttttgctcggcgcgcaaggctgaaaggagaaaatctcatgcatctggctttggatgaacatttgcgtctgtgcatccgcgcagaagccgaaacaagcagcgatgccctgctggcgcagctttgcctttcccgcaagacgcgttatctgcattatgccggacggcgcatatcgtgcaatggccgtctccttgctcaggatcatcccttgcatgcaggcgatacgctcatcatcgatccgatcatgccggaagagacgatcacgccctgggatcatccggtggatgtccttcatgaagatgagctgtttgcgatcatcaataaagaaagcggcctgctcgtgcacagcgatggcaacaatacagagcacacggtatgcaacgcgctccgtcatcatttcatccagagcgctcagccccatgtgccggtacgcccgctgcaccgtctggatgtgggcaccagcggcatcctgctcttctgcaaatatccgctgcttcagccattgcttgaccagatgatggagacgcatcagatccgccgcagctatcttgcggtagtcaacggacatttccccgcgcagcggcagggataccgcgataccatcggcagagaccggcatgacgcacgccgcatgatcgtctgccgcagcggcaagcccgcgctgacccgcgtcactttgcttcgctacaacaaaaagaaagaccgctcgctggtgcgctgtgtgctggaaaccggccggacccatcagatccgggtacatctttcaacccatggctttccgctcatccatgatacgctgtatggtcatggtgatggcagcggccggctggcgctgcactctgcccatgtggagctttggcatcccttgcgccagatgatgtggcagacggattgcccattgccccttgaattagaaaaaatgatacgatgaagatgcaaaaagctgtgttacctttgatccatctgaaatggtccctttgtcaaggacaaaattctgacagttgatgcctgagggccaacactgcatccgatccccgtatga

SEQ ID NO: 2038 - DNA, 10831 bp, Unknown
  16S sequences of unknown bacteria
ccgcgtcttctcctttgataagtctgcaaagctcgagcgcaaattcaagtgccgctcccattccgcatgaggtgacaacatttccgtcgctctccactctgccgccggtaaaatccgcgcctgtgagatacttctcaaatccggggaagcaggtcgctctcttgccgcttaaaattccgcgctttccgagaatcatgggagccgcgcagatagccgcaaggtaagagccgtttttctccgcctttttgatgaaagcgtcaactatttcgctctcatcaaggtttttcgcgcccggcattcctcccggaagtattatcatctcgggggagagtgcgagcctttcggcttcctccgcggtgatgtcggcttcaacctttattccgtgcgcgccgactactgtctttgttttattaacagaaacgcacttcacgtcacatcccgcgcgtctcaaaatatcaacaggcgtaagagcttcgatttcctcaaagccgtccgccagaaattcgattatcataatttacctcccttgggtatattgcgatactataatattatatattatatcatcttaaagcgaaaaagcggttaacaatccataaacaataagtcggatttttgacataaatgaaatattttttagtggattttcccgtcagttcacatgagaagtgtgtttttcgaggaacgagtccacctcacgcgcaatttttccggctatctcgtctttgctgtagggttcaaatgcgttttcatccgcgcagggtataacgtgccaaccacatttttcagatacatacgaagcggcggcacggcatttttcaagataatcctcatgcgtctcgtgaatgtcgagcttttgtcccgtctcgccgctgcgttttttcacaagagcggacgacacgttctccggcatatcaagcagcagcaccatgtcaggcttcggcaaaccgagcttgcaaaactcaaaatcccacagccagtcgaggaataaatcccattccccacgcggcattttcgagagctgatggtacgcgttcgccgttgtgtacctgttagcgattacaacagtgtccccgtccttgtagtcgcgcttccatgaggtggtgtagctcacgtatctgtcggcggcgaagaacatggacgcagcgtaggcgtttgtgtcgtcgggatcgtctccgagcttgccgcccagatacatcttcacaagcgtgcatccctccgaggagtagtccgggaagtctatcacgcgcacttttttgttttttgcttcaaggtgctttttcaaaagttcggtttgagttccctttcccgagccgtcaagcccttcaagcactataagtattcccattattttgtccttataacttaatcaatatcattgttcaggcgcatttccatgtattcctgtttggttatcagcacttcacgcggcttttgtccttccggcgcgctgacataaccgaggctttccatgcggtctatgagctttgccgccctgccgtatccgagggaaagtcttctctggatgagcgaggtggagatttttttgctctctatcgcaagctctatagccgcgtcgagcatcggatcttcatctccgtcgtcctcgtctgccgcagaagcacccttcttaccgcttcccgtgtcgcatttctgagcttcgcgctcgatttggttagccacggattcggaataagtctcgcagtcggcgttcatgttcttgatgtactttacgacttcgtccacttcggtttcggtgacaaacgcgccctgtacacgtctgagcttgagcgcgcctacgggactgaacagcatgtctccctttccgatgaggttttccgcgccgcccttgtcaaggataactcgcgagtcggtgttgttcgatacggtaaacgcgattcttgacgggatgttcgctttgataagacctgtgattacgtttgtagagggacgctgtgtaccgaggataagatgcatacccgcggctcttgctttctgcgcgatacggcatattgaatcctcaaccgcgtcgggcgctgtcatcatgaagtcggcaagctcgtctatgataatgacgattctgtccatgtaagcgtagtcggggtcgtcctttgttaccttattgtatgtgttgatgtcgcgcactcccacagattcgagaagtccgtagcgtctctccatctcgccgacagcccacgacaacgctcccgccgccttctttgtctcgcttatgacgggaacaagcaggtgcggaatgccgttgtatatgctcagctcaacctttttcgggtcgataagcatgagctttacgtcgtccggagaggctttgtacagtatactcatgataatcgagtttatgcagacagatttacctgagcctgtagttccggcaatgagaaggtgcggcattttcgcaatatcgaagtacaccggctctcccgctacgtcctcaccgaggcaaacagtgagcttgctcttcgcgtccgtgaatgcgggggattctatgagagttctgaggtgaaccatctcctgctttttgttcgggacttctatgccgaccgcgctctttccgggaacgggagcttcgattctgacgcccgttgtagcaaggttcagcgcgatatcgtcaaccagatttcgtatggagcttactcttgtgccgggttcgggggtaagctcgtatctcgttatcgtaggtccgcgggaaatattctcgattttgaccttgacgttgaacgagcggagagtttccacaagcttaaccgcgttgtcctgaagctcgtcctttatgtctccgtgtacttcgtcgtccccttttgaaaggaagtcaataggcgggaatttatactcgggcgcgctcggcttcatcggcttttctgcggtcggaagcgttgcgttctgagctacggcttcgcgctttatggtaaggctttcctttgaatgagcttcggataccttgttgatgaggtcctcgccgtctcccgtgaatatttgcgaaatatcaagaccgttttcatctgtctgagctttcgcggcaggttttaatacaagttcggacttctgcgtatcgtcgacatcgaaaggcggttcgtcgtctgatgctgacatggcgagcttaacggtgtccgtctcgtattcgtccgcggttttagccttgtcgtggatgctcatcgcggcgatttcaacagcgtcaagtacgtcccccgcgtcaatgctctcgtccgctatgtctccgaagtcactctcgtcgcttccgggagttacggttttctcgggagcaggcgtaatttcggctgaagtttcggcggcaggttctgcaacaggtgcgggaacgtctataaccttcggctttatctcggtttcgtccgtgtctctgagactgtcggtgcgcttgcccttttctattctctccttagtcctgcgcattacctcgtcgaatatcttctcgtcaaccacagcggagtttctgtcatccactgccgtatcgtattcttcaggttctgcggggagcggtgcgggttcttcaaagccttcgatttctcccgccctctgcacctccggcggagttatgtcgtcaaccggaatatccatctcggtaaggcggcgttttgtcacacggtatacggtagcgggctgagtgtttttcttcccgctcggcttctttgtctgctctgtcggctcatgaatgagcggttcttctgtgagctttgcctgagcagcttccttttcgcggcgttttttctctctgaggtagttaagatattcttcctcttttattgctctgcttgtcgggggagcgtttctgcgtttttcggctctctccgctctcttttctcccgcgaactttatgtgatatgcaatccagatgtatattccctttggagtaagtccggctacgtacagcgacagtatcacgatgaccgcggcaaggattataacggagcataccttaccgaagcctctgaacaacagctcgccgaggattcctccgacagcgccgccgcccacaagtctcattccgtctccgtagtgcagctttaggctaagctcgttttctcctccgccgactatatggagcagcatcgtcagacacaaaaacacaatgactgtacatgagtttctgccgtagttctgtccctcggctgagtcgcgcttccagagaaatgccctcacaaggatgaacagcggaagagcataagccgcgccggagaacagtccagtgaagaaatctttaattccgccgcccactctgccctctccaatgacaatgcacacggcgagaagtatagcgacagcggcaagtatgtacggtgcagcctgtgaaaggaattcatagctttcggcatttcgagcgttctttgcgggagctgtcttggtctgctttttcgcagtggttttctttcccgaagtctttcgcgctgtgccggttgtttttttagtctgaggcatttttcttcctttcggatatttctatatcagtagtattattcattattatagcaagcgatacaaatccaatatatattttatcatgcgcaaaagaaaaatacaaggataattttgaacgaatcctgcgataataaagaaaaactaattcattggagcggcttatgcagacaaaggtttacccgaaggagcttttattactgttatgcgtggggtttctctgttttctcggcggaatcgtcaacggacttatcggaacgggcggtgggatttttataatgctgtcggcgagcgttatcggaaagctgacggagagcgagtgcgatatgtattcccttgccatgatgtgcgtgctgccgctgtctctgttctcgctccttctctatcccgcaggctctgtcgacacggattttgctctcaccatgctcataccggcttccctcggcggatttgtcggtgcgaagataaaaaaagcgctcgacgtgaagtatctctcgattatattcgcgtgcctgacgatttattccggcattacgatgataattcgcgcgtaggagggaaatatgacggcttttattatagtgctcattctctcgatggcggcggggtgcgggataggcgggggaggactgcttgtcgtttacatgacgctggcgctatcattcgagcagaacgcggctcaagcgacgaatctactattgtttatcgtctcggcagtgtcctccgctgtggttcagatgaaggacaaggctctgccgcagatgaaggtaatacttttctgctcacttgccgcttttccgggcgcgcttctcgggacttttctgcgcggatatttcagtgagagaggactgcgcgtgttcttcggctatgtgctcgtcttcgcgggtgcaggcgttatattgaggctgattcgtgcaaaattatcggacgccggcaagctgaaataagaaacaaaaattcatgtcaaaaaatcaaatatagtagttgacttaccgaatttatatggtataataaaatacaaggtaaactatggtgtgcaagactgtgaatatgagaaaacgcacttcgcaaccgcaggtttacaaaaaaacaacatatcacaaggagaaacagacatggcagaaatatacagagtaggtgtaatcggtgtcggaagccgcggctacggtcacattcagggcatcctcaccgaaagagacgacaccgtagttacagcagtatgcgatgtttacgaggacagaatagaaaacgcggttaaatactgcaaggaaaagaaaaactgggacgtttacggcacgaaggactaccgcgagcttatcgaaagagacgacgttgaggtagttttcgtgttctcggcatgggaaaaccacattcccgcagctgtttacgcaatggagcacggcaagcaggttgcaatcgaggtaggcggcgcatattcggttgacgactgctggaagctcgttgatacatacgaaaagacaggcatacactgcatgatgctcgagaactgctgctacgacagaaacgaaatgatggtcatgaagatggttcgcgagggacttttcggaaagatagttcactgcgaaggcggctacaggcacgacctcagaagcgagatttctttaggcaaagagataagacactacagactccgcaacttcatgaaccgcaactgcgaaaactatcccacgcacgagcttggtcctatcgcgaagattctcgacatcaaccgcggcaaccgtatgctttccctgacctcggtttcctcaggcgcattcggacttaacgcatatgccgaacaaaacgaaaaggtcaaccccgagcttaaaaccttccgcttcgcacagggcgacgttgtaaagacgaacataagatgctccggcggcgagcttatctcactcactcttgacaccacacttccccgcaactactcgagaaacttcatcgtccgcggcacaaagggcttcttcagcgaggactgcgacggcgtattccttgacggcaaatcctccgaatgggatcacagcttctacggcaacgtcggcgaataccgcaaggactgggagcatcccgtatggcgcaagtttgaggaagaaggcgtaaagggcggtcacggcggcatggactggcttgtattcgacgcgtattttgaagcgctccacacaggcgacgttcctccgattgacacatacgacacagcggcttggatggcgataactccgctttccgagatttccataatgcacggcggcgcacccgttgacattccggacttcacacgcggtatgtggacgcagagaagtgacaagaaccacggcttctatcggcttgacagataaaatgaagatataaaaataacgagggtcttttcgtaagatcctcgtttttctttatgtattcgagttctgggtgaataccgcgccgtttgtgaagtccgcataccatgtaaaatcggacgagttcgtaccatcgaatatcaggctgtcatcgctcatgtcgaaggtgtaggtaaagtctccgtccgacgtttcaaggataagcttgtcgttttgtattgtgtagtctccgcgtccgatgtagcttgacaatggggagaaattaaattcaaacgtaccgtcctcaagaagagtcacggaagcggaatgcatcatgtcgccctcggacgaagtccatgagtatgtgtttttgacctcggcatcggacacgttctttttgttctctctgcacgagacaaatgtcagggcgcaaagtatcgcgagcagtattattttaaccatactttccctccgtggagtctttatatgcataagacgacgcaaattccgctttagttccgcaatgttaaaactttttcaatgttttgcgcgggatttataaataattcctctgattttgacgccgacgcatgagagagcaaacgccgcaagctccaccgtcaccactgccgcacctgtttgaagggagagacagcacgcggcgaagaatcctatcgtaaagcacacaagggatatcgcggcggagagaatcactgtaagtttaaaactctttgtcagctgcattgcagtgagcgcggggaacacgatgagagcggaaatcataatagagcccatcattttcatgccgacgactattgtaattccagtgaggacggcaagagcgatgttgaacgcacctgtcttaactccggcggctctcgcaaaggtctcgtcaaacgtcacggagaaaatgtttttcgtgaacgcaaggaaccacaagagcacaaggcaggagagcacaagcgaaattagcatatccttattcgatatcgttatgacggacgacgagccgaagagtgaattgcacacatccccgctcctgccgcctgtcacgttgtacatgagagtaccgaccgcaacagctcccgttgaaactacggcacaggcggcgtctccgttcagctttccgtcactgtgagacagcctcagaatcagcaccgccgcaaggattactatgggaacggaaacctcaagcgaatatgtagctccgactcccgcaacggaagccaccgcaagcgcgaagaatcccacatgggaaagtccgtcgcctatcattgaatatctttttaaaacaaggctcacgccgagcatggacgaacacagcgacacgagcaatcctacaacaagcgcgcgaagcaccacggttctgagaaactccgacgcgaataattccgttatcgacatgatttactcctcctttgagtgatgatgatattcttcctcggcgtgctcgtgtacctcttcatcgtgcttttcgtggcgcagatactccgcaacatctccgaaaaagtagtgtccgcggcacatcgacagcattttgtcggcttcacgaacggcgcatccgatatcgtgagtaaccatcatgacggcgcagcccagctcacggtttatctttcgtatagccgaatacatctcgtgcgcggcgtcggggtcaagtccggtcacaggctcgtcgagaaggagcagcttatcggaggcgcatattgctctcgctaaaagtgtgcgctgtttttgtccgcccgacagctcgccgaagcattttttctcaagcggcaatagattcatcatctccatagcgtcccttgcgcgttttttggagctgtcgttccagattagtccgaatctgtcgcggttcacgcatcccgaaagcaccacctcgcgcacagtagccggaaaatcacgctgtatcttcgactgctgaggaaggtagccgattccttcttttctcactgttttgtcaatgataagctctcccgccgccggttttatctctcccgtcacagctttaaggagcgtgctttttcccgagccgttctctcccacgacgcagaggtagtccccattttcaagcttgaacgagacgtgctcagccgcggtgtatccgtcatacgcgagagttatgtcctttgcttcaataatactcatttataccacttcctcagttcagtacgatttttaaaacctcgaggttctctctcatgaggtcggcatatgtcacgcctgcgtcaaactcttcctttgtcacgttgtgcgcggagtcgagctgcaatatcccgcatcccgtctcacccgcaacagcctcggcacattttctgtcggacagctcggtggtcagcacatcgggaatattctcctcgcgcaccttatctataaggaagtttatcgtcgcaagcgtaggctcggtgttggacgtgcatcccgaaaacgccgcgtagcattcaagcgaatatctctcggcgaaatatctgaacgggaatctgtccgcgaacacaaggatattcctcttcgcgctctttacacattcctcaatttcgccgtctatagagttaagctctgagatatagctctcgctgttattcttcacgtcgtccgctatgtccgggtcgagttttgctacctcgccgcgtattttttctattatctttaccgcgttcggaatggaagtccagacgtgctcgtcgattgatgcttcgtcttcatggtgatggtcgtgctcgtcttcctcctgcattccttcaagctctttttcggtatatgtctcaacttcatccgcggcgcatatcgagttcaccgtcattcccatggagtcgagcgtcgcaaaaacatcgtctacccaatcctcgctctcgccgcctgtatgaataaacaaatccgagcttgcaattttgtctatgtcgccgagagttgcttcaaaatcatgtgaatccgttcccacgggaaggagcataataacatcagcctcgtccccgcacacgcttctcgcaaaatcatacagcgcaaaattcgtcgtcaccacgctgagccgtccgtcgtccggttttgcatccttcgcaccattggcgcacgacacgaagagcagcacagtcagcgcaaggagcaggattatcttatttttcagctttttcatttaacgttccctctttttccgcacagtcgttgcacaagccgtatatcacggtttttctgcaatcgagtataaagccgtgctcgtttttgaagtgctccgatattgtttccataaatccgcagtccatgtgtatcagtctgccgcacttttcgcatttcaagtgaatatggtcctcgccgcaggagttgagctgatagtacgcgcattccccacgtcccgagtctccgttgaatcttttgagaagcccttcctcggtgagagacgagagcgtacggaacacagtagcctctcccgccgtcacgacagagcacacttctctcgcgctcatgcattttccttcgttatccatgaaaagcctaagtatttcgtctcgctgttttgttttatacttactcattttgtcctcaatttgatatcggttatcatattttcgcattattatagcacgcgtgaatttgattgtcaatatcatttttcaaaaaacattcacttgacaaatcctgatatttctgttaccatagaatcacggaaagacatattatatattgaaaggaagaaagctatgccttatattgaactgaaaacaaacatcgccctcacacacgaaaaagaagactttttaaaaagcaaaatagccgacgtgcttgcgtcctcattccccggaaaaaccgaaaactggctcatggttcgctttgaccgtcgttccgagatgtatttcggcggctccgaagctccctgcatgatgattgacgtctcgattttcggcaagcaggataagtcaggctacgacaaaatgaccgcggcggcttgcgagcttatcgaaaaggaatgcggcatcccctccgacagagtttacatcaagtacaccgaatacgacaaatggggctggaacggcagcaatttctaattgcacaatttctgattgttgaatttctaattgcag

SEQ ID NO: 2039 - DNA, 32759 bp, Unknown
  16S sequences of unknown bacteria
gggggcgcacgaaggccgccgcctgtggcggaaacaggccgtagtaagcccaatgagcaagggaggaccgctagtgcgctttgcgcacatcggaggcccgaagggctggagtggcgagcacacgaagcgaagcgcagtgcgcagccacggaacaccgcgcaagcgtcagcgcagggcggtgcgaagatgcggaacgaccattgcgaattgaggatggtagtggcgggggagcaagctcccccgtccaccaggggctgtgaaaaaacttttggttttttcacagccccttgcgtgttagaaacaagctatcgcacaaaacggattacgttccagctcagagcgggaatgtgcagcgtggccttttcaccatcgatgcacccgccggggccgggggtgggcacgatggtatagggcgcgctttcggtgttgacggccttcgcgtcgtcgttgtgcaaaaggatgtgctcgccaatgcgcagcgcgccgaagccgtgcagatccacgtccagcgcaaaaggttccgtcgtactgcggttgacgcagaaaaccgttacgctgccatcgtccgccagcgtggcggtcgcgtcgatgaacggcacgccttcgtaatccacgcaatcgtaaaccgggctatccacggcggcgcgcagcgcggcgccgcgcccatagcgggaggcgtgcatgaagggatagtaggtcgtttgcgcccagcaaccgccgccgccgcgcgtcatgatgggggcgatgacgttgacaagctgggccaggcaggcgattttgacccgatcggcgttgcgcaggagcgtaattaggatggagccggtgaggagggcgtcctcaaaattgtaaacgtcttccgcgcggtggacggcttgtccccagcgcatgctgcgcagatacgcttcctgatcgccggtgtgatagataatgttccattcatcaaaggagagatggatggattttttggcgtgttttttgcccttgaccgcgtcgcacagggcaatgacggagcggatgaaggcatccatatccatcgtgcgggccaggaagtcggacgttttgccggtggggttgccataatagcggtggagggagatgtaatcgatgttgtcgtagcattcatccagcaccgtccactcccaactgccaaaagtaggcatctcaaagccggaagaaccgcaggccaccaattcgatggaaggatccacccatttcatcattttggcggattcattggcgatgcgcgcatattcctgggcggtcttgctgcccatttgccaaggcccgtccatttcgttgcccagacaccacagcttgatgttcagaggctcttttttgccattggcgatgcgcatatcggaaaacttgctacccgagggatggttggcgtattccaccacgtcccgcgcctgttccggaccgcgcgtgccgaggttcacgcaatacatgggcgcggtttgcgccttttcgcaccagtcgcaaaattcgtgcagacccaccgcattgggttcggtggcaaaccaagccagatccagccgctgggggcgatggctgcccacggaatcctcccactgaaagccggagacgaaattcccacccggatagcgcacgatgggaacgcccagatcgcgtaccaagcgaatcacatccgtgcgaaacccctgttcgtccgcggcaggatggccgggctcataaatgccctcgtaaatggcgcggcccatgtgctcgagaaaagagccatagatccgcggatcgatcgggccgatttgaaatgccttatccagcgtcatgcgcgcatgcttcatagaatgccgttcctccattttgccaattttgtaccccattatatctatggcgcgtgcgcctgtcaagagaggatttttcgcgcagggggaatttgtaagctccaagtgcccgcaaaatcctgggaaaaaggcagcttcggcgcaatcgcagttgacgcaatccgcgcgtgcgtgctataatttgagcaaaatcagcgcaaaggggcgggcagcgtgaaaaagcattcctattcgatctaccggcatatcgtggttatcgtgctgattccattcatcatcctcacccttttgctgctcggcacctatgaggtgtatcgcgcttccatgttcgggcgctcgcaggaagaattcgccctgcagatggaacagtaccgcctgcgcctggaagagcggctgaacaacatccgcaacacggcgcgggaagtgggctattcagaagctgtgcagaagtattttgtgcagatgaacaacgcgcagcgggccgacaactatatttttttgcggaacctgttcaacacatttatcgatgcgacgccaggcgtgcgcgccatttatgtggtggatgaaagcggcgcgtttctggattcggggaacaatctactgcactattttcagcgcgctggcgtagagtatgattttgatggacggacagagggctttttcacggatattttgccggaaggcgtcaatgaatcgccccgctattgcctatattgcgcgccggtaggcgtgatcactcccatcagcctgggccaaaaggaacgttttttgacctgcgccctgctggttgatgtaccagaacttttggcggagattgcgtcgggcgagccgcctgtgtgcgaattgctgttttggcaggagcggattcttgccagtagccgcgcgctgaacgctggcgcgaaaagcgcgttggtggccgcggctacggcggtaggcggaaccgcgccctggcaaatcgaggtggcgggagaaccgtactttttccagacggccgcgctttccaccgaaaatggcctggtgtacgcgttcagcatgccggtaaatcactttatggaaggcactgaccggttgaaatcctttgtgctggtaggcgttggcgggtgcgtggcggtggtcgccgtgctcatgctgcttttgcggcgcagcatttcccggcccatcgcgcaaatcgcgcaggatatggcgcacattaccaccaagcaaatcagcattggcgataccaatgtggtggaattgcaaaacctggccagtggcgtgaaccgcatgctttcccggctgacggaaagccagcgacaggaaatggagaacatggaaaaaattcaccaactggaaatgtataaaatgcaggcggaaatgctcgccctccgcagccagatcaatccgcatttcttgttcaacactttggggtgcgtgattggcatggcgatgcactatcgcgtggagcccctggaacagatcgtcaccgcgctttccgacagcctgcactatgcgctgcgcgcgccggatgaagtgacgcttcagcaagaaattgatcatttgcaagattacatgcgcattctggagatccgcatgccggacaaataccggctggtggtgcatgccgcgccgggaacgctggaaaagcgtgtgctcagcctgctgttgcaacctttggcggaaaacgccgtacaacacggctttcaggagtatcaaaagcgcgccgaacgcaccatctatctggcaagctggatagatgcagcggatggcgggctgcgtttgcgcctggcggacaacgggcgcggcatcgaggcagatcacctggccggtattttagagcagatgaatggcggggaatttcccgcgcaaaagcggcatatcgcgctgatcaacatcgcgcgcagattgcgcatcgcctacggggatcagtgccatatggacattcgctcaaaacccggctactatacgtgcgtggagttgcaatttccagcggaaggacgctttttgcggtaggcttcgggcgaaattttataagtgcttttgaatacgcgcgaaaaatacgcgctgtcgggatagcccaccttggcagcgacgtcctgcacgctatcgccggtttccaatagcaggcgggcggccatgcgcatgcggatggttttgagaaacgtcatgatcgtaacgccgcagttttcccggaacgtgctgcacaaatgcgctttgttcataaaaaagtggtcggccagcccatccaaggtcaagggttgggcaaaatggctcgccaggtatgcctggatctggccagccggttcgcgcagcgcatagcgaaaggcgaactgggcgctttgctgcgcttgcgcaatcatatcatgcagcagggaaaaatcgcgctgcggcaggctgatgccggcgcgcatgggcagggcaaggatggccggaggcagctggcccaaggggttggagagtagggcgacgctatagccattgacgcgcaggtcgctaaaacccagggcgaaaccggctgggtcgatgctggcaatggcgcgttccgtagcggcgtccgcactatcccagctcagcacgcggcattctggataggcgttttcgatggcgcgttggagcgccatgtgcgaagaaggcggttcgggctggaggaagccattgagccgcgccataagagccgccatatcctttcgggtgatgggcttaaacaaataatccaccacgccgctgcgcagaccttctctggctgcggaaaaatcgctgtatgccgagatgatcaccatgcgcacggggatgcgttcctgcgtgcaggcggcgatcaattgctggccgcccatctgatccatgtgcaaatccgtgaacacaacgtcgcaggggtgcgtgcgcaaataggcgagcgcttcctgcccattggtgaaagttgccgccacggtgtattcgggatattcctgcagcaggctttccagccctcgcaacgcccagatttcatcgtccaccagcacaatctttggcatatgtattccctccaatattcccctggccgcattttttgcggaaggctggtcggctttgcgcggtttttccgctatgcgcaccaagcttagcatgttttttgtgcagtgtcaagcatgtagatgttctgcggcgggcctatgggcaggattccgaagattgtccaaatttttgaaatgatttttcatgtacggatgggatgaaatgtggtagtttatatacataccgttgggggaggttgagagacttgagtgcgcgcaaaacgcttgctgcaaacgtcccggggcgcaggaatgtgtggatagaggttctcaaaaacaaggaaatctatctgctcgctttgcctgcgatcgcgtggtacatcgtgttttgctacatgcccatgggtggcttaacgctggccttcaagagcttcaagaccaggctgggcatcctggccagtccctggaatggaacgacgaattttgaatccatgttccgcgatcccgcgtttttccgctctgtgggcatcacgctgtggatcaatttcatcgaattgctgctgtgctttccggcgccgattctgttggcgctgatgctcaatgaattgcgcatgcgccggtacaaaaagctgctgcaaacggtgtacaccttcccgcatttcctttcgtgggtcatcgtcggcagcattgtgaagaacctcctcagcgtcgacggcgtggtcaacggcttgatggcgggtatgggcctggaaaaggtgagcttcctgggcaacaaggatctgttccggccgctgatttacatctcggaaatctggaaggaagcaggctggtcctccatcatctatctggccgccatcagcggcatcgacccgcaactgtacgaagtggcggaaatcgatggcgcaagccgcttccagcgcgtggtgaatatcaccctgccgagcattttccccaccattgcggtcatgttgattttgcaaatgggcggcatcatgggtggacacttcgaccagatttacaacctgcaaaacgacgtcatcgcttcttccgcggaaacgctcaacttgtacatctaccgcattacgttccagcgcacgccgaactatggcttttccaccgctgtcagcttattctgctccgtgatcaacatggtgctgctgatgagcacaaacaaggtggccgagcgctttggcggcacgggcctgatgggaggggtgaaataatatgcagatccggcgccggtattcccgctcccgcctgacactgatggacgcggtggtgggcacgattctcacgttgatggccctgctggtgattctcccgttttacaacgcgattatgatctcgttcgtgacggaatcggagtatttccgcaatccttttatccttttcccgcacgaacctacgctggaagcttacaccacgttgctggatacgggcaatatcttggcgggatatggcaacacgctgattcacatcgccatcggattgcccatcagcatgttcatcaccttcgcgctgggatatgtgctcagccgtcccgcgttccctggccgcagattcttgtatgtgttcgtgttgatcaccatgcttttcagcggcggcatggtgcccagcttccttttgattcgcagcctggatttgatgaacacccgctggtcggtcattctgtcctgcctgctgagcacctattacgtggtgctggttacgaattttatccgctccctgcccggatctttgctggaatccgcgcggctggatggcgcgagcgaggcgacgattttggtgagaattgtcttgccgctttccaagccgatcctggccaccatcgcgctgttttacgcagtggataagtggaacgaatggtggaattccatgttgtatatcaaccgcatggaaatgtatcccctgcaattgattttgcagaacatcatcaacacgtatcaatccgccacggatcgcaacatcgcctccgcggatgcgctcaaccgcttgaaaactttttccatgggcattaagatggcggccatcgtcgtgaccatgttgcccatcatgtgcgtgttccccttcctgcagcgctttttcgtgaaaggcattatgattggcgcggtgaagggataaaaggttgcctatccactgctccccagcgagcagggtagaatatgaaggagggactttcatgaaacgcaagaacctgattgcatggctcgtggctttggcgctgcttttgagcggcacggcgctggcggcggagaaggaactcgtcgtctatagcgaggaagaccttgcccgtgccaaggagtataccgacacgctggatacttctggcaagacctatgacgagcatctcaccattgaactcgccaccgaaatgctggatgcgacgcaggattacaaccagggtagcgcgggcagtcagtggttcaccgagcatttcaattttgatttcgacctggtggcgattccggatagcaacgccaacgataagatccgcacgatgatcaattctggcgaagtgccggatgtgctgcgctggaatggctttgatatcaacgagatcatttcctatattgatcagggcttgttctaccgcctgcccgacgattgggaagaacgctggcccaacatcgcccacacccagagcctggtgcccgtggcggacgcgctcgcggaaaaggtggatggcacctatggcctgttccgcgtggtgatgtaccattactatcccggcgacgtggtggtcagccacaattcgatttatatccgcgaggactgggccaatgcggttggctttgaaatcaaggacgcttacacgcccagcgaattgctggaatacgcgcgcctgatcaaagagcaggatcccggccaggtgggtgcgaacctcgtgccgatcgcgagcgataccggctatctcgccaatctgttcctcggctccacctatcccgagtacaaccagatctaccgcacggaagacggccaataccattggggcttctcggatccgcaaaccctggaaggcttgaaactgtggaaagaggcctatgacgaaggcctgatcagcccggaattctacgtgtattccgaaaccgacgccgtgaataccttcagcatttctggcgtggcgggcgctgtgctcaatccgggcagcgtttgcggctctgtgaaggacggttttgccaacgaccaggggctggatgaaaccgcctggcaccaggccgctatgatcggcgaagacggctactatcacgattacgccaacgacaatttctggggcgtgacctacttctccgcggacatcgatgaaaaggtgttcgagcgctacatggacatcgtggacttcatggtttccgataacggcgcggacttccgttgcaacggcatgcgctacatcgattgggatttcaatgaggatggcacgcgctccatggtgtacgatacctcggtgtaccgccgcgctagcgatagcaacttctggcccgtgtacacgctgctgggcgcttgcggcgacgacaatggcttcaaccccgatccggtagacgccagcgaagacgccctgttctacgccaaccagctcaacgcggtgtacaacgccaaactctctcgcctgacggacaacagcatcatcgagcgcgattgggagagctacggcttctacagcgacgcgcagaccgcgctgaccgccatcgattacagaaccatcatggcaaacctggtggtgggcgagggcgatctggaagaaaattggcagagcatcatcagcgaaaacgcttatatcatcgatcctgccctgcaggaactcaatgaaaccttcaatagcgacgcagaataagcgctgacaaactggggggctgtgaaagaacggcaaaagttctttcgcagccccttttgcgcattttggaaaaggctatgcttttgcgcctgtgcggtcgtaccacttggcctgttcgtgatagagccgggcgtattcgccgccgcgctggagcaactcttcgtgggtgccgtcttccacgattttgcccccggcgaacaccacgatgcgatccgccagggaggccacgctgatgcgatgcgtgaccatgatgagcgttttcccctgcgaaagatccagatatttctggaagacttcggcctcggccagcggatccaggttgcccgtaggttcatcgagcagcacgaaattgcgtccccggtagtgtgcccgcgcaatggccagcttttgccactggccgccggaaagatcggtgccgccgatttccttgcccaacagtgcggtggggtcagcttcgccatagcccgccgcgtcgagcgcgctggcgatggcttggggactggcggacttttccggatcgcccagggccacgttttcgccgatggtgaaggtggtgtacttcgcgggggattgcagcacagaggccatggcgccatagcgccgcgcgcggcccgattcgtcctcgatttggccgttgacgagcagttcgccgcgcgaaggggccagcatgccgcacagcaggcgcacaaaggtggttttgcccgcaccattttcgcccacgaaggcgatgtgctcgccccgatggatgcgcaggttcacatgctctagcacatacttttccgtgagcggatagcggtaggaaaggtctttggcctcgatggtttccacttccacaggggttccatccacctcttgctggctgggcaaatccataacgtcaaagaacatggccgcctcgttctttttggaaaggaaggaacccgtggcgcgcatcaggctgctcatatcgcctacgagcgtgcggatcaggctcatggccgcggtgagcgcgcccagagagagcgcgccgcgcaccatgagcacgatggcgaacacgatggacgccgcggtagcggcgctgttgatgatgttgcctgtgagggacagaagcgcggaaagccattgcgaacgctgctccttgcggatgtatccgtcgatcacgcgcttccacttactatagaagaaatcgtttagtcccaggacttttatttccttggccgcctggcccaggatcaatttttcgtaataatccgcctcgcgcttttctttggcgttgttcttcacgaatttgaagcgcagcttatcggccacgtaagtggtgtaaagcgtgggcaggggcgcgatcagcaccaaccaacacagcatggggtgcaagagatacagcgaaacggcgatggaggccaccgatacggccttggccacaatctggtagccgctgaccatgattttgcggttgagtccatcccacgaatcctgcgtgaagcgcataaagcgcgcgatgcggtcgttgatggcgggtacttcgaacatctcgctgggcagggaggcgaatttgcggtacgtgcgggtatcgacgagttcctggaagcggttgcgctgcacgacgtcgagccgctcaatttcctcgaaccattcggtgtacctttgcagcaactggcacagatactggatgaggtaatagccggcgagcagccctgccgcgcccaatagcgattgcgcggcgttggtttccgctaccgcgatatagcgcccccacagcagcgccagcacgggctgcagcaggctgagcagcatgctcaggcccagaaagatcaggcacatcgccttggcggagcggaatacataggcgaacaggcggggcagatagcgaaattttggcgggttttcccgccggatggtttcttcgatgcggctggtgcggtcgttcatgccatcgcctcctcttcttccgcgtggtcgtaccatttgcgttgcgcgtcgaacatcgcgcggtaaaggccgccgcgttgcatcaattgctcgtggttgccctcttcgctcacgcgcccatcggacaggaccagaatgcgatccgtaatcatggtggaagccagccggtgggtgatgaaaatggcggttttgccttctgccagggcatggaactcgctgtacaggcgcgattccgccatgggatccaattggctggtgggctcatccaacagcaaaattggcttatcgcccatgaaggcccgcgaaagcgcgatgcgttgccactgcccgccggagaggtccacgccgccttcgaagtcacggcccagcagggtatccatgccgtctttgaggccgtcggcgatctttttcgcctgccctttttccgccgcggccaggatggcgctttcatcgcgcaaaagctcgatgtcgcccacggcgatgttttcccgcagggaaatgctatagcgcatgaaatcttgaaacaccggcgcgaacacccggttgcgctgctcgcgggtgtattgttcgatgggcctgccgcccagcaggatctgcccgcgctccggctcgaacaggccgagcagcagcttgatcatggtggacttgccctcgccgttcgcgcctacgatggaaattttttcgcctctggccaggcggaaactcagaccttttaatatgtagggattttcctcgctgccgggatagcggaaccacacgtcccgaaattcgatatcgaaggtttctggcgcgggagcggccttgccgggcgcgctgtcctccgaaagggcgaagaatttgtcgtaatagtctgtgaactggaggtggtaacctgcccagatcacgatgccggtcgcgctacttaggtgctgtgaaaggctggaaagcaccatcgcgctgagcgccaccagtgaaccgatgctgatttccccctgggcatacagatagagcaggagaagcgcgttgcccagcgaggccagattcatgatgcttccggcccgcaacaggtgttgcttgagatgcttaaaatagtaggtttcgtattctttgttccgttcgtggaggcggtcgcgataggtgcggatgaggaaatccgcgcagccattgagcttaccttcgtaaaggtaatcccgggatttgagaaagcccgccaggatgctgtagcggcgctccttgttccagtagtgttctagctcatcgtaaatgttgtaactatgcttggcgctgtaccaacggtgcagcgcgaaggggatcagcgtggtgagcagcagccaccacttggcttggcccagctgccacaaaaggccgatggaagccaccgcgccgctgagcgcgttgaacaggtacatgggatataggtgccgtgctgaattcatggcgcgggaagtggccttatcgatgatttccacggattggctgttttcgaagtgctcgtatttcgcgcgccccagtttttgcaacatttcgcccttgtaatcggtgttgagaatcatttgagagcgcggttctatgtaaccgtagatacaaagctcgttgatgaccggcggcagcaccatggtgaccaccagcagcgcgagccagggaatgtaatcgccaaaggccatcgcgcccgaagccacttgcagtccgtcatccacgatgtgctggttcacgagtgggctggcaaagctcagcgcgccggaaacgatggccagcacgaacgtcattgcgaccatgagaggcgcgcgccgggcgatgatggaaagcagctttttataggtgtcgagcactcttcgggcgtctttcatggggctccctccttactttccttgcggatgtagggcgtttggcggaattgggcgttgtaaacaaagcccaggggaacttctaccacattttgtgccatgcttagaaaggggatgaacgacggcgcgttgccggatacgttgtaaatttggatgggcgtatcgtccaattccagcgtgctgcggttgagcaatttcaacgcgacaaaagcgtccaggatttcagcggcgcgttcttgcggaatgtgcagcgctttttccagtagtttggcggtaaagggattccggtcccgcctgagaacaagaaacaaggcgtcatacgcgtccggctgggcaagcaacgcgaacagctttgtgtgccgttcgcggtcgtacagcgcggtataccggccaccttccggctcggggctgagaaagcaccagttttgccgccggccaaaaccgaattcggtgagcccgccgtcaagatccatgcgcgaatggagtggattgctttgcgacaggtattcgcgcagttcttcctggtcgcgctcgccgtggaaattcgttttgccgccaatgccgcgctggatctcccagcagagccgaaaggcttcttccatgcgcgcgtcctgtggcagggagctcaggcgcttgaggattgccgcctcggccgggatggatccactttcccggccgaatagcgcgtcgatgctcacgccaaaatagtccgccagcgcgggcagaagcatgatgtctggcgcgccgccgttttcccagcgggacactgcctgcatggatacgcccagcgctttgcccatctcttcctgtgtgacgcctttccgcttgcgcagggtcgagagaatttcgcccattccagccatgttcccatctcctttttgctggagtatggtcagtataccacaatataggatggaatacaaacaagagattttgctaaaattctcgtttgaattgtgttttggtgagcggtgtgccaaaactccacggtgaattgtgttattgcggacggagttcttcgagaagattctcccattggccgcgcgagaattccgggttcaccatatccccaatgccagccaggagcaggatgatgccctgcacgcggtgcggctggatggcatagcagcctttttccgcgccactggcttcggttaccaggtcggccgcgatgagcggccgcaaatgatggtatacctgccctgtcgaatggtacccgcattccgccaccaattgcgcgacggtgcgcggctttttcaaaatggccagcagcaagttgagcctgtcgcggctgccaatgcaggcgagcacgcgctccgccgtgtgattctccacgagggagagcaggtggttggcgctgacgtcgtttcgaatccaggtggattggcgcccgcccagggaaaacacgcccatgtaggtaaggcggccgctgtcctggtgcgcgttgcaggaatcctccagttggtccagcacagccataatggcagggtcggggtgcatatcgggcattttgaccacgcggcctttcgcttgcgcctctgtcgcggcaggaacgccgccaatccgttgagcgagcgcttgtagctgttctcgcaattcatcgatttccgcaccatagtctctatccatggaatgtcctcctttttggaatttcgcaattgcgtagttacattatagcatgaatggattggttcgtcaatgcgcaatttcgtattttagaatctagggaatcggatgcggttttgcgtcgcgcgcgacgaaatataatccattccggcttgacggatggcggattttggttcataatagaatagagaatttgtgaacctggagggcgctatggcgaagcggatagcggcgttggaagcgggcggcatcgcggagcaactggggcttcgcgagggagacgtgctgttttccatcaacggcgaagcggtgctggataccatcgattatcaggcgctgacgtatgaaacgcatatcgagttatcgacgtcgcggggcgacttttccttcgataaggaagaatatgagccgctgggcgtttggctggaagcggatggtgtgcgcctgtgcgtgaaccattgcccgttttgctttgtggatcagttgccgccacacgtgcgggaaagcatgcgcgtgaaggatgacgactggcggcaatcgttgattatgggcaactttgtcacgctcaccaacgtgtatgggcgcgaactcgaccgcatcatccggcgcggcgcttcgcccctgtacatttccgtgcacgctacgcggcccgaactgcgcaggcaattgctgggttgcgcgcggggaggcgaaattttggatacgctttcgcgcttgaaggagggcggcatttcctatcatttgcaggctgtgctctgcccagggctgaacgatggtgcggcgctggaggaaacgatcgcggatctgtgggcgctgcgcccggcggcgctttcgctggcactggtgcccgtggggctgacgaagttccgcgaagggctaactccgttgcgcccgtttgcaccggaagaggcgcgtgcggtgctggcgattgcggaccgctggcgcgagaaatgccttcgggaggcggatacgcgcttcgtctttccatcggatgagttttatctgcttgcgggccgggaactgccggaggacgaggcgtatgaggactacccgcagatcgacaatggcgtgggcatgctgcgcctgttcgcggaagaatattgcgcggcgcacgcgcaactgcgcctcaaggcgcgcaagagcgcgcgtgtgatcctggccacggggctttccgccgcgccgttttttgcggatcttttgcaaaaatatccggtgggcaatgtgcgcgtggaggtgcgcgcgattcgcaacgcgttctttggcgaaagcgtgacggtcgcggggctggtgacgggcggcgatctgatcgcccagctttccggcacccgggcggacgcggtgctcatcacccgcacgatgctgcgcgcgggcgaagaagtgtttctggatgatacgacccttgagcaggttacgaacgcgctcggcatgccggtgatcccggtggaccggccgggcgatgcgctggtggacgcgctcacggagttttcggagggataagcatatggcaaagccactggttgcgattgtcgggcggcccaacgtcggcaagagcacgtttttcaacaaaatggcgggcagccgcatttccatcgtggaggacacgccgggcgtaacgcgcgaccgcgtgtatgcggattgcgaatggcaaaattacaaatttaccttgatcgataccggcggcatcgatccggatagcgaagatcccctgctgcagcagatgcgccgtcaggcggaaatcgccattgaaacctgcgatgtgatcctgttctttgtggatgggcgacagggcatgaccgcggacgacgagaacgtggcggatctcatccgccgcgcgggcaagcccaccatcctggtggtaaacaagatcgataacgtttcgcagttaaatgatgtgtacgatttctatcaactgggcatgggcgacccgattggcgtgtcttccgtgaacctgttgaactttggcgatttgctggaggaagtgtgcaaattcttcccagacccggaggagggagaagaggaagacgaggccgtgaagatcgcggtcgtcggcaaaccgaacgtgggcaaatcctcgctggtgaaccggctgctgggcgaggagcgcgtgatggtttcggatatcgcgggcaccacgcgcgacgcgattgatacccattttatggacgagggcaaggaatatgtgctcatcgatacggcgggcatccgccgcaagcgtgccatcgcctatcaatcgctggaacgcttctctgtggtgcgctcgctggcggccatcgaccgggcgaacgtggtgctgtttttgatcgacgccacgcagggcgtcaccgagcaggacgcgaagatcgccggatatgtggatgagcagggcaaggcggccatcatcgtggtgaacaagtgggacgccgtggaaaaacagacgggcacgctagaagaattctcccgcaaaatccgcacggagttaaagtttatggattacgcgccggttttgttcctctcggcgctcacgggccagcgggtgcacaagctgatgggcatggtgcgcgcggtgcacgaacaggccacgcgccgcatcaccaccggccttttgaacgatgtgctggccgacgcgcaaaacgcgctgcagccgccgagcatgtcgggccgcaggctgcgcatttattacgccacgcaagcctccgtcgcgccgcccacgtttgtgctgttcgtcaacgatgaaaccctgatgcatttttcctatgagcgctatctcaacaacgctttccgcaaagcgttcggctttgaaggcacgccgattcgattcatcttgcgggagagggggaaggagcaatgatggtgctgcgctatgcgctgtgcgcggtcatcgcctatttgctgggcaatttcaccacgggcgtgtatgtcaccaaatggttttccaacctggacatccgcaaggtgggcagcggcaaccccggcaccacgaatgtgctgcgcacgctggggtggctgcccagtgcgctcacattgctgggcgatgtgctcaagggcctgctcggcggctggatcggctattggatcgcgggcgagatgggcgcgcgcatcggtggcgcgttcgccgtggcggggcacaattggcccgtgttcgccaaattcaagggcggcaagggcatcgcggcttcgctgggcgccatcctcgccattgagccctggtttggcctgggctgcgtggtggtggaggcggtggtcgtcattttgacgcgctatgtttcgctggcctccatttgcgccgcgattttctattttgccatcacctgcatatgccgctggggggagtggtggagcatcgctttcgccgggattctcacagccatggcgctcatcagccaccgttccaatatccagcgccttttggccgggaacgaaaaccggctggatttccataagatcaaccagctatccaaaaaccgcaaaaagaaaaaataggagggagcggcagtggcgcataagtatctgattggcatcgataacggcacttccggcgcgaagtgcatcgccgtggacgaaacgggcaaggtggccgccagcgcgacggtcgaatatccgctgtatacgccccgccccggctgggccgaacagaagcccgaggattggtggaacgccgtggcggaagggctgaacaaaatcgtgaagtgcgtgcccagggatgcaatcgcgggcgtgagcttttccggccagatgcacgggctggtggccctggacgaggcgaaccaggtgatccgcccggccatcctctggtgcgaccagcgcacgcagaagcagtgcgattggattaccgaaaaggcgggtggcgcgcagggcttgctggaatacacgaacaacgccatgctcaccggctacacgggcggcaagctattgtggctgcgcgaggaagaaccggacaattttgccaagatgcgccggtttatctgccccaaggattacattcgcttccaactgacgggcgaactggcgacggacgtttcggacgcttcgggcaccggctttttcaacacgcgcgagcgacgctggagcgacagcctgatcgaactggcaggcctgccgcgctcgatttttcccgatgtgctggaatcctgcgagcgcgcagggcgcgtcacgcgcgaggcggcgcaggccacaggattgcctgaggggctgccggtctacgcgggcggcggcgacgccgtgatccagaccacgggcgcgggcctgatcgagccgggcattctgggcgtggtgatcggcacggccgggaacgtttccatgggcctaaagggctacgcggacaatccgggcggcaaattgcagatgttctgcaacaacgcgccggatctgtggcacgcctttggctgcacgctgacggcgggcggcgcgtaccgctggtaccgcgatacgctgtgcgagatggattgcgcggtggcgcggcatctgggcgtgaacgcctacgacgccatgggcgcgcaggctgagcgctcgcgccccggctcgaatggcgtggttttcctgccgtatctcacgggcgagcgctgtccttatccggatcccaatgcgcgcggcgcgttctatggcctgtccctgagcacttcgcgcggcgatatgaaccgcgcggtgatggagggcgtgacgtattcgctgcgccaggtgggcgatttgatgcgcacgctggctgcgccggaaaagatctacgtttcgggcggcggcagcacttctaagctgtggcggcagattgtggcagacgtgttccgcctgccagtgtacacgatgtcggcggccagcgagggcggcgcgtatggcgcggtgctggtggccggtgtaggcgcgggcgtgtggaaggatttgcgcgaggcagcgggcgttttgcgcgtggaaacgagcacggagccgaatccggcgaattacgccgcgtatgaggattcgttcggcatttacgcgcggctgtatggcgcgctcaagccggtatttgattttggggcggagttgggatattgacatggcaaaacgctacgacgcaagcgatattcaggtattggaaggcctagatgcggtgcgcatgcgcccgggaatgtacattggttccacgggtgcgcgtgggctgcaccatatgatctgggaaattgtggacaacgccatcgacgaggcagccaatggctatgccacggagatttccgtcacgctctataaggatggctcctgcgaagtgacggacaatggccgcggcgtccctgtgggcattcaccccaagctgggcgtttccgcggtggaggtggtgtacacccagctgcacgcgggcggcaaattcaacaacgagaattacgcctattccggcggcctgcacggcgtgggcgccagcgtggtgaacgcgctttccgaatggctcacggtggacgtgtatcaggattacacgcattatcagcagcgctttgagagcgtagcggacaaaaacggcaagatcctctccggcaagcccgtcgcgcccctggccaagctgggcaatacgcgcaagcgcggcaccgttgtgcgcttcaagcccgacccgcgcgtgtttgaggacacccatttttccagcgaaaccgtgcgacgccgcctgcgcgaactggcctatctcaacggcggcatcaaattcgtgtttgaggatgaacggcagaaagatccggacaagcgccaccgcgaatatttgtttgaaggcggtttgaaggactttgtgcaatacctcaacgcggaaaagaatccggtctgcgagccgatcctctttgagggccagcgcgatggcacgcgattgcgcgtagcgatccagtatacggattcttacacggaaaacctgttttcttttgtgaataatatccccaccagcgagggcggcacgcacgagattggctttaaaaccgccattaccaaggtgtttaacgattatgcccgcaagattggcgcgttgaaagaaaaggaaaacaacctttcgggcgacgatttccgcgaggggatgacggcggtgatcgctgccagcgtgcaaaagccgcaatttgagggacaaaccaagggtcgcctgggcaacaccgaggtgcgcccagcggtggaagccatcgtgaccgagcaactcatgctgtacctggaggatttgaaaaaccaggaaatcgggcagatgatcgtggaaaaggcgatcaaagccgccaaggtgcgcgaggccgcgcgcaaggcgcgcgacgtggcgcgccagaagaatcaattggaagccgcgccgctggtgggcaagctttccagctgcacaggccgcacgcccgaggaaaacgagttgtttatcgtggaaggcgattctgcaggcggcagcgccaagcaggggcgcgaccggcgcttccaggcgattttgccgctacgcggtaagccgctcaacgcggaaaaaaagcgactggatcaggtgttgctcaatgaagaattccgctccatcatcaccgctctgggtacgggcgtgggcgaggatttcaacctttcctcgctgaaataccacaaggtgatcatcctttcggacgcggaccaggatggcgcgcatatccgcgcaattctgcttacgttctttttccgctatatgcgcgcgctcgtttcggcggggcacgtctttatcggcatgccgccgctgtatcgggtgcagaaggggtccaccgtcgaatattgctacgacgacgcggccctgcccgcggccattcgccgcgtgggacgcggctacacgctgcagcgctacaagggcctgggtgagatgaaccccgaacaattgtgggaaactacgatgaacccgcaagggcgcaaactcatgcaggtgacgctggacgatctggccgaggccgatcacatggtcacgctgctgatgggcgataaggtggaaccgcgcaaagaatacattgccgagcacgcgaacttcaacaaggtggacgatttcgagccggtgggaggtgtggcaagtggcgaggaagcctaaggatgtgcagacgcggctggaagaaatcgtgcaaaaatccatggaggatgtgatgcgtgattccatgctgccctattccgagcacgtcatcctggagcgcgccttgccgcgcgtggaggacggactcaagcccgtgcagcgccgcattctctacaccatgcaggaactgggtctttctccggataagccgcaccgcaagtgcgcgcgcatcgtgggcgactgcctgggcaaataccatccgcacggcgacagttcggtgtacgacgcgctggtgcgcctcgcgcagccctttgtgatgcgcgcgccgctggtggatgggcacggcaatttcggctccgtggacggcgatggcgcggccgccatgcgctacaccgaggcgcgcatggctccccttgccattgaaatgctgcgcgacatcgaaaaggatactgtggatttccagctcaatttcgatgatacgcaaaaagaacccgtgctgctgcccagccggtttcccaatttgctggtcaacggcgcttccggcatcgcggtcggcctggccacgaacattccgccgcacaatttcggcgaggtgatcgatggcacgattgccctgatggaaagcccgcagatgagcacccgcgagctgatgcgctacattcccgcgccggattttcccacgggcggcatactggcgctggatggggagatcgaaagcgcctacgaaaccgggcgcggcaagatgcacctgcgcgcgcgcacccacatcgaagagggcaatgcaggccgcaaaaaaatcgtgatcaccgagattccctaccaggtcaacaaggcggccatgctggaaaaaatcctcaagctcagcgaggaaaagaaggccctgtttgccggcatccatgacattcgcgacgagtccgaccgcacgggcatgcgcgcggtgatcgaggtgaagcgcgacgccgacgtggaaaagattttggctgcgttgtataaatactcggacttgcaggtgagctttggcgcgaatatggtggccatcgcagggggcaagcccgtgcagatgggtcttaaagccctgcttacgcactttatcgagcacaggaagcgcgtggtcacacggcgcacgcaatacgaactggagcaggccagggcgcgcgcacacattctggaaggcctgatcgtggcggtggacaacctggacgaggtcatcgccttgatccgcgccagcaaaaatcccaaagaagcgcgggaaaagctcgttgcgcgctttgacctcagcgaggcgcaggcgcaggcgattttggatatgcgcttgcagcggctgaccaacctggaaatccttaccctgcgtaaggaatatgaggaagtgtgcaagctgatcgaccggctggaaggcatcctcaagagcgaaaaaaagctgttgcgcgtgattcgagacgaactgacggagctcaaagaaaagtacgcggatccgcgccgcacagaactggtgggccagttcgaaacggtggaaatcgtacaggaggaagagccagccgaggaagtggctgtggccgtcacgcgcgcgggctttatcaagcgcttgccgcgccgcgtgcatgaaaaggcggctccggaagaactggatgcggataccgtgctgctgacgcagaccaaccgcaagctgctcttcttcaccaatcgaggcaatttgtatgcgcttgccgcgcagcaggcgcccgagtgccagaaggtcaaagatcgcggcctgccgcccagcggcctgttcgtgggctgggagaaggacgagcgcctggtggcagctttcgcgccggaaacgttcgaaggcgagcttttgtttgtctccgccaatggtatggtcaagcgcgccttgctgaacgaatacgatgcccgcaagagcaagctggccgccgcggggctgaaggacggggacgaaattgtttgcgtgcagcttcttgccgcgccggaactgctcttggtttcgcggcagggcatggcgatccattttgccgtggaagacattcccgtgcaggggcgcacagccgcgggcgtgaagggcatgaccctcgcaccgggcgatcgcgtgatcgctgccgtgcagaatagcggggcgggcgaagtgttgctggcgaccgagcgcggctatgccaagcgggatctgatcgtagatttcgatttgcaggcgcgcggcggcaagggattgcgcgccattgccttccagaaaaacggcgcgacgggtacctatttggtggatgccaggctcgttatgatgccttatgattttgtgctgcgccagaagagcggcacgcgcacgcggctcaacacggaaatggtgcgcattgaggagcgcgcgggcaaaggaacgctgtatgccgtggtggtgatggacgacgtggttgaaggcgtcgagggggtctaagggcgtatgcaggcggtttttgtgggcgcggcgcttgtgctgctgaacttgttcgcttttatcctcttcggcgtggacaaatctcgcgcccagcgcggcgcgtggcgtatatcggagcgcgcgctattgctgtccgccgcctgttttggcggcacgggcgcgctgctgggcatgcgcgtgtttcgccataagacccggcactggaaattccgcattctcgtgccgctgctcgcggttgcgcaatgggggcttatcgcctttattgtttggaaggtttatgcataaaaaattggcgcgagccgcaaggctcgcgccaattttttatgctattttacgccttttcctttttcgccagcgtgaggagcgaaacgaggcttaccagcagcaccgcgatgcacagcaccagcgaaaccacccaattggagcccagctggaacgcgggcgtggagaggaaaccccagatgccgctaatgccacaaatggcgggcaagagggaaacgatggcgctcttggccttgatgaggcaaagcacgatgccgactgcgccgctcacgagcaccaggatgggcatacccaagatctgacccgcttcgatgtcttcattgcccgtttgttccgccagataatcgtccaaatcgcggcattcgcccgggaaccagatgtaggtttggatggaagtggcgaaggactcttcctccgtgctgtagtgccagaacggcaggaactggaataccaggatcaccagcataagaacgacacagatatagttgcagattcttgccagaccattgtttgtacgagacgccatgaatatccctccacacttaatatttagctaagcatagcatggatttctaaactcagaataaattatatgcgaattgggaataagcttcccaattttgtaaaatgaaagacatactattcaccattcaagcggatattagagccgtttcaccgccttgtatcccacgccgcgcacggccaggatggcaaattccggccaatcatggaagcgcttgcgaagccgggagatatgtacggttacggtttcccagccgctattgctctcagcgccccagatttcgtccattaaatccagccgggaaaagaccttttctgggttggagagcagcttaaagagcagcaggaattccttttgcggcaacacgtggatttcatttccgcgccgcacggtgaaggtatcataatcgagcgtgacgttccccagcaaaattttatgttcccgttccacgcgcgcgcggcgcaaaagcgcttgaatgtgcaacaacagctcttcgccatcaaacggcgcgggcaaaaaatcgtctacgcccgcgcggaacgcctgcttgcggtcggagggcgattcctggctggccaacatcaaaatgagaggctcgctgccgacgctgcgcagcgtttgggtgaattctagcccgttcataccgggcatacaaagggggacgattaccaggtcggtatgccagctttccatccggctgatggcatcctctccattggcggccagcgcaaccgtatagtgcccggattccagcaggtcgcgcgttttttgccgccaggctttgtcataccccgcaacaagaatgtgaaacatcgcaccaccccttggccgaatttgcgcgcgccgcgcgcgggaaaacccgccggttcattccacaaagacggcgctataccaattttgcgcctccgtttccggatgctctagcgtgcaaatgggtagcccaaagccccgcaccgttttgaatacgtcgatccccacggaatggaacgcgggccgggccatgcgcgggaagcggcacggggcgttctccgtagcggcgcatttgccgcaaagcgcgcaatcgcttagggaaaaggcaaaataatagccgtcgtggaacgcgcgcgattccaaggccagggagattttttgcgaaagggacttgtccgcggcgtgcacaattatgccccattggtagcgcgaaagcatttctttgtattccgcgagggaaacgttgttcgcccgagaagggcaggtgtggttgcacccccaatccgcgcagccaaacatgcatttgtgcagcgtgcgcgaatcaaaagcgatatcctccagggaaaagaccaccgcgtgcaaggcgcccatttccagcgccaggcgcacatattcagccgccgcgcgcgaagattcggcggaaagcgcgttttctgcccgcatacaatcgctcctctgcttcttggtaagcgcgcgcatattccgcattgtccggttgctggcgcgccgcgatgcccaaatacgtggccgctttttcgtgctcgttgagcatgaaaagcgcccggccaaaaagatagttccattgcgcgcttctgcccgccatgcccatcaaaagcctgcgcgcgtgcatgggccggttttcgcgcagcaattgttcggcgtcttgcaagcaggcggtatcgccgccgcaagatgggcctgccatgcgcatgcattcggcatatgcgctattgatttccagcatgcgcgcctcggcccaggcccgttccggccccgcggcaaagcggtctggatgccagcggcgggcaagcgcccgatatgcccggtggatggcttcgcaatccgccgcgcggtcaatgccgagcgtttcaaacggatttggcaagcgcaacaccttccttaattttgcaatctttgtcctattatagcacagtatgcggcgggtgtcacgccttagccgtgcaaatcgcgttaaaaaagcgggccgaatatgagaggaacgaaaagaaggtgagacttttttgcgcatagaatagaataatgttaaaaatagagtgcgcccatggaaatttcctcgaattcgcgttaaattccgcgctttgtatgggattttaacgccgcgtgtggtatactgaaagcagcgggtgaaaaaggggcgtttttttcgctggccatgcggtggctggcggccgcccaggggtattcaccggaaattgtggatgtacggtcgccgcgaaggcgggacttgtagaatacattttgcgcggctatgcggctgcgcttgttggtatgtgttttcgtgcgtcaaaattgaagtaaagagaggcattttatggcaagaggcaaaaaagaaaacaagccaaaacttcgcatcattccgctgggcggcttgggcgaagtgggaaagaacatgacggtttatgagtacatggacgatatcgtggtggtggacgtgggatccattttccccaaggacgatatgcctggggtggatctcgtggtgccggatatcacctatctagaaaaaaatgcggatcgcatccgcggctttgtgatcacccacgggcatgaggaccatatcggcgctgcgccctatacgttcaacagcgtcatcgctccggtgtatggcacgcagctcacgttggcgctgctcaaccataagctcaaggaacaccgcatcaccaacgtgcctttgaatgtaattgagccgggcgatacggtcactctgggcgcttttaaggtggaattcatcaaggtgagccactctatcgcgggcgcgtgcgccatcgcgctgcacacgccggtgggcgttatcgtgcacacgggcgactttaaggtggactacacgcccatcgacgatgagatcatggatttgggccgcttggcggagctgggtcgcaagggcgtgctctgcctgctggccgattccaccaacgccgagcacgcgggctacacgatgagcgagcgcacggtgggcgaaacgttcaacgcgtatttcgccaaggcggcggggcgcatcatcgtggccatgtttgccagcaatgtgcaccggattcagcaggtggtggatttggcggtgcggtaccggcgcagggtttgcctcgtagggcgcagcatgatcaatgtggcgcaggtagccatgcagctgggggaattgcacatccctgagggaaggctgttctctatcgacgaaatcgaccgctatgaggataacgagatcgtggtggtgaccacgggtagccagggcgagccgatgagtgggctttcgcgcatggcgtttgccgagcacaaaaagctggaaatcaaagcgagcgatatggtcatcgtgtctgccacgcccattccgggcaacgaaaagagcgtttcccgcgtgattgaccagttgatgcgcacgggagcggacgtgatttataaggcgttggctgaggtgcacgtctccggacacgccaagcgggaagaactcaagctcattcacgtattgacccgccccaaatatttcattcccatccatggggaataccggcatctcaagcaccatgcgaacctggccatatccctgggcatggaccccaagcgcactctcgtgccggacaatggggatattattgaggtgaacgacagttccatgcacaccgtgggtacggtgccggcgggcgcggtgctcatcgatgggctgggcgtgggcgatgtgggcgcggtggtgctgcgcgaccggaaaaagctttccacggatggcatgcttatcgtggtgatgggcatcgaccatgaactgggcgaggtcgtttccgggccggatatcatcacgcgcggctttgtgtatatgcgcgaggcggatacactgctggaaggcgcgcgcaacgcggccatccgcgcgctgggcaattacggcaggatcgagccgagcgactggaaccatttgaagaacgatgtgcgcgattgcgtgcagaagtatatttacgatacgatcaagcggaatcccatgattctgcccatcgtggtcgaaatttgacgcggctcttttcgggccaggaagcgcaactttttgccgcggcatgcgtctaaaaatgaggaggctgctatggagaacatctatgaccaggcgcgcgcgcttgccagcgctttgaaagaaaccgaagaataccgcgaatacacgcggttaaaagcggtggcgtatgaggattccaccaacaaatcgttgttggatgaatataagcgcctgcaatatgccatgcaaatgacgctcgccagcggcaaaaatgtggacgaagaggacatgcaaaagatgcaaaagcttgccgctattttgcaattcaatcccgatgtgagcgcgtatatgctggcggagttccgtttccagcgcatgctttctgaaatttttcaaatcctgggcgagacggctggcatcgatctggacgcgctcgcggggaaatagcgttataggagaaccaatatggcgaaacggtatcccgccaaggcgcccgcgcacaaggggcagccgcacaaaaaggcggcgcgcaagcgcccaaagcaggaaagatacacggaaaaaacgctgcgcgaggatcgcgagtacggctttttctggtacgattggctgtggcgctttttgcgcccagtaatgatctttttgtgcgcgtttgtgctggtcgcgggcattctggtcacgctctggaaccaggtatacgccaatttcctgatgcccatggatccggacaacgatgagccggtcaccttcacgatcgcttccggcgaatcgatttccaccatttcagagcacctgtatgagcagggccttttgcgcaacaagggcctgttcaaatacattatttccttccagggactgacgaacgacattcattacggcagttatcagctcacccgtgccatggacgtgatggatatcatcgatgtgctggccagtggcagcgaaaccaccgaacgcaccatcaccatcattccggggtggacgtgcgaggatatcgcggattacctggtgtccgtgggggcgctcaccaatcgggacgagttcctggccatatgcaaccagccggaattgttcctcacggatagttacgcgttgcaatacgcctatgagtctgcgggctttgccaaccggctgtacaagctggaaggctatttggcgccggatacgtatcgcgtgtttgccaacgccagcgcgcagagcattgcgcgcaccctcgtgttgcagacgaacacggtgtacgaccgcgtgttctatgcggaagatagcgtgcaatacgacgaggaaggcaacctgattcaggaaggctatgtttcgcccctcaccatggatcagacgctgatcctcgcctccatgattgaaaaagaagccggaaatcaggaggatttcgcgaaagtgtcggcagtgttccacaaccggctgaacgccggcatgcgtttggagagcgatccgacggtaaaatacacgttgggcgtggatacgtttacgctcacgaacgagcaactcgccacgcagtcggcgtataatacttaccagatttccggattgcctgtgggccccatttgcaatccatcgcaggccgcgctagaggctgcgttgcatccggatgaggcgtttatggcagagggatattactatttctgcgccacggagccggattccgacgcgctggctttcgccaaaacgctcgaggagcataacgcgaatgtggagcggtatcgcccgttgtgggaagcttacgatcgcgaacagcagggcgagtgaagcaaaaggccgccgcgaaagcgagtggaaatcggggagcgggataatgggcaactataggatgcgctgggctgcggtgagcgacgaccgtgtttttcccacgaagattgcagaagtgttgcaatccgcgagcggcgcgcatagccatgagttttttgaaatcgtgtatgtggtggaaggctttatgctccatgcgctgggcggagagagcgcgttgctgttggcaggcgacatcatcgctgtgcggccaggagacgagcacttctaccatggtaggcggacggcgaccatcatcaattttctctttttgcctgaagcgctgggaagcgcgttgagcgaagtttgcgcgttgccaggcatggcggatttctttgccgagggcccgtctagcggctggaagctgcacgcgcatctggaactggaagaccgggagcgcgttctcgctttgtttcatgagatgcaggaggaacgcgccgcgcagaaaaccggctgggtggtgcgcagccgcgcgttgttggtggaatttatggtgcttttgtcgcgcgttttcagcgcgcgttttcccgcttcacgcatgggggatagcgcatacacgggctatgtgagccgtgcgatggaattgattgaggccgactacgccatagacctttccattgcggatatcgcccggcaggtgggcgtgagcgccgaccatttaacccgccaattcaatcgcacgctgggtatcacaccgtcggagtatctgaggcgttttcgctttgcgcgcgccatcgagcttttgcgccagcaaacagcggtgggcgatgtgagccggatggtggggttttcccatattagccatttttctcgcgaatttaaggcgatgtttggcatgaatcccagcgaatacgcgcgccgctacgccaaaccaccggcggaaaaaggataggttctctttgaaacaaatgccggcattttttgcattgcggtggggctgtgaaagaacaacaattgtttttcgccgccctgcattcgtcaaaggcggatacaaagcaaaataaaaaggcgcaaaatccccttatcctatactcgaatggatagaccgaaaagaggaaggtaagctggagaacgaggcttgcttaccggcgcgtgattcgcgcgcgcgagcttgtgccagcctgtttgcgatgcgcttcgctttttcttctttttgtttttccttgcggaaagggctcgcgatccgtttggcacgaaacacttgccaagcgcggcaaaatgcgctacaataacagtatctactagaacaggagatggaacccatgcaaaagttaactcccaaggccttggatggcgtacacgctctatatggcaacgattccagcgcagaacagcgctgtgaagccctgatcagccgttttgagagtcgctacggctatgcgccacaacaactggtcagcgcgccgggccgtacagaaattctcggcaaccacaccgaccacaaccatggccgggtactggccgcgtccgtaacgctggatacgttggccgccgtcgcgcccaatggaacgaatacggtgtatctgtattctgagggcttcgctgagcccttctgcgtttcgctggatcaactcgcgcctgtgaaggctgaagagggtaccaccgccagcttgatccgcggcgtggcggcgttcctcaaagaagagggcgttcccgtggccgggtttgatgcggaagtgaccagcacggttttccgtggctcaggcctgtcctcttcggcggcatttgaggtgctgttgtgcgcaattttcgacgcgctttttggcggctggcggctggaagccaagcaccgcgccgcgctgtcgcaaaaggtcgaaaatcagtatttcggcaagccctgcggcctgatggatcaaatggccagttccgtgggcggcctggtggccatcgattttggcggagcggaagcgcaagtcgaatcgatgaaatacgattttgccgccaagggtctgcgcctgtgcgtggtgcaggcgggcggcgatcacgaaaatctcactgcggaatatgcagccatccccgcggaaatgcgcgcggtggcgcgcgcgctgggcggcgaggtattgcgcgatattgcgcccgaagcgctcctgaaggccatccccagccttaaaaaccgcgtgccggatcgagccattttgcgcgcgctgcactttatggacgaggacgcgcgcgtggccgcggctttcgaggcgctgaagaaagacgatttgggcgagtttttgcgcctggtcattgcttctggcgaaagttcgtggaagctgctgcagaacgtttatgtcgcgggtagcgacaaccgcgaaatggcgcttgcgctggaactgtcgcgccgcatgctagaggggcgtggcgcgtggcgcatccatggcggcggctttggcggcaccatcctggcattcgtgcccgaggatatgctggcggtctatcagcaggaaatgaatggcgtgttcggcgaaaacgcctgcgtgccgctcgatgtgcgccctgttggcgcagtacgcatcgagctataactggcgtgaaagaaggaggaacggccatgttactcattcggaacggcaagctcttcaccatggagggcgaatattacctcgatggcgcggacattctcatccaggaaggcaagattgccgccgtcgggcggaacttgtccgcgcccggggcgaaagcaatcgacgcgactggccaatacgtgatgcccggcatcgtggatgcgcacagccacattggcatgtgggaggatggcatcggcgaggaaggctccgatgggaacgaaatcaccgacccagtcaccccgcagttgcgcgcgctcgacgcgatcaatcccgcggaccgcagctttgtggaagcctatgagcacggcgtgacgttggt

SEQ ID NO: 2040 - DNA, 4416 bp, Unknown
  16S sequences of unknown bacteria
ggctctgtacgggttggaaaatctttcgttgtattcctcgaccttctgctgtttaaacgcctgaggatcctctgccgcccggatttccggaccaaacacgatattggctgctccgtctgcgcccataaccgcgatctccgccgtcggccaggcgaaaacgaaatccgcgccggtttcctttgaattcatagcgatatatgcgcccccgtaagctttcctcaaaatgacggagactttcggaaccgtagcctcacagaaagcatagagaagtttcgcaccgtgacgtatgattccgccgtgttcctgctccgttcccggaagaaatcccggaacatcttccagcacgagaatcgggatattgaatgcgtcgcagagacgcacaaaacgcgccgctttatccgaaccgtcgatatcgagacatcccgcaaaatatttcggctgatttgccaccacgcccacggtggaaccgccgattcttatataacaggtgacgatatttttcgcaaaatccttcatcacatcgaaaagttcgccgtcgtccgccaccgcgcggatcacgtcgtacatatcgtaagcccgattcatggattccggcacgatctcggcgatttccggaactttccggttgatgtcgtccgaggactcatagaccggaggattctgcgcgttgtttgaaggaatatagctcagcagctctctgacgtgagcgatagcctcttcatccgtcgaatccgcgaagtgagccgcgccgctctccgtattatgggtaacggcgcctcccagacgctctgcggtaacttcctctccggtcaccgtctttataacggcgggacctgtgataaacatctgactcgtaccctccaccataaagatgtagtcggtaatcgccggcgaatagaccgcgccgccggcacacggccccatgatcacagaaatctgaggtatgacgccggaagactgtgtattattgtaaaagatctttccataacctgagagagcgttgaccccctcctgaatccgcgcgccgccggaatcattcatccctacgatgggcgcgccgcacttcaaagccttttcctggatattggcaattttctgcgcatgcacttcccccagagaacctcccagcaccgtaaaatcctgagcgtaggcgcagaccagccgtccgttcacggttccgtagcccgtaaccacgccgtcgccggcaaaatgctgcgattccattccgaagttcgtgcatctgtgtatcataaatgagtctgtttcgataaaactgccttcgtcaaacagaaggtgaagacgttcccgcgccgtcagctttcccttcttatgctgtatatcgatgagatcctgcccgccgccgaggttcattttctccttcagcgcctgcagatcagtcagtttgctcataatccgctcccttccttttcctgcttttcccgtctttttcctctcgctgctccatcccggctccggccgtatcagtatctttttttgccgaacggcgctctgaaacgtcggcggaatatgtagaagaaatttattttgataatcaaacaaaatgcatttctattttatgccatccttccgctgttgtcaatatcaaagggcggaaagaaagaacagaaaaacctgacggccggcaaaattgatctattcattttctgcgagtttttaccagtacagagcgatgaagaaatcgccgagtgattacggattcgcgggctgacatgccggaagccccgatccgatttgatttttatttatgcagagctcatagaattaagaaaactgaggaaattctcccggacgccggccttgcatcgctttttcagatccgaattccggaaagaaaatcataaaataaaaaacagaccggcagaaaatatgatctgtaccggcctgtttcgttttttgacttatcatgggcaggagttctgtctccgctgtcctcttacagcttccgctgctgttttgtgacgggtcgcagcctgccggagcggttcaacttcatcgatccccactgatctgtgacgaacagttatgacatctgcaatcccctgcgacggatcactccggcagaatcactgtcgtatctctggtctcaagagccgccgcaatcagagcctccttatccagaaccgattccgatttcagaatattttccagtctcggttttgtcaccggatgcttcggtaaaaagacggtacagcagtcctcaaacggctgaatggaagtctcgtacgttccgactttctgcgccagatccatgatgtccaccttgtccatcgcgatcagcggacgcatgaccggcatagagaccgcgttgtccgtcaccaccagcccctgtgccgtctggctggccacctgaccgatattttccccggtgatgagcatatcgcagccattatctcttgcgatgcgctccgcgatcatcatcataaatctcctggagaggatcgtcatctcatcttccggacagttttcaccgatagcctcctgaattcccagcagatttacgcaatgtactttaattctgccgcaataggacgccagaatgcgggtcaggtcgaacactttctcctgcgctctctcgctggtatacggataagaatgaaaatgaacggcctcgatcaccatgccgcgctttgccatcatccatgcggccaccggactgtcgatgccgccggacaggagaaccattcctttgccgttggttcccagaggcagaccgccgaaccccttgatcttatccgcatagatgtaggtatagccgtgtctcacattgacatacaaaacgcagtccggctgatgaacatccaccttcagaactttacaatgtttcagcaccgcgccgcctacgcgttttgaaatctccggggattccaccggaaaagacttgtccgctctcttcgcctctaccttaaaggtagcgatatttctgctcttcatgagatccgccatatattcgccggcagcttcataaatcacatccagatccgacgccacctccgcggcgtgactgacagaagcgacgccgaagactctggaaatgtcctgaatcacctcatccgcatcgtaccgcgccggcgctttgacgaagatcagaccttctctcctgtttgcttcgactccatcatattttttcaggttccggcggatacgctccagaagaacccgctcgaaataaggtttattcattcctttaagagcgatttcgccgcatctgacgataaaagtatttttttctttttccataattctgctcctctatctccatgccggtcatcccggcagtatattcaaaaaactctgtcctccgtatctttccgcagatatgccggttccccggtctttcctctatatcgcggcacgctcttcgccgcgaaaacggtctctctcgtgtcctctcctctttgcaaaaaagacgtattttcatcctgctcaccgtatgtctccgcggtaccccgcattccgtcaaaagatcgaaaagatttacctcaacggcgttttgtggatttattggccaacgccagcatttttctgtttctcgtcaccgccgctttcagttcttttaaaaccgcatcgatctcctccggtgtattctgataagaaaagctgaaccggacagcgccttcgatttcctcatctttcagtcccatagcgcgcagcacgtggctgccttttttctttgaattggaagaacaggcggaacccgtagatacataaatttccttctgttccagcatatggagaagaacctctgctctcgttccgaggaaactgacattgagaatatacggaagacacggggccgcgcccgccggactgttgatcctgacctccgggatttcgcgcagaatcccctccagaagccggtctctgagagatgtcacgtgagcgagattttcttctaattccccgcaggccagccgggaagcttccgccattccggcgattcccggtacattctccgtgccggaacgcatacctctctcctggcctccgccgatcatataggggacgattctcatgttatggtcaacaaacagaatcccgacccctttcggtccgtgaattttatggccgctcgcagacagcgcaccgatcccggcggcccgtaccggtaccggaatctttccgaagctctgaacggcgtcacagtgaaaaacggtgtgttctctcccggaaagcagcgctccgatctcttcgacaggctggatcgctcctgtctcgttgttcacatgcatgacggacaccagaatcgtgtcctcccgcagagcggatctcactttctcagcgctgacgatgccgtttcggtccggcgagagataagtgacggaaaatccttccgactccaacttacgaaaacattccagagcagccggatgttcaatggccgtagtgatgatatga

SEQ ID NO: 2041 - DNA, 29978 bp, Unknown
  16S sequences of unknown bacteria
aggtaggtaggtaggtaggtaggtaggtaggtaggtgtacatacgttcgcggcaagtttgagcagcccgacaagcgacacgagccgcatattgtcgtcgatatcgagaaggtttatcccagcgagccgccgcgcgcactcgaggtcgtcgccctcaagctcatacagtgagaactgccgctcaaacagcttgtgcaattcgtcacgaagtcccgccccggcgatgctcttctcggtgaagtagaaaacaaagcactcgtacctgtgcccgcgctcggcgttcgccgtgtggaaagagtacggacgatgcagtctcagatggggcttgtcggtcacataccgccggtcgccgctcagaatctcgaccctgccctcaagcacaagcgtcagttcgtattttgagtgaaaatgcagccagtcctgactgaacccgtctgaaacgaaatgctgcaaataaatgtcgtcagagcgtccggagacgtcatagaacagtatcttccttccgttcccgctgtccgggacagagacaatatccttcatggataatcagctcctttctggattctgataatattatatcacattttccggtttatggcaatatgaaaaaacagtctgatttatggactttccggtaaaagtatgtaattttaaggaaacatgtgctgttaatttccgcgaaaaataacatttttgctttaagtcatggtattatccggcaaaacatcgggaatttgtgcatatttggacttgacaccgagggacggcgggtgtataatttatggtggcacacaaatgaatacactgagcatggatcgctacggcattatcggcgcgtaaaattaaaccgttttatttttccggaaccgatctgttcagttcaccctacgattcttttttgggagatttttaatatggatttagaaatgatgcaccccgccgacaggatcgtcacgatcatgaaccgtctctacaactacggcatgaccacgacctccggcggaaacctctccgtctgcgatcccgacggcaccgtctggatcagcccctccggcattgacaagggctcgctccgccgtgaggatatcatgcagataaagcccgacggcacaatcatcggcccgcacaagccctcgagcgaatatcctttccacctcgcaatctacgccgctcgccccgacctcaaggcggttctgcacgctcacccgccggctctcgtcgcgttcagccttatccgagagattccggacaccacgctcatccccgacgcgaagctgatctgcggcgacatccgcatggctgagtacgccctcccgggaagcaagctcctcggcgagaagatagcgaaggaattcgcgaacggcatcaacaccgtcatgctcgaaaaccacggcgtcgttataggctccgacgacctcttcaaggcgttcatgacattcgagaccctcgactactgcgcgcgcctcgaaatcaacgcccgctcgctcggcaaagtccctcacggtctctccgacaagcacatggcgatgtacaaactcaagattcaccccgagatggacgagttcgtcccgcgcacccactcaagcgaagagctcgacgcccgcgccgagatgtgcaagctcatccacagagcgtatgacaaccagctcttcatgagctctcagggaaccttctcgaagcgtctctcggacggctccttcatcatcacgccgtacgacatggacagaaagtacctcgagcccgccgacctcgtaagaatagaagacaaccgcaaggagcacggcaagaacccgtcccgctccgtgaacatgcacaaggctatctacgagaagcatcccgaaatccagagcatcatctgcgctcatccgccgcacatcatggctttcgccatcacagacgccgagttcgacgcccgcctgatccccgaaagctacatcatgctcaagaacgtccgcaagttcccgttcggctccaccttcatgcagaccgatctcctctccgatgagatctccctcaagaaccccgtctgcatcatcgagaacgactgcgttatagtcggcggcacctccctcataaacgccttcgaccgtctcgaggtcatggagtacagcgcgaagtccgtaatagacaccacggcgctccacaagcccgtcgtgaagatttctcctgaagaagtcaaggacatcgaagtcgcgttcaatctgtaagaaaagcaaggggaggaaagacgctttgaaaagcgtccttcctccccctgcaccccctccatcccgtaaactttatactctatcaacaaacgctcgtctctgcggcgagggggaacaagatataaaccgaagaacggcagccacacgactgtcgctctttttttgctatttttcggggaacatcggcattccgtgtcccggacacaaaatatagtccgaataacgctcattcacaatgccgcgtatcgccttggctttcgccgagtcgacattcacgctcgtcatcaggtacggagccagcagattgaaatcgtactgctctttcgtgaaacccttcacattaacaagtatatcgcccgtaaacgcgagccgcagtctctcggaaacaatcagcacctccccgcgcacatgaccaccggcaccctcgtaaacctcgaaccgcagcccgcaggcgtcaaacccgcctatatacgaaagcatcccgtcatccgtcttctccccgacgacaaccgcccgcgaaagctccggcggacgatacccggatattatcttactcagcacgcaatacggcgcgtgaagcacattctgctccctgaaattcggctctcccgccctctcgagccggaagttctcgcagcagctcgccgacatatacaccctgtcgaacatatcgcagagccccgtatggtcgatatccgcgtgcgtgatgacaagcgtcttccgcctcgaatgaaagtccgggaacagcccctcgaatatccccgtcatctcttccctgtagcacgcgaacccacaatcgacaaacagcagctcctccccgccattgtcaagtatataagtatcgctcccgcacggcggctgaaccgtataaagcacatacccgtccgaaagctcgtcccgccttatctccgcgtgaaactcgtcgccgtggtgctccgcgacaaacttcgcgaagcggcggatataatcgaaggtcttgagcggcgtctccccgcgctcgtcgagtatctgcatgacgcggtttgagtttatcagcacagaattcgtagtctcctgatcgagagacaatatattcctcatctcgttcgcgaaggtgatgtagaacacagtgccgtcgagctgcttctccgtcacgtcgtactcgactatcctgacctcgcatattttcgagacgtcgtcaagaagacgcctgatctcgtccgtgttctcgacgagaagccccattttgaaatactgatacggcgtcccgttctcctgcgaggacatatacgatatattgacgtcatacccggcgatgacctcgagaactggtctgaccgcgcccgccgcgtccgggagcttcaggacaataaggatgacctgtctgccctcctctgttccggttatatatccgatgctctcgagctcggagagtatccgcttgtgctgctcctcgtccgccgagacctcgataaagagcgtgtgaaggtcgaccgccttgttgtagttcaccctgacgatattcccgccgtgctccgctatgacccggctcgccctcaggaacgcgcccgccttgtccggcattttcgttatatatgtgcgtttcataaaatcccttccgacagactgaaatcaactgaataaggaaacactgatttaaggttgttttcgcggaaaaagcccataaatcagggacttttttccgcgaaaacccgatttgttcagtgtatcattaattctacacccatcccgccgggaaatcaatacatacaatgtaaactcccggaaaagaaaaacggacggcagattgggcagtgtctgtaaaacagcgaatcctccgtatgcctgcaatcatacggaggattgttttctacatataattcaaacttgctggcagcgaacagcattttatactgtttgcagacggcaagtccacagggggtagccgcattcgcggcgcaagtggggtagccaccttgacggaacgaagtgaccgcgcattcgcagtcaagcagttttcttctgctgacggagaatgaagctccgcgggatgcactacgctcgatagagagtatagaagtgcgccctttagttcctaaagggatttttcgcttacttttctccctgacaaattcgtaattgacttacttcttttcgggtaaaaaagtcattacagcacctgcgatgccgacaatggaaaaaattgcagaccagctaaaactcaagtcgaatacaggctcgttaccgaaaccaatcatcaaaagaatacttactaaaattattgctataccttgcagttgtttcttcatgcaaacgccacctttcatttatctaaaatagtttagcacgcctttgtgaacatggcgtgatagcttcacgagaataatgtacttcctttgtattttaagtatatcagagaattgttaagaaatctaccgcctgcacaagaacagcccgaacatttttgtccgggcggtctcgttatcaatcatagataatttcaagcttcacgatagcatctgcttttgccttgaaagcgttcatctgccgtacccattccatttgattctcggctttcagctgttcggtcacgccgtactgcttcgccagctccggtacgatttgcctcatgcggtttcgtgccgcttcgttgatttcggcacaatgctgttttacagacaccaccctataagctgcccgcttatattatcacctcacgacaatttctttcgctacggtcgttcccgcgaagctgacagtgccgtcagagaatgtgaactctgtcggtttcccgtcgatcgtcaccgatttcacgtcgtcaagatacggaagctcaagccgctcaagcttcatctcgccgcttatgaccgtgagcctcgtctcctcgccgatcgtcagggttccccaagcgttcccggtgaaccagaccgtcctgaagccctcgtgtccggtcagcgggtcaaagccgagcatcccgcgcgtgaggtcgaagcgcataccggaaattatcggtatcagcgcgaaggacgccatcgacctcgcgtagtccgagccgcactcgatctcattccagggattcctgttgtaacctctatatctgtcacgcacagcttttaccacgcgtagacctttcttcaagaacccgcggctgatgagcagtccggcaaaggcgtactcgaacccgtgcatagactcctgcgcgtaaggtatcggtatcgccggcttttgcgctccctccggataatcgcagatcacagcccccgcctcgtcgttcacagcgaacaggcggaacgtgttgtaatgagagcgcatcgattctttgaaattgtacgagaacatattcccgagcgccgtcttcacctcgtccgggtcgaagagatcgccgagccccattatgtcggcgtgccactgcgcgagaaggctgtctatctcgcagccctcgccgatctggtattttatctcccccgcctcgctgttccagtaatggtccgcgccgaagaggtcgacgagcgccttgtctttcaggtcgatcttctggatgaagtatctgccgttgaagagctccttctctgtgaaattctttcccttctcaaaaagcgccgtgtattcgtcggcgtcctcgtctccgagagcccgcgccatctcggaggcagccttcagggcgccgagatagaagccctcaagccagcttgacggcccgaacagctccatatcgagcgtgtggtgctgtcttccttcgagaaccccgtcgcggtccgcgtcccagcggtctgcgttctccggcgaccacgcgaactcgagcgagcgcttcacgtctccccagataccgcgcagccactcggtgtctccagacaacttccattcgcggtagaccttcattatcccgccgaactgcccgtcgacgcagggtctgaagcctccccgcccgcttccgaacggtatcgtcgtccggaaaaccatgcccccgtccggtctctcgttgtacctgtagtcgttctccctgagccctctctcgagctccgggaagaggaacggcatcgcgtaggcgtaattccagacatgagtgcaggtgcccgggcaggaaccgccatgctccccgagcccttcccagccgtagaaatcgcccttttcgccgaaccttatcgacgtctcggatttgagcacggagcttgtcgcgctgacagcctcgatgacctcctccgggagagtgcaggcgaagagctcgtcgtgccagcggaaggtgtcgtccctcagtctcttccagttgtcgaagacgtacccggcggcgtcgcccgcgctctcaaatatgtatgagtaatagtttctgacgtcggctctgccggtcccctccatctggagcccgcgcttcatcgggtagtaccatgagatgacaaacctgatcttttcggatgagcgtccggagagcttcatatgagcggcgagcgtggcgcagtcggtgttgcctggtgtttcatagtgacggttgacaaagcgcggcatctcggtgaaattgcgccaatatgtctcgagatagtcgtaccagccgccgcggtaccagttctcctgatacgacacatccccggcgtcagtgaacagcgccatgccgtccggctcctgctccttcccttcttccggagcgccggagaggagtattcccttcttcgctccgctttcggtgaagaggttcacagatctctgcgacgggtttctcagcgtcccggcgagggtcaggtcgattgtctctccggttttgttcgtgacctctgtttcaaacagagcggcgggaatgctcgagtccttcgcgttctgcgggatgaacgggttgaaggcggtcagcttcaccgaaacggggctgtcagggtcgtcgagcgatacttcggctaccgggaactcccccatgaagacgcagtcgcggaagtgcgggaagccctgcatcgtggtgttcgagagaccgaagccgtagtcctttccggtctgaccggcgagatttttgaagacgtcaccgcagaggacgcgggcgtcgagaagctttccgtcccgttcggctttgacggcgaagtgcgtgtgtccgttatctgagcctttgttcgggtgaccgaagatttcccagtcgataagacgtccgtttcccgcgagacctatagaaccggttccgatgccgccgagcgggaaggagatctcgtcggtagatctgccggtgaaggttgttcctgtcattgtgattacctcgtttaagcttgatttgttcgtgaatattcagcgtgtacgttaacgtcaagacgattatagcacattttttcccggatgtcaataggtaacacaaaaaatcttcatgcgtggttgacaagacggcggaaatgtgctatcataaatatgaataagtctggaggaaaacgttttggcacagagaaaggttacggtgaaggacctcgcgaggatatgcggggtatcgataggtacgattgacagggcgataaatgacaggggcgggataaatcccgggacaaagaagaaaatactggaagcggcgcgggcgaacgggttcgtgaagaatcagacggcgctgtcgctgagctccgggagaccgacgctgatcggggtcataataacggcgctcaataatgagtttcagacgacgatgctgacggcgattgaggaggaggcgaggcggcgtgggttctctacacttataatgttgtccggcttcgatgaggagacggagttcgcggcgcttgacaggatgctttcgatgagcgtcgcggggatcatcacgttttcggtggcgcgggacgcggggaggtatctgcggctttcggagactctgccggtggtcgcggtcgggaacaggatagacgggcggataccgtttgtcgggatagacgacagggctgcgatgcgggcggggacgaggtttgtcgcggggcgcgggtatgaccggctggtttacgtggcgccgctgctcgagcgtgagggaacgcagaatatgcgggcgcagatccggcgcagggacggttttcttgacgcggtgcgcgagtccggcgtgcggtgtgagatgattgacagttacgagaagtacaatgggcttggttcgtatgtcggcgtcgggcggatggcgtttgtgtgttcgtcggacgtttatacggttaggtgtctgccgtttcgttcggatagtgtcggggtgatgggctttgacaggctcggcatgatcggttcgctggtacctgacctgagcggcgtggtgtatccgacgtcggagataggtcggagcgcggtgtcggtgcttctggacggcggcgaagatatgatactcccctacgagacagtggagggcggaacggtctgaaagctgtaatttggcgcggatatcaaaaaaagatatccgcgctgtttttgtagctttttcgacgcacaatgtttgatgaggcagagccttcatccgactgtagccgaaaccttgactatcgggtccaggggctggcccctggcgaaaatgtttcgttggggaatgggttgacttttgggcagaattgttgtatgatagtattggatgggggaggtaaatgtgagaaatgacttatcgtaagattgcgcagcttgcgggggtttcgttgtctactgtttctaaggcgctttcggggagctcggagatcagtgaggagacggcggagaggatacggcggattgctgaggagaatggggtgatacgggctaagtacaggaaggatcgtccgtctactgatattgcgattattgtgccggagattgtgagtgtgtattattcgcagacggtgagcggggttgtggcggagctccggaagtttgatattgagccgcatatacatctttgcgggtttgaggctgagaggtattgcaggataattgattctatcactgacggggataggattgacgggataatcgctattactgatatggtttctccgctgccgtttgatgttcctatggtgcggatttcggttaagcctacgagggacaggagcgatactattgactgtgacatcgagacggggatgtatgaggcggttgagtatctgatggcgctggggcaccggaagatcgggtttgtcagtgagaagaatacgaagcttaagtatctgtactttaagtctatcgcttcgaggctggagcttgaggttgacccgaagtttgtgtttgtcagcgataagcggttcgcggagatcggggcggaggcggcggagtattatatgtcgcttgacgagatgccgactgctttgcttacggcttatgacgaggtggcgcttggcgctatacatacgttttccagaaacggcgtgcgggtgccggacgacatttcgattatcgggataaatgatattccgagcgcgtcttacgcgagcgtgccgctgacgacagtgaggactcacgcgtcggagataaaccacctcggggtgaaattgctgcttgataagataaagaaccccgagggacatatgcagcagcaggtgcgggtcaggtgcgagctgataatacgcgacaccaccgcgaaaccgagacgggaacaggaacctgtcacgaaaaacgaaaataatgaccatgaggtcagaactgaaaggaattaaaaccatgaaactgagaattgacagaacaaagatcgtcggcaagataaagccgatgaacgccgtcaacaacggcccgaagtacaccgacaacgcggatcagaacctgacgaacctccccgcgtaccgcgacgctatgatcccgttcgcgcgcacgcatgacgcgtcgattgactattcgcttggcggagagcacacggtcgacgtcatctgcatcttcccggatttcgacgctgacccgtacgatccggcgtcctatgatttccagataaccgacgactatatgcgccacatagatatgtgcggaacgaaggtcttctatcgtctcggcaacaagatcgagcactggtcgaagaattacggcgttctcccgccgaaggacccgaagaaatgggcggtcatctgcgagcatataatcgcgcactacaacgagggctgggctgacggcttccacatgggcatcgagtactgggaaatctggaacgagccggatctttatccgaaatgctggaaaggcacgccggaggaattctatgatctctaccgcacgacgtcaaagcacctcaaggaacgcttcccggacatcaagatcggcggtccggcgatctgcggatacaacctgccgtggctcagacccttcttcgcgatgatacgcgacgagggactcccgttcgatttctattcctggcaccgctacgcgagaaacgtcggcgatatcgtcggcgacatcaggctccaccgcgcgctgctcgacgaatacggcttcacgaacaccgagagcatcctagacgagtggaactacgtccgcagcttctgcggagaggagtgggcgtacagcctccgcaatatgatcggcatgaagggcgcggcgttcacagcagccgtgatggcagcctctcaggacgagccggtggatatgctcatgtattacgacgcgagactctcaagcggcatgaactgcattttcgagggtcagacctgcacgacccgcaagggctatcacacggtgaagacctggggcgagatggcgctcctcggcgacgagtgcgagactgtctgcgacgttccggatatctggtcgacgacggctgtcaaggacggtaaatcgatcacgatggtaacctactacagcgacgacgacaacgccctcccgcgcgagttcacggttgagttcgacggcggcgacgagctgcgcacgatatacctgatcgacgacacgcacgatctcgagcccgtaaagactatagcctccgacaacgggaaattcaccctgacaatgaacgcgaacacggtggtcgtgatcagataaatgcttgaatactcatattttctgataatactactcctcagactcccgcagaacatcttcaacaaacgctcaagcggcatcgtcagaggagcccccgcttacttcgcgtacggcgcttacaggtatcttttatccggaggtatggctcttgttcttctgctgttcgccggaggtttctccggcgtcagcctgaaggcgctcgctatatccgcgatcggcgctgttgctctcggctcaaaccttttcttcggtcttgaggcgctcaagagcggcgcgatggttctttcctcgatggcgggatccgccgggcttctccttccatgtgtcttcggcatattcatgtttgacgaaccgatgagcctgatgcagcttttcggaatactcctcctcatcttctccggctggctcctcatcggatactcaaaaaagctcaagggcagcttcacaccccgcaccatgctcctcctcatcggcagtatgctgtcaaacggttttacaatggtagcgcagaagatgttctcgaagtaccttcccgacgtcagcgtctcggttttctcgtttctggcgttcgggctggtgggcgtcggaatgtgcgtcggtctcgtcccgcagctcacgaaaaaagagaaacgcgaggagataaagaagctcccgaaagccctctggttctacggagccggtctctcgaccatactgctcataatcaaccagctcgcgacaatcgccgccaaagtcatcccctccgcgataatgttcccgataaacgacggcggagctacaataatcaccgcgctgaccggcgctgttgtattcaaggaaaagcttacggcgagaagcgtcgcggggctggtgctcggaatagcgtcgcttatcgtgataaacctgttctgaaatcagacatcatactgttcccggcggcgatatgaaaagccgccccgtaacggggagataaggaagctttcggtataaattgatataaatcaccgatatcctgtgcggctcgtgtgactgtaatttcatcggaccggcacaatctatagtacaaggagaacatgaatcatgcgcaatatcagggattacggcgctgtcggagacggcgcggctctcgatacaagagccatccagaacgcaatagacgacggcgggatggtatacatacctgacggaatctaccgcacgggaaccctgtatctgaagagcgacggcggtctgcatttagcccccggcgccgtcctgctcgcgagccacgacagagaggactacaacgccgacgacttctgcccgcagaacgatgtcttcacctctgagcacgtcaccggcgcccacctcatcaccgcgatagagcaggaaaacatcacaatcgaaggtcacggaaagatcgagggcgaaggtcacttctggatgaacgagtcaaacccaatcccctatgcccccgacgaatacgccccgaacgacgagcgcccgggtcagatgatcttcctctgcgaatgtaaaaacgttcatgtgacagacgtcaatatcctgaacggtccatactggcacctcttcttccacggctgcgaggacgtcttcgtccgcggagtcacaatcaggggcgaccggccgaggtggaccaacgacggaatcgacatcgactgctgcaagcgggtaacggtggagggctgcgtaattgacgtcggagacgacgccatcaccatccgcgcctaccacaagcctctccttcacagcgacggcgtctgcgaaaatgtgacgataacaaactgcgtgatacgcgccgaccgcgactacgggatgcggatcggcgtcggagccggaatcatccggaacgtggcgatatcgaacatggatatcgaagccctgaactgcggcggaattggcatgatgggctgctggagccccgcatcgaagtacgcgacaacggtcgaaaacattctcttctcgaacctgaacatccgcgcgaagaatccgcttgagatatatgtctcctgctttgacgactcgccgcttccaaacccgtgtaatatcaaaaacctcggcttcagcagcctgacgctcttcccgaccgagcgctgcgtcctccgcggaagaccggacaacaagctcaccggcgtgacgatcgaaaacgtcctcgtgaccccgccggaaaaccacgacggcaacctcttcgcgctccgcaactgcggggatctcgcgataaacggtctgagggtcgccggcaaaaagcgctctgacgcgtggaagtgcgtcttcaccgacaaatgcgatgacataaccatcaacggaaacgaaatttcataaaaggagttaaaacaatgacgaacgtaaacgattacagagggctcaccgacagtgagatcatagagaacgccctcgccgctcttgacaccgaccgcacgctgctcatcccgccgcgcgcgcaggaaaacgagcctgaacgcgactggtggctgatcgaccgggcgatactgctcgactcagacacgaccgtggttatgcggaactcgaaaatcaagctctcggattccgcgcgcgacaacttcttccgcagcgcgaactgcggcttcgggttcgacgacaacgagctcttcacgaacatacacatccgcggagagggtctctgtgtcctcgagggcgcggatcatccccgcgctaccggcgacggcacgaaggttctcgcgaacccctgcccgaaaaccgtggaagacctgaagaaatacgccgactggataccggaagagacaagaaagaccggaaatgactggaacttctggtacgagcacagccactctctcggcaccgacgccggaaaggaaggcgagagccagtacggtgactggcgcggggtcgggatactcttcgctatggtcgaccgcttctcgatcgaggggctgaggatagtcgactcgcacggctggggaatctcctgcgaggcttgtacaaacggcaggattgaaaagatcgactttgacgcgacgatggcgagaatgatcgacggtatgctccagaactcggagaaccaggacggaatcgacctcaggaacggctgtcatgacatcgtcatttccgatataaccgggcgcaccggagacgacattgtggctctgaccgcgattgcccgcggcgatgagatccatccgggcggagcactccgcacgactcacgtcatgcacaacgactggtcgagacgtgaccgcgacatacatgacgtcatcatccgcaatgtcctcgggtattccggcggagggatatgcttccatgtccgtctgctcccggtcgagtcgaagatctacaacatagtgatcgacggcgtcgtcgattcgtctccggaaggcttcacggacggcggcgcgatacttctcggcgagggagacggcggatacggcgtcaacctgagcgacggcatgaagaacatcacgatctcgaacgtcatctcgaaaagccggaactgcataatcgtcgccggatatctgaaggactccgtgataacgaacgtcgtcaacaggaatcccgactgtccgccgttccgtatacaccgtgaaaacggtatggtcaatgtgctgacgagcaatatattcagcgcgggaaaggaggattgacgcaagacttaaatcgtcccagtcgcaaagatccgaagtgtcgaaaaaaatttaatattgaaaggaatcccaagaaccatgaaatcagcaaaaacaatcgctatcctcctcgcgcttcttctatctgcaaacgtcatatcctgcggttaccagacatctgccagtaagaccgacacagacagcgacttgactaccgaacccgaatccaccaccgaacctgtcgacccggcgagtgttctcgaacttcccgattccgacttcgaagggcgtgagttccgcgtgctcggactgttcaactcaatgtacccacagttcgataatttcgagatcttctccgagggcgagaccggagatattgtgaacgacgcggtcttcaaacgcaataccgtcattgaggacagatatagtgtgaagatcacgcaaaccctcgtcacgtcgcctgccggggagatacgcaagaatgtcactgccggcgacgatctgtatgatctcgtatttgacacactgtccgaaatgggctcgctcgcacagaacaagtatttcgtcgatctgaacggcgtgaagcacatcgacttttccaagaactggtggaacccggaggttaatgacaccatctcggtaatgggacgtctgtatatgacatcgagcgacttttcactgagagacaaatcctcgacatggatactggtttataataagaaactcgcggaagactactcaataccgaatctcgcagacgccgtccgcgacggaagctggactgtggacaagatggctggatacgtcaaggaaacagcggcagatctcgacggcgacggcgaaatgaagccggcatccgacagatgggggctcgtcatgggcgcgcgatcctcgtttcctacattcgtcgtcgcctgtgagaacagattcatcaccaaggataaggacgattcacttgttctgtcgatgaacaccgaaagaatctcgaactcgatagacaaagtgctcgggcttacctccgatctcgcaaacgctttcttctgtgaggactggcaaggcaagattgacggcgatttctggtcggctgcatcaaaaacattctatgccggtaacgccctgtttgcgacgtctgtcccttacggtctgaagagttattcggcgaactgcgactttgattacggtatcctgccgttcccgaaatacgatgaaacacaaggtaagtattacacgctccctgacactaccgctcatcttttcggcattccggtctcctgcgctgacccggacttcacaggtttcatgcttgaggcgctctcggcagggtctactgacaccaccctcgaagcgtatatcgagacctcctgcaagaccaaatactcctatgacaaggacagcgcggaaatgttcgatacagcaatggacggaataatttttgagccaagcatgatctacggtatcggcgggctctatgaaatactcaggaataaaatcacggtcgcacgaaaaaataccttcgcgtccgcttacgcctccgtcgagaaatcggcaaaaaccgctttagagaaactgacagaaagcttcagtgaagcagaataaataaatttgaaaggaatctcataaaccatgaaattatcgagtacagtctctcttctcctagcacttcttctctccgcgaatatcgtatcctgcggcaccggtacacagcatggcgcgaacacgagcggttctgacgacgtgacgaccgaacccgaatccaccaccgaacctgtcgacccggcaagcgttctcgaacttaccgattccgacttcaaagggcgtgagttccgcgtgctcggaaatgaaggcgcctatccgcagtggaacaactttgagatatacgccgaatcagagaacggagacgtcgtaaacgacgccgtgttcagacgcaaccgcaccgtcgaggacagatacaacgtgaaagtcacgcagatcatccagaattccggcgaaaaccaggacgcctgcctcgttccgcacatccgccagacagtcatggcgggagacgatctgtacgacctcgccttcaccaccataagcggcataggagctctcgcgcgtgaaggtcttgtatatgacctgaacggcgtcaggaacatcgacttctcgaagaactggtggaaccaggacgtcaatgacaccctctcgatcgacggaaagctcttcttcacctcgagcgacttctctctccgcgacaaaagccgggcttacatacttgtctacaacaaggaaatgataaagcagaacaacctcgacgacccggtctccctcgtccgtgaaaacaagtggacgatcgacaagttcagtgaaatgataacgcaggtcgcggtcgacctgaacggcgacggcaaagtcgacgacaaagaccagttcggcgtcggaaccgactcttataacgcgttcgcgacattcatctacggctgcggcgtgaccgcggtcggcaaggacgaaaacgacgtcccgatactgacgctcaacagtgaccgcaccgtcagcgcgatagacaaggtccgctccttcttcactctcaagaacgtgacagtcatccccgaccagtggcagggcaaggtcgactacgactactggtcggtctcgtcaaagggcttcaaggagggacgcacactgttcaccacatccttccctcactcgctcaagggatactcgtccgactgtgtgaacgactacggcatcatcccgtacccgaagttcgatgagtctcaggaaaagcactacacatacgccgaccgctacagtatgcttttctgcataccggcgtcctgtgccgaccctgatttcgccggattcatgctcgaggcgctgtccgccgaggctaccgacacttcactcaaagcctactatgagatatcctgcaaaacaaagtacacctatgacgccgacagcgcggaaatgctcgacctgaccttcgacggcatacagtacgacctcacacgaatctacagcatcagcggcgtgaacgacattctctacaagctcgcgtcaaagaaagacaacaccttctcctcagactacgctaagatcgaatcaaaggcacaggctgacatcgaaaagctcatcgaagacctcaacggttgataatctgccccacccggcgtctatgacgccgggtatatgtgtatccggaatttcattttttgtatatcagtgatatttttgcttgacatttcatgcctattatgatataataagtttataaattaaaattgaattaataacagtcgcctcattttcacgttcaaggttcatatattgctcatcaaatatattttgtcccgaagacaagaaaggaacacaccatgaaaacaaggatcctcgcgtcagcacttttcctcgcgcttcttctctcatcctgttccggcgccggaaacgctccggcggtcacctcagacgaccagacaactcccccggagaccgaaacggagacaaccgcgctcagcgacaacgtcccggatctcgacttcggcggagctgagttccgcacgatcgaacagtcctcgacaaaatacagcttctattccgaggaggcgaccggcgatattataagcgataccatctatgagcgcaacagcaagatcgaggagcggttcaacgtgaccttcgcgccgaccataagcgaatggtacaccgatatctcaagtcacgttaagcagtcggtcatggctggagcggacgactatgatctcgttttcggtcagatattcgacacctccacgctcgcgatgaacggtatgtgccttaactggaacattctccctcacatggatctgacaaagccgtggtacacggcgaatatccagaaggcgtcgatcggtgacaagctcttcatgatcgagagcgacctgtcgacgagctacaccgaccagacgtggatgatagtctataaccagacgaaggcggagcagtaccagaatttcccggatctctacgctcttgtccgcgagggtaagtggacgattgacaggatgagtgagctgattgccgacaaatatcaggatctgaacggcgactcggagcgcaacgagggcgatttcttcgggatgatagcgaaccaggacggctgtcagctcgcggcgttcgtctatggctccgacgtccgtctcgcggctatagaggacgatatgaccgtatcgaacccgatcggtgaggagaagtcaatcaacgccataatgaagctgcatgatctcttcaacgtcaaccccggctcggtcagcaagatgaccgacaagaaaataaagactgagttcacgaccgcgaagaagttcttcgtcgacggctcggtgctgttcgtgccggttcaggtcagtactctgatgagcgaggagttccgcagctttgaggatcactacggcgtcctcccgataccgaaatatgacgaggcgcagaaggattatcacactgtcgtcgacggcggtgcgaacatcatggtcgtcccggcgagcgcgccgaccgactcctatgagctgatcggagccatcaccgaatcgctcagcgcggcttcctatctcgatctgacgcctgtatactgcggaatcgcgctcgagcagaagggcactcgtgacgacgattctatcgaaatcctcaggatgatcctcgattcccgcgtgatcgacttcgcgtacctctacgacggcttcaagggctgggtcatgaagctgccggatatgatctcgtcctcatcaagcatagcgtcgaagatcgagtcgcagaagaatgctgtcaccgagtattacacagggcttgtcaacttctgtcttgaaaatgaatgatcatctgatcaaaaaaacgaaatgaccgtcgcgagacggtcattctttgtttattttcacaggctggcgtgcgacgcggctttccgatatcccgccggagtcattcctgtcacattccggaacatttccctgaaatacatcggcgtattgaatccgcaccgtccggctatgtcatctatggtgtcgtccgtatcgcgcagcagctccagcgctttgtctattctcagatcattgcggtatctgatcggcgacacagccagctctccgcggaagagatgatgcagcctggatatgctcacatgacagtacgaagccagctccgcgacatcgaaatccatgtcaaagttcttctcaatatatcctatcgcgctgacgagcaccgggttcatcggctcattcgtgttttttctgatatacgggagcgtgtcggcgtaaaaatcaaagaagccgctgatcgctctcgcttttgatatctcatcgtccgacacggcaagcgtgtatatgcgccttatccttgacagcgtttccatatctgaaaacatcccgagatatgtcatctcataccgcagcgctgagtccgcgtccggctttccaggcgacatatccattccgtagaactctatcccgtgctctcccgtccagacagacttgtgacgcaccccgtgaggtatgaagaaaagcgaaccctccccgaggcgcagaactgtcttcccggacgtgatctcgacctttccgttcacgataaatccgaacgtggacgtgagtcttcctgcgccggaatcatagaagtgctcgcattcaaagcacttgtggtgaaacgccagtgacgccgcgtgtattttcatcgagacatattcgttatacgacactctgttctctttccgccccaaaaggacatttttgttattatttatggcattataacatatttacatccttttgtcaatatgctataattaatttaacaacaaatcagctgattcagaataaaaagccccattgtcctgatgacaatgacgcgaaaggaaaaaggtgtacaatatgcgaaaacaatccgtatccatgctcctcgccctcttcactgttctttcatccgcctcatgcggaaacgcgtccgagacagacgatatcaaggacagcacggaaatgtcagacagcacaaccgctgaggaaggcggaaaatatattgatgatctcccggaagatcttgatttcggcgggggaaccgtgactttcctgtaccgcgaggaaaaagctgacgaattctattcagacgcgtcagacggcgaggtcgtgaatgacgcgctatacgacagcatacgctcggtggaggaacgtctgaatgtaagcgtcgaggcgatcctccggcccggacactacaccgacgtcagacaagggtacatggatcacataaaaagctcggttctcgcggggggcgacacatatgatttcgtggatctcatgacgggcaactcaccggtcatgatgcaggacggcattttcgcggatctcaccgaaaacagatatatagacctgtcaaagccgtactacatgggcggactcgtcgataaatgcgcgatagacggaaagctgttcttcacgtcgggcgacgcttcgctcggttacctgaagtgcgcgttctgtatgtacttcaatcagaggataggcgaggaacacgatatcggggatttatacgctctcgttgattccggaaagtggactcttgacaagctcatcgaaataacagccgtggcgtcccgggatataaatggcgacggaaagttcgacgaaaacgacaggctcggattcgttgtgcatgacaacaatcatccctggggacttcttggttccaccggttcggtaatgtattcaaagagcgccggtgatgaatggacattcacctacggctcagagcgcgacgcggatgtctgctcaaagatatacaagctgttcttcgcgacgcagggcgggtggttcccggatataacgaacggtcatcccgcgcatctcgagcaatataacggcatcacctcgaaattcgtctccggcgaaatattcatcatgacagcggaagtcgacgactcggtgaaccagctccgggacatgaaggacgattacggaattctgccgtatccgaagtatgacgagacgcaggaggattatatatccctctcgagaagcacgcacaacgctttctcgatgcccgtgacctgttccgacaaggacatggcgggagccgtgcttgaggcgctttcatcgtcaaatcacgaaaaggttctccccgcctactatgagaccgcgctcaagaagaaatactcccgcgatgacgattcggcgcggatgtatgatctgataacctcaggcctgagtgtggatttcggttatgtatacaataacgcgataggttcccctgtcacggtgttcggaaacagctacagaaaagagaactccttcgcgtcaaacctcgcgaaggcacagaacggccttgagacctcactcggaaaatatctggaaaagctcagaagcagtttctgacatatttccggattcacaccggataaagtccgtctctgtggtcaatctatgacaaaaacgccgtcccgccgcggcgttttcttattgcgtgacgctcccgcggtactccgccggggtcattccggtgatctccctgaatatctctctgaaataggcgggtgagttgtagccgcatcttccggctatctcatcgattgtgcggttggttcgacgcagctcctcggcggctctctccactctcatctcgttgcggaacctgaccggcgttgtcgcgagctcgtcgcggaacaggtgatacagtctcgacgcgctcacgtggcagtgcgccgccatatcgtccacgctgaagtcctccgcgaggttctgctcggtgaacgctatagcctcgtcgagagtgggctttctgcgcgccggaggctccggagagagatacgggatgatgtccgcgtaaagaagataatacagtccgaccccgcgcaccttgtccgtgcgttctccgcttctgaacagctcatatatctcccgcacccgcttcccggtctccggagtcgacagctcctttatatgcgtcatcgcgtagcgctgcgcgttcgtcttgtccgggcgattcgacacaacgtgcagatcgaagtaacagatatccggctcgccgtgccagagcgacgtgtagcgtataccgtccggcatatagtacaggctgttctttccgagagtgaccttcttcccgccgatgctcatcgtgacgctgccgctctcaatgaaagctatgctcgggtctatctttcccgagctgatattgcagaaatgctcgctctggtgatgtgagtaatagacgataagctcagacatacagagccttttccggaattcctctaccattttattttctcctttcgagtcaaaacagcagaatagttatgcttattgacattataccatatttacgaaaagctgtcaatatggtataataaatatagcgaagataaaaagttcattccggaacagaacataatacacaattataacgcagatcaggagaaatgaaaatgaaaaagagactcatatccactgcccttttcttagcgctgctcttatcggctgtatcctgtggcggcacaaccgcgccgacggacggcacttccggagagaccgaaacttccgcgccggaggacacctccccgaaatacgcggatgatcttccgtcggacctcagatttgacggaaagaccgttaccttcctctaccgcgaggaggtatcgaacgagttcttcgccgatcaggctgacggagacgtcgtgaatgacgcgatttttgacagcttccgcaatgtcgaggagcgcctcggcgtagacataaacgtcgtgaagcgccccggtcactacaccgacgtgcgtcaggaatacatgaaccacatcacaagcacgattctcgcgggagacagcgagtacgacttcgtcgacctgatgataggcaactcgcccatcctcatgcagcagggcatcttccacgacctcgcgcagaacaagtatatcgaccttgacaagccgtattatctcggcggactgatggatcagggcgcgatcgacgggaagctgttcttcgtgtccggagacgcttcgctcggttatatgaagtgcgcgttcgctatgtacttcaaccagaggctcgtcgaggacttcggcatcgagaacccgtatgatattgtcgacgccggaaaatggacgctcgacaaggtcgccgagatagcgtcagcggcgtcacaggacatcgacggaaacagcaagtacgatatcgaggataagctcggttttgtcgtccatgactggaatcacccgaagggcttctgggcgtcgaccgaatcggtcatgtattcaagagactcgtccggcgagtggaagttcacgtacggctctgagcatgacatagacgtcgtcaataagctctacaacctgatgtacgcgaatgagggaagctggttcccgggtatcaccaacgccgtcccggagtatcaggagctctacggaaagatctccgcgaagttcgcgtccggcgaaatattcatcatgaccgccgagatcgacgactcggtcagccagttgagggacatgaaggacgattacggcattcttccttacccgaaggcggacgagaaccagaaggaatacgtctcctccgcgcgcaacacgcacaacgcgttctctatgccgataacctgcaaggatccggagatggcgggcgcggtgctcgaggcgttgtcatcgtcgaaccatgacaccgtgcttcccgcgtacttcgagacggcgctcaagaaaaagtacgcgcgcgacgacgactcggcgcgtatgtacgacataatccgcgacagcatgaagctcgatttcggatacatcttcggtaacgcgataggcggtccggaaggcgtcttcctcgacagctacaagaaagagaactcgctcgcgtcgaacgtcgcgaagaaccagaagagacttgatcaggctctcgcaaaatacctcgaaaacctgagatccacatttactgaataatcatcgccctgacggatgttatataactatattatccgtcagggatactgtgttttccgatatccgcgtcctatgaagggcgatgatatatattctatttcccaagagaggaacaaaatccatgaaagcaatacttgtaaaccccgacaaatcactcgtctggagcgacgttccggatccggtcgtcggagacgaggacgttctcgtcgagatacactgcgcggcgctcaaccgcgccgacctcatgcagcgcgagggagattatccgccccctcccggctgcccggagtggatgggactcgaaatatccggcgtcatcgtgaagatgggtaaaatcgccgaggaaaagtcaccgtacaggctcggagaccaggtctgcgcgcttctcggcggcggcggatacgctgagtacgcgaatgtcaagtacgatatgctgatgcccgttccgaagaaccgcacgctcatcgaggcggcggcgatgccggaggcttacgcgaccgcttacctgaatctcttcatcgagggcaaggcgaaggcgggcgacacactgctcatgaacgcgggcgcttcgggtctcgcgtctgtcgtcatcccgatggcgaaggctttcgggctcagggtcatcacgaccgtccgctccgccgagttcgttgagagtgtcagaaagaccggcgcggatatcgtagtcgacacgagcgctgaggacattcacgaggttctgaaggcacagctcgacgccggaacgcccgtcgacatcgcgatagactgcctcggcggcgactatatgggcggctgcctccagtatctgtcgcacggcgcgcgctggatcatgatcgcggctctcgccggacgcttcaccgagatcgacctcaagaacatctatgtccgcaacgtccgcataatcggctcgacccttcgttcgagaactcccgctttcaaggcggagctgctcgcgtctctcgtgaagaacgtctggccgaaggtcgaggaaggactgctgaagccgtcgatttacaaggttctcccgatacagcgggctgaggaagctcacgccatcttagagcgcggcgagaacgtcggcaaggtcgtgctcaccgtcaaagactgaaaggaatacagcaatgtcaaagaaaaaagttctcgtccccggcggcaccggcgcgatgggcgtgtatctgatacccgaacttctgcacctcggctacgcggtcgacgtcgtgtcgcttgacgacataaagtcagacaacccggatcttcgttacttcaaggcgaacttcaaggatcccgccatccgctcggagtttctgaaaaacgattacgacgcgatagtcgatttcatgatctacggaaccgaggagttccgcgcggcgcaccgtgagcttctcacgaactgcggacactacatctatctctcgtcataccgcgtctactccggcgacgagataccggtcagggagacctccccgcggcttctcgattcccacagtgtctcgcacgacatacagtacctcgcgagcgaggactattcgctctacaaggcgcgcggcgagaatatcctccgtgagtccggatgcgcgaactggacggcgatacgcccggcgataaccttctcgaagcgtcgtttccagctgaccatcctcgaggcgccggaagtcatctaccgcgcgaaagcagggaagactgtccttctgccggaggacgcgatgagcgttcaggcgacgatgagctgggcgggcgacgtcgcgaagatgatctcgaggctcgtcatgaacccgtacgcgacgcgcgaggtctattcggtctgcaccgcggagcacaacccgtggagaactgtcgctgaatactataaggagctcatagggttaaaatacgtcacggtcagcaacgaggacttcatctcctgcatgaacgagggcaatactgtctgggcgcgctggcagctcgattacgaccggatgctcgaccgtgtgatggacaactcgaagatactctcggtcaccggcatgaagcagtcggagctgacgaccgtctatgacggattgaagcgcgagctcgccgccctgccggacgacgcgttcagagcagacacatctgtcagaaaccgtctcatggacgcgtatatcgaaaagcataatatcggctgaaaaagaaccttttgcgggatcgcgcttgcggttccgctttttttcgcggaaaagcgcgcccggagattgacaaaaagccgttttccgtgtataatattcttataaagactaatgcgggaatacccgcgcgaaaggaaaaagcggccatgtatataggaggtctcgacgtcggctccggcggatgcaagctgacgatctcggatgaaagaggaaattttgtcggaacaagatacataccatatgaagcgaaacacactgaccggacacacacgattgacgcttcactgatactctcatcggtcggcagtctgctgtccgaccccggggtgaggcttgacgcgctcggcgtcacctcctttggcgagtcgttcgtgctgcttgacgagaatgacgccatactgaacgagccgatgctctacaacgacccgcgcgggagcgaggaatgcgtgaccttcgaccgcgaaaaggtcgagaacacctgctgcatgaccccgaccgcgatctataccctgccgaagctgatgtggacgaggatacaccgccccgacctcatgcgcagggcgaagaagataatgctgatgaccgatttcgtcatctataccctgaccggagagcgagtgataaactactccgccgccgcaagaacgatggggttcgatatcagaaagaaacgctggagcgaggacatcttcgcgcacgcgggaatcgacacggcgctgatgccgacccctgttccggacgggacgatcgtcgggacatcaagcaaattcgggctttccggcacgaagataatcaccgcgatgcacgaccagaacgccgcctcggtcggagccggagcgctcactcccggggacgccgtagacggaagcggaagcgtcgagtgtctgaccccgatagtctcgtctctcccggacgacaacggcgtataccgcgccggggcgaccttccagacgtacgaggagggtatgtactccggatgcgcgatgtcctacacgggcggagcggcggtgcgctggtaccgcgacagtttcggcggcggcgacagctatcgtgagctcgacggcgggatatgctccgtaaaggataacagaaatatcgactacgtgccgggcgggattctcatgatgccgcacctcgcgggagccgcctcgccatatatggatccgggctcgagagcgcttatatacagcatgacgcttggctcgacaaaatacgacctctacaaagcggtcctcgagggagtagcatatgagatccgcgtcaatctcggacttctgaaaaaggcggacatccgcccgaaacgacttctcgcgaccggaggcggcgcgaagagccgcgtctggaatcagatcaaggctgacataaccggtctgccgataaccacaagcgctcttgacgaggtgggcgccgccggcgtgataatgtcctgcgcccgcgcgctcggggtctacggctcgctgaaggacgccgcgccgtatttcgtgaaggaggctgacacctacctgccggacgactcgagaaggcggatttatgacgagcttttcgggaaatatgaacggatgtatgacctgtcgcttcagctgagatgattcaggtatccgctgaaatcgacacgtctgaagccttccggcgccgcgctgtctgataacgcggaaatttttcggattttttctcatttccacccaatgaaaccccgccatcccgcactttacaggcgaaaggatgttgatgacaatggacaagatgatcctcgccgattacgtcgaccgcgtctacggctggtcggtcagacacacgttctcctgcgacgaggcggatgagctctcccaggagattctgctcaccgcgctgagaaagctccccggactccgcgacgacagccgctttgagccatggctctggtcgatagcaaaaaataccgagcgcgctttcagacgctcgcgcgggaaggcacggtctctcatctcgatcgatctcatccccgagattcccgacgcgccggacgaatcagccgaagccgaggagacagaatcgcggctcaggctaagcgtctcgcgtctttcggcgatataccgcgagatcatcatactccattattacgacggactttcgacgaaaaacatctccgaacgtctcggaatccccgagggcacggtcacctggcggctatccgaggcgcgtcggaaactgaaaaaggagtgcgggaatatggaagaaactgctttgcgtccggtaaagatgcggattgatatctacgggagcggaaattttcagatcggggctgtcacgccggaggaactcatttccgacgccctcagccagaacattctctggcaggcatacgagcggccgctcagcgtggaggagctctcatcgaggtgcggggttccggcgttctacatcgaggacagcctttcgaacctgaaaaagcgcggcgcggtcatcgagccgtcccgcggaagattcctgaccgatttcgccatcatgtcggataagcacgggctatggctcgaggaaaacgccccgaaagcggtcgaaccgctctcggatgagattttcgcggcgctgacgcgtctgagcgcggacatgaaatctgtcggattctaccgcgccggaaagagtgagtccgagcttacctatctgtacggcgcgatggcgttcaattacctcagcgcgaaatactgtaagctgccgtatccggagattcccgacagctacgacggcaacaactggcgctacataggtcacacggagaaggagcatccggtgcggtcgctcggctgtcagaacaactcgaacaacggcagccgagggcatttctcgggaagtcagtacaactttgccggattcgggtggcggcggatgataaccgacctcgagcttaatgtctgcgaggatctgctgagcggctcgaccgaggacaaggcgaacttcgcctcatgtgtgcgcgacggctttgtctcggacgacggtcagaagaggtcgctgatcccggcgttcagacgcgtggaatacgaaaagttctgcacatttgtggaaaaagaattcgccggcattgttccggcgtgggactctgtgatagtcaagctcgcggcgggctacacgaagctgtttccgaagcatctcgccgacgacgcggcgcgtttatcgcgctatttctggttttcgatgttcgcggaggtctgccgggagtggcaggagagcgggcggattgaaagaccggctgcggggtgcttctgcgacgtgatgatcgagcgggctgaaaggta

SEQ ID NO: 2042 - DNA, 5919 bp, Unknown
  16S sequences of unknown bacteria
atatgaaagatatcgcgatgcttctggcaatcaatcatatgacaggttcccattctgaggcctgtgcatctcagatgaacgccactgatctgtccgcattaaaggacagttatatgaaagaatacgaatcctatcaatgcaaaaatttaaaattggatatgtcccgcggaaagccgggaccggatcagctgattttgtcagctcccatgctggatgtgctgagcagccagagtgctttgtctgctttggatggtaccgactgccgcaactatggatgcctggacggtattccggaggcaaaagagctgatgggcagccttttggggctgccggccgaaagcatgatcgtcggcggcaactccagcttgaatatgatgtacgacaccattgcccgggcaatgctccacggtgtttacggatcgccttctccgtggtgccgtttggaaaaggtgaaatttctttgtcctgttcccggctacgaccgccattttgccatctgtcagcatttcggcatcgagatgatctgcgttcccatgaaccaggatggtccggacatggatttggtagaaaaactggtcagtgaagatgacagcatcaaaggaatctggtgcgtaccgaaattctccaaccccaacggattgacctattcggacgaagtagtacgtcgttttgccaaccttgcgcccaaggcaccggactttcgcattttctgggatgacgcttattttgtccacgagctgaccgatgagaaagtaaagctgctgaacctgtttgaagaagcaaagaaaactggaaaagaagacatggtctttgttttctgttccacttcaaaaatcagctatcccggttccgggctggctgctatgggtgcctcgtttcacaatattcagaacattaaaatgcagatggcggtacaaaccatcggcaatgataaaatgaatcagctgcggcatgtgcgctttttcggcaacaaacaaggcgttttggaacatatgaaaaaacacgccgagttaatccgtccaaaatttcagctggtggaacggattctggaagaggaactgggattctgcgggatcgcccgctggaccaatcccaaaggtggatactttatctcgctggatacgcagcccggatgtgccaaacgggtcatttctctctgccggcaagccggcgttgccatgactccggcgggttccacctatccttacggaatggattcggaggattccaacatccgaattgcgccaacctatcccacactggaagaactggagcctgcaacgaaaattctctgtctgtgcatcaaaatcgcgactatcgaaaagatgattgcccaagcgtccgaacaggaaacagcaccccaaaatgcttatgcgattgcacagtagcagcataataaaaccgaaaaaggaggaagcatgtgtcttcctcctttttttctgattccttcgccggaaagagtgtcaatcaatatatacgcttggaaacggctgtgaatcttcctgttttgtgggaattgctggagttccctcctgatctgccgattgctccatctcatcccgttttccggtttcccgctgctgctgtttcaaataatccagaaaatccggttttgcaatccgctctacgggaatgtcagtcagcatgacggtatgcttctcttcgtctgtgtcatacaggtcaatccgggcaaaatcgtgccctttttctttgaaaaacgcgccaaccctttgcaggtattctgcggcggcctccaacgtcatcgcctccaggtctggataaagatgaatggtcttttccaccggcaaatcctggtcaaacgtcattcccggcacccaaaccgcactatcgcttggttcattggttccgacaaataaattaagcctgcccaggcccgcctgctccatctgaatctgcaaaagcgccatgtattcctcctggaatcgggaaatgacatttccattttccagtacatcatactgataggtatcgtaatctacctttccattgcggcagataatatcaaaatgcagatccggattatgcggggataccgcgtggaccagatactccccgaatttaaagttataggaagcacggctcaattcaaaccccatggtgcgcagattgctctgctggatataatccttggcggcccgttgggacatcgcggcggaaatcggatcccccgtgaaagaaagggtcatcgaagcgacaatccataacaaaccaaaagccagaacagcagccaaaatccggatccaaagttttttctttttcatttctgcccctccttcgcaaaagcgtaatccagcaaaaaaccgattcccaggcccagtccgcaaaacaacgtatacaacaccgacataaacaaaggggccacaaagcccgttccggggatctggtacagatagctcagcagaaaaatgcccaacggaacaaaaaaagattttcctcgaaaaagccaatatcccagcatacctacgcccggcatcagaataaaattataaaacatgcccatagagtcagtcagcgccacaccaaccgcagcgccgatcaaaagcagcgccattcccacaaagaaaaaagctttgcgcactgacgcaaccagccggcgatccaacgtttcatccggcatttttaccggctccgaaatacaaaaggtccggcatgcttcgcactcctccaaatgctcctgcaccatccggcaggacgcttcgcttgctacgccgtcctgcaccaatggcagaaggtcccggatcacttcacaattctctttcattggtctccccctttctccaactgctgtttcagccaagtgcgaatccggtgctccagcactcgtgcggaactttcgctgatcccggccttttgagcaatttgtgcataactataaccagaaacacgcatggaaaaaaccaaattggctctctcgtccttctggcgcatcaattttttgatgcggtgcagcgtttcccggttcgcggcagtttcctccagcgtctgccgggtataggtttccagcaaatcgtcgtattccaccgtttcccggtgttttctcaattccttcagccacaggttccgcccaatggcaaacagccaggttctgacactgctctgctgccggaaccgcccaatgcttaacatcgcctgcaaaaaagtttcctgcatcaggtcgcccgcctgctccggatgatgagtcaggcccaaaaggtaacgatacagttcttctttatgcaggtaataaagcttttcaaaatctttcaactgtccgcccctttcctgtctattagttccctgacatagaaaaacgttacacttttcttgctgaaaaaataaaaggcccctgaccgaaataagatggccagaggcaaacactgtcctatttttcttttaaaagggttttcagctcattcataaacgtattgatatcggcaaactgccggtacactgaggcaaaacgcacgtatgctacctcgtctacctgtttgagcttttccatcgccatttcaccaatccgataagaagtgacctcccgatccagtgaattgagaatatccgcctcaatttcatctaccatccgatcgatttcttccaaagaaaccgggcgtttttcacaggcgcgcaacaacccgttaaccagcttattccgatcaaagctttcgcgggacatatcttttttgatgacaacaatcggcattgtttccaccgactcataggtggtgaaacgtctggcgcactgaaggcattctcgccgccgacggatccgttcgtctactgcccgggagtcaattaccttgctgtcatgatagccacagaacggacatttcattatgattcctccatccaaagagcggaaattctttgtttccggaaacagtataccagcatggtggcgaaaaaacaagaaaaaacctgattttttctgatgattgtaattctttttggaaacccttataataaataacaatgtcgccctttggaaggaaaaatttcaactcacaaatacagacatatttttatcggcaaaggagtttatcattatgagcaaagttacctggaaacccggcactctgcttgcccctgttccagcggtcatggtatcctgcggaaccatggaaaagcctaatattattaccattgcctggacgggcattgtcaattctgatccggccatgacctatatatcggtacgcagggaacgcttttcccacgcattaatttcaaaaagcggcgagtttgtcatcaacctgacaacttccgctctgtcccgcgctaccgatctgtgcggcgtaaagtccggccgcgacacggacaaattcgcgctggccaatctgacgccggaaccagcctcaaagctatcctgccctatgatcgtccaaagtcctctgtcgctggagtgcaaagtgacccaagtacttcctttaggctcccacgatatgtttttagctaaaatcatagccgttaatgtagaggaatccctgttggatgagaagggaaaactgcacctttcccggtgcgggctgttgtcttacgcccacggcgaatactttgcacaagggcggcggctgggtggtttcggctattcggttcgcaaaaaggttcccgccggaaaacggcagccgccaaaaaaataaaccaaagctgctcttttctgttttgccgctatgcaaaagcttttctcatcgagcgggtatgcgttttcgacgagctgctccgcttaaatttttgggaggtattgtttcatgaaacgaatcttcgccatttttttggcaatgttgctgatttgcaccggctgcacggcgcaaaccccttccgatctatcctcactggcggaatcctctgccgtttcttcccatgctgaaacattagaccagctgccggcaaaccgcaccgaaatccccttcaatcaaatgaagtatatggagcctgatctggatgcgacgattgcccaatatgaagatttcgcccggcgggttcagaaagcggaatccgccgacgaggtgatgtcggtttggaaagaagaagcgcagctttgcaaagactattataacatgtatacactctccaacgttttgttcagtctggatacctccgatgaggaaaacgccgcaaattatcaatatatgcaggattttcttgccaaactcaagcctgcctccgtttctcttacccgcgccatccttcagtcaccgtaccgcagccagatcagcgacattgtcggctctcatgtgctagctgccatggagattgatacccaaaactactccgaggaacagctggaactggaattggaagaaaatcaactaactacccagtatacccagctgttatctcaggctgcggtttacgaaacagaagaacatgtctttaccaccagtgatatgtattactacatttacgccggcggagaggaggaccggcatcttgccagcggattgttggaggaatattaccgggatctgaaccagcaatgcggtgaaatctatacacagctggtggcattgcgcacaaaaaaagcccaagctgccggatttgaaaattatctggattattatttcaatcgctcctaccgcggatacggccgggatgagattgaaaattttcgctcctgggtaaaaaaatatattgttcccgtttaccagcagctaaaggatgatgcggccgcaaggctgggccatccgctgaatttgtttgaatacacctctcctctgccggaacaagcccgtgtaacctatctggagagcatcaccagcgccagcaaactggtcgaaatcgtagtgggtattctgcaggatatttcccccgaaacacgcgaaatgattgattatatgacccgaaacaacttgtatgatctgacaagcgccccaaacaaaagccccggtgccttcaccacctatttttacggttggcaggaac

SEQ ID NO: 2043 - DNA, 18160 bp, Unknown
  16S sequences of unknown bacteria
actttccaaagggaatggatttgagaaaagctacggaaagggaactaaaatttgcattgaatgagatcaactctcgcccccgaaagacactaaattggaaaagtccaagcgattatcttcacgaactaaagtgcgccgccccctagggggcaataagtaaataaatcaacaacttaaactttaatatttacaaaaaaccaacaatatctgaaaacatctactgccagttatgcactggcgttttgaaaaaaggacttgattgccgtttaaacggttaagtatcgtaacaaaaataccatgaaaaaaataataatcaaaatgtttttggccgcggccgcggcggttttgttcggatgcgcctcggcggaaaaggcgcccgccccctttacggcggcgactttcaacataaaaaattcgccggaaccggaggtcaacgcatgggatttgcggcgcgactccgtggcaaagttaatcaaaaagcacggattcgacatattcggcacgcaggaaggccactttcaccagctcgacgacataagcgcgcgcacgggcttcaaatacgtcggcaaagggcgcgaagacggggcgaaaggcggggagacttccgccgtattctacaatcccgcgcgcttcgagctgctcgactcgggcgacttctggtttgcgccgacgcccgacaagcctgttatgggctgggacgccgcctgcaggcgcatatgctcgtgggggaagttccgcgacctcaaaacgggcaaaaaattcgcctttttcagcctgcatttcgaccacaaaggcaagagagcgcgcgcggagtccgcaaggctgttagtcaaaaaagtatcggaaatttcggggaacctgccgtttctttgcgtcggggactttaacgcgacgcctgattcagagccgatgaaaatcatattcgccgaaaagtcgttcaaagactcgctttccgttttgcgcggagcgcccaaatccgccggcggaactttccacaatttcacaggcaagccgaaacccgacaggatagactacatatttgtatccgacggagtcgacgtcatggactacgccgttataagggactccgtcgccgatctcggactgcccgcgaaccctaaggcggtctacccgtccgaccacttccccgtggcggtcgacgccgttttaaaatagggcttgtaccccgacctcagggcgcgccaccggaaatgaagggcgcgccttaaaaatttttgtggaaatcggagaggaaaggtgttttactcatttaatttattttagaggcgtatttttcgccaaaacaaaaaggtacaaatatggcaacactcaaatttgcagttctccccggagacggtatcggaccggaagtaatggacgccgcgctcggcgttctacaagcagcgtgccgcaaggacggcgacgagctatcgtataaaatttgcgacgtcggcggcgcggcaatcgactcttgcggaaaggcccttcccgaatccacggtagagcagtgccgcaattccgacgccattcttttcggctcggtcggcggcccgaaatgggaaaacctgccccccaacgaacagcccgaacgcgcggctctcctgcccctcagaaaaatattcaaactcttcgccaatatacgcccagggcttctctacccgcagcttacagacgcctccccgctaaaatcggagcgcatacccgagggcattgacatcgtatgcatacgcgagctgacgggcggcatatacttcggcgaaaaaaagacttttgaaatcgacggcgagcccgccgcatgcgacactatgatgtaccgcaaaagcgaaatagagcgcatcgccgacgtcgcggggaaaaccgcaatggcgcgcggcaaaaaagtgtgctccatcgacaaggcaaacgtcctcgaaacgtccgttctctggcgcaagacggtcaccgaatttttcaagaaaaactaccccgaagttgagctttcctacatgtatgtcgataatgccgccatgcagcttgcccgcaaccccaaccaattcgacgtcttctttacggaaaatatgtttggcgatattctgtcggacgaaatggcggttatatgcgggtcgctgggaatgctttgcagcgcgtctttaggggtgtcgaagaattcgctcggaaacaaattcggcctgtacgaacccgccggcgggactgcacccgatatcgccggaaagaaaatagccaacccctgcgcgcagattctatccgccgccttgatgttgcgctactccttcgggcgcgactccaccgccaagaaaatcgaggcagccgtcagagacgccgtatgctccggcgttcgcacggcagacatagccttcggcaagcaggcggtctccaccgacgagatggctgcggccgtaatcgaaaggctctaatccaagtccgccgcgcggcagggaattttttatcttcctttccccgccgcggcgcgactctcatcccgaggcaacgcaaaacgccgccactcgcgcgccaaacgaaaaaaaaataacaggcaaaaatattacgcaccaaaatatatgacctcaacggaaataagaaaaagctttctggatttcttcaactcgaaagggcacacgatagtcccgtcggcgtcgctgatgccgtcgtcgccaaacctcctgttcacgaacgccggcatgaaccaatttgtgccgtactttctcggagaggaaaaggcccccttccgccgcgcggcggacacccagaagtgcatacgcgccggcggcaagcacaacgacctcgaagacgtcggcttcgacacttaccaccacactttctttgaaatgcttggcaactggtcgttcggcgactactttaagaaagaggcgatagaatgggcgtgggagcttctcactcgcgtgtggggcttcccaaaagaaaggctttacgcgacagtttacgatccccgcgaaggcgagccttcggaattcgacgccgaagcgtaccgcatctgggaaaagatttttaaagacgaaggcatgtcgcctgaaatccatataaagaagtgcggtaaaaaagacaatttctggatgatgggcgagaccggcccgtgcggaccgtgctctgaaatacacatggacctgaccgagaagggagactcggacggagcgctcgtaaacgctggctccccatactgcatcgagatatggaacctcgttttcatgcagttcaacgccgaaacagacggaactttccgcccgctgaaaaataaaaacatcgacaccggcatgggattcgagagggtcgccgggataatcgccaccacaaagaattttaccgacttcacacagcttgcctccaactacaacagcgacctgttcaccgacatttttacccacatatcgcacatgtccggcaagacctacaaaggaaccctgccgaaagatccgcgcgatatgtcgtcgcaggagctgaccgactgcgtatttagagtcctcgccgaccatatcaggacaattacattctccatagccgacggcataattcccggcaacgaagggcgcaactacgttctgaggcggattctgcgccgcgcgataatgtacggtaagaggctcgggcttgaatacggatttttcacaaagctcgccgaccccgtaatccaaaagatgtcgccggttttcccggagcttaaagagcagcgcaaggtgattttaaaagtaatagaaaacgaggaaaagagctttgcgcgcacgctcgacaggggcttgcagcttctcgaccacataacggtcacggaaggcagcatttctggcgaacaggcgttcatactgtacgacacatacggcttcccgctcgacctaacccagctcatcgcgcgcgagcgcaatatgcccgtggacgaaaagggctttgaggttgagatgaacaagcagcgcgagcgcgcccgcaacgcccaaacgcgcgaagtcataagcgtgtccgacgccgcggaagtggagcacgccacgcagtttgccggctacgaccacgccaacctctccgattttgcgacctccataagcgcgatagtcgagggtcccgacgccgattttgtcataatgccccaaaccccgttttacgccgaaaagggcggacaagtcggcgacaccggctttatagaaatcaacggcaccgcccgcgaagttttcgacacgaaaatggacaacgcaggccacatactgcacaaagtccgcaagggagtatttaaaaaggactgcataggctcggaagtatcggtgacggtggacatagtgcgccgccgcgcgattgaaaggcaccactccgcgacccacatactgcactgggcgatgcggcaggtattgggaacgcatgtaaggcaggcgggctcgtacgtcgatcccgacaggctgcgcttcgactttacccactttgaggcgccaacgccagaacaactgcgcgaaatagaaaacctcgccaacaaaaagattcttgaaaacgccccagtaaagtggcgcgaaatgcccttccgcgaaattcccaaaaacgctctcgcattttttggcgaaaaatacggggcggttgtcaggctcgtagagatgggagacttttcaaaggaattgtgcggcggcgcacacgtttcggcgacaggggagatcggactcataaaaatagtgtccgaatctgcgatatcgtccgggacgcgaagaatagaggcagtcgcaggaacggccgcgcttaaaaagatagacgccatgcaggattcgctctcgcacgccgcacgcgaactctcctgcaagcaggaggagattgccgacaggattgaaaagctcatttccgcccgcgacgaaattgaaaaaaggctgagggattttctccgccaaaacgcgggcaacgccgcgcgggagctcgccgcaaagaaaattctcgcaaaaggctccgtgcctgtagtagccgccgtggtcgaagccgaaaacccgcagctaatgcgcgagctcgccgttaaggtagcaaaagaaatcggcggcggaattgtcgccctcggagcaaagttcggggaaaaggcgacagtcatggcgctctgcggaaacgacgctgttgaagccggattcaaagccggcgacatagtccgccaaatagcctcccaaataggaggcaagggcggcggcaaaccggattttgcgcagggcggcggcaagcctgagaatctcgataacgccatcgcggacttcgcaaactcaataaaatagccaaaataatttgcccaccgtaaaatgtacttaaagcggataaagataaacggcttcaagagcttcgcagacgagactacaatttcgctgaccgacggcataacgtgcatagtcggcccaaacggctgcggcaagagcaatatagttgacgccatccgctgggtgcttggcgagcaaagcgcaaaggccctgcgcggcggaaaaatgcaggacgtcatattccagggaacggagacgcgcaagccgctccaattctgcgaagtatccctgctcttttccgactgcgaaaaacagcttggcacaaactttaacgaagttgaaatcacccgcaaagtatcgcgcgacggcggcagcgactattttataaacggcaaggcaggcagattaaaggatattcaaagcctgtttatggacaccggcatagggcgggtatcgtactcgttcatggtacaagggcagatagaccaaatactatcgtcgaatcccggcgagcgccgcgcgatattcgaggaagccgccggtattacaaaatacaagacgcaaaggagggaggctttaaacaagcttgcgctcgtagatcaaaacctcgcgcgcgcaaccgacagaatcgaggaaatttcccggcaaatcggaacccttaaaaggcaggcgtcaaaggccctgcgctacaagcgcctaagccaccgcctgcggcatctggacctcgctttaaacgcgaagagctacgccgagcagagcgcggaacttgcgcgcgacgcggagtcgctcaaagaagtgtcggcgcaaattttttctctaacccagaggctttcggagagcgaagagtcgctttcagcgatgagaagccaaagggcggcaatgctcgcggagctcgaaacaatgcgccaaaacgccgccgagacgcgctcggcgaaggagcaggcgcaaaggagctcggaatttgcgcaagtgcgaaagaaggacctcgaagagaggctttcgcaaatctcgaaggagcttgaaaccctgcgcgagcaactctccgcactcgaaggcaaggcaaagggagatgccgaagtaaagcaaatgcagctcgagctcgtcatggccgacgacgaagtttttaagcaacaggcaggcgagcttacgcaaatagaggaatccattcgcgaggctgaatccgcgctgtcgcgcgccaagcaggacgccctcgtaaacgacggaaccataacccgcctgcgctcaaactgcacgacactcgaattggatttaaaatcctaccaagtgcgccacgcagcattgtctgattcgatttttcaaataaaagaggagtcgcaatcgctagaaaggcgcattctcgagcttgcggaggcgctcgacggagcaaacgaaaggctcggagaggccgacgcggacgttgcggagcagcagtcaaaaatagaggagctgcgcaggcagtacagagacaagcaggccgagatacagcaagccgacagggccattgcgagcaaagccgcaaggctcgggttgctaaacgatttccagtcgagaatggagggattttctgacggtgttaaatccataatgaaaggcgccctcaacgactgcctgccggcggattccgcaaaaatcgtaagccagcatctcgaagttgaagaaggatggacgtccgcgtttgaaactttaatggggccggcgctcgacgcggtcgccctgcccgacgcctcagagctttcaaaaattctcgccgccctgcgcgagcgtaacctaggcaaagcatgttttcagcttgcgcaatcggcgtttgccgacgccgacttccctttaccgccaaccataaaaaaagcggcagacgtggtaaaatgccagtcggatgacattgccgaatacgcgcgcaacgccgttgcgggctgctatttttgcgaggatatttctgactttgcaaaattcgtatccgaaaaccccggatttaaatttttctgcgccgttgcccgcgacggctcaatgctcgacgcccgcggaaccgtctatgcctccaccggggaaaagcgcgacaccgaaagcagctttctgttgcgcgcaagcgaaataaaaaggcttaaaagcgaaatagacaccgacaacgacaacctcaccgcgctcaacgaggccgccatggctctccaaagcatgatggacgccgccgaagccgaaatagaaaacaagaaaaacgccgcggcagaaatcaagagagaaatatccgcaatcaacgcccagacaaacgaggcgaattcccagatgggcgcgaaggaagccgatctgcaaaggaaaaatgcggaaatgcagtcgatggaaaactcgcgctttgaagtgcaggacaggctcgaccgcgcgcaaaaggcgcttgaagaggcagagtctgcggtggaatcctcaaagagggtaatctccgaaagggaagccgagctcgcggaactcagggaagcgaaagacgcgcgctttgcggttttgtcggaaacgcgcattgagcttgcgtcaaaaaaatcccgcttggaaaatttggagcgcggactgggggcgataaaggtccagcaggctgaagcacaggctgcaatagaaaggcgcgagtccgaatcgcaatcaataagggcgcaagttgaaaacttggagcgcgagacctccgaggagacggagcgcgccgccgcgcttgcgcagagcctcgaaaccgccctcgaagaaatagaggccttccgcgtaaagctgtcggccgaggagacgcgcctttcggaatacgaatcgtcgctcgtcggcctgcgcgaggagcatatgcgcgcctctgcccaaaagagcgaattggacgtgcgctccgcccgcctgcgctcgaagctcgactacatctccgaaagaattttaaacgactacgaagtgtccatcgccacggccgactggaagcgcgaactctggaaggcggacgaagaatttgagacaaaaataaaactcgacgagcttgaagacggcgaaatcgaggcgaaaagcaaaggcaagaggggcgaacccacggaggaggatttcgccgcaatggattccgttgacttcgcggcagtcggcgaagaggtccgcgaattgcgcgagcgcataagcgcaatgggagccgtaaacctcgttgcaatagaggagtatgccgaacttaaagagaggtacgacttcctaaaagcgcaaaccgacgacttgtggacgtcaaaaaacgcgctcattgccgacatcgacgaaataaattccacttcccaaaaactattctcggagactttcgagcaaataagaaagaatttttcgtttacattcgacaaaatattcggcggcggaacagccgacttgaacctcgtcgaaagcgaggacgtgctcgacagcggcatagagattgtcgcgcgcccgcccggaacggttttgaagagcctttccctgctctcgggcggacagcgcacgatgacggcagtctcgctgctatttgcaatatacatggtaaagccgagcccgttctgcgtgcttgacgagctcgacgcgcctctcgacgacgccaacataggcagatacaccgacatgctaaaagagtttacgcgctactcgcaattcctcgtaatctcgcacaacaagcgcacaatgtcggcggcaaaaacgatatacggtgtgaccatgcaggagcgcggagtcacgaggctgatatcgatgcgcttcaaccgcgaaagcgggaacgccgagagtgccgaagccgattcggaaaagcattaaaaattgcgcgccgcatattcttattggcatgtattttcatagtatttttagatgaaaaaaattgcctccgcgaaactctgtaagcgcgcacttgcaattaagtatggcgcatattcatacaacgggatgagaatttccttgaactggcggctttttacataaaaattttccatatggccaatgaattagacgaatttacatctcccgttgaagcgggtgggcgcgacattaacgtgatacagaagcagctgccggtaaaaattggctggggctccgtattgtttgaggttcttttatgggtgtgcggcattctgcccggaattattttcatttttatgaaaatttccgcggccaactattttagaaaactgcaacaaaagctgcaagccgacgcctccacaatcgacaattacatagaacagcgcgtaataattctaaaaaatgtggcaagcctcgtaggcaaagcaatagacttggataaagacgtcatgaaggccgtcgccgcgtacaggggcggcgtcaatctgaacgacacttccagaaacgccgtatccaaccagcttgacatagctttcggcaggctctttccgcaagtagaggcctaccccgaattaaaggcgcacgcggccattgccgaggcaatgcagcaaaacgcctacctgcaaaaggaaataactgccgcgcgaaacctgtacaacgacaccgtaaaccaatggaacgcgtccctttttaactggcccacaaaaatgatagttgccgcgcgcgccggatacacaacgagaattccgttttcaacaagctccgaaatgaaagccgccgcaaaaacggttcttctatgattgaagacgtttacgagccactaaaaaaataccgcgattcattccgcgaaaaattctcggaattaaccgcccagaaatttagggaactactcgaaaaatccggcatcgacttcgaagccaaccgcaagctagtggcggaaatcaaggatttgaaaaacaagtcgtcggataaatctcaaaagtccacgatgctcgcatttgcctgcgtattgctgataattgttgcagtagcatgcggatttatcgcatacagctattctttggagcctgaaaaaatcgcatgccttgttgcagcgtgtgtcgcatcgtgcattttggcgttttttgcggcaaaaaaatgcgtagaacttggcaaacaaataaacgccctaaaaagcctcatatccaaaaaaacagacgaagcgcgcgaacaaatgcgcccgcttaacgaattatatacatgggatatcccgattgcgctaatcgaaaaaacagtacccaggcttgacttcgatccgtatctcaccacgcaaaggctcgacgacttaaaaaggattttcggctgggacgactccttcaccgacggcaagtccattctcttttcgcaatccggcgttataaacggcaatccgttcgttttcggagaatacctaagaatggtttggagtacgaaaacatacaccggatataaaaccatatcgtggagggagagcgtcaccgacggcaacgggcggaggcgcactgtcacacgaacgcaaactctgtcggcgagcgtcaacaaaccgtatccaaaattctcaagagacaggctcctaatttacggcaacgacgccgcccccaacctaaatttttcccgctcgcccactggcctgtcaaacgccgaggaggggtttgtcacaagtattcgaaagtggtttgccctgcgcgacctaaaagaatattccgaagacctcgacgacgattcagactttacgctgatgtccaaccacgagtttgaaacgctcttccacgcaaaaaaccgcgacaacgaagtggagtttcggctgcttttcacctccctcgcccaggagcaaatgcttgaattgttgaaggacgacgaaatcggatacggagacgattttactttcataaaacgcggcaagataaatcttctgcactcaaagcatttgtccgcctccagcctgagcaccgacccggaaatcttccacgattgggattttgatcgcgcccatttaaacttcaaaaactttaacgaaaactattttaaaaacctgtatttttcgctcgcgcctctgcttgcgattccgctttaccagcaaaccagaacctacaaagatatttgcagaggcgaaatacagtcgccgccctcatcttgggaacaagaggccatcgccaattactacggcgccgtatattttaagcacgaaagcagcatcaccgaaaacatattgaagacccagctagtggaaaggaaggacggagtctcaaaagtgcgcgtgactgcaaacgggtttggcggcaaaaaccgcgtcgattacgaaagcgtctggggcggcgacggaaggttccacagggttcccataaggtgggtagaatatttccccgtagaaagggagtcatatatgtatgtaagcgaaaattcgccagtgcccgaaagccttgcccattcagaccagaaattgcggcgcaacatttacgcatgcatttagtgcgcccgccaaacagttttatttccgcattttcacaacattccgcagcatataatttaaaactaagagcgcgacttttccgataccgtcaccatgtaaacctgacgcgctccgacttttggaaaaacgacgcaatccaaaatagcgcggcgcctcctacaatccgcagctctgtcacagcgaaagcccctattgccccgcatgacattgcaaactttgccactggagacataagcccccacattgcatttgcggcgaacattgcgccgtgacctgcaagttttgacgagttcatatcagcagcaagccgatgttgcgcacgccgaatagatacccagcattgcaacctttgaattttttgcaaacgcgcctgcaagcgcccttcccttttcaagagtgctacatgggaagagcccaaccttgactttcaacttcataccgtttccttttccatcggacttgcatgcgcctgcaaaatagtacgtatagacagaaaaacaagcgcaaatacaattttggaaattttcattccggcgataaaatcaaaaaattatacaatatatcaacgcgcaaaaattgtatttttgtcagacgtattgtacttttcctgtctttaactaagctctgcgcgaattgcactttgcacggtattttagcggagacattccgctgtatttcttaaaattttttacgaggtggcaggagtcggaaaagcccatgtcataagcgatctccttaaccgacatgaggctgtttgccaccaaatattcaactctcttcattcggtttcgtgttatgtattgctgcaaagtttcctgaaaatgttttttgaaatagcggcctatgtaatttttagaaagcccgaagcgctttacgagcgcatttagcctgagttcgtcgggctgatgtatgtgtgtctggatatattggagcatgtgcatttcagtttcgtcagagccgcggacatgcgcggcgggagatactgcaaggattctcgacgccaacgaaagcagaatatcggccgagttttgaagcattgtttccgacgccccgcgaccttcggcaagctccgactcaacaagcttaaaaagagcctccgcaacttccccttgcattccctccaacaatatgcgcggcgttgcgtaggacaagtatagagaatgttttgccctgttgcctaaatgttcgtcaatatagtggtcggtaaagcggacaaataaaaatttgctgcgtttggaaactttaaagcaatgggtagtatttggcggaatcaagaaaagactgcccgcagaatatttaaactcgcacgcgtcgggtatctggcggtatatccggaaacttccctccccggaagcgatatatacagcctcaaaaaaggaatgttgatgctccttcagcgggaaagtcttatgctcgcgaagcaaaatttcaaaggggcggtatagattctctttaaacattgtttgcaaaagtacaatttcatcaaataaaagtacaacaaaattaatttgatatattgtaaaaatactacaattttaccaaatatgaaaaagctcatatcctattttttaaaaaacccgcccgccgacggcgacaacatgaatttcgcggtcgcctttctgagaatattttccggactgatgatgatcccctacggctggggaaaagtcgagaggtatgaaaccctgaaagagaactttttcggcgatcccataggtataggcgatgaaacaagcctaataatttgcatattccagcagatattttgttcaataatgctcgtattgggaatacagtcgagatttgcggctctgatgctattttcaaatatggcagttgccgtaaagttccattttttcgatccgttttgcgccgttaaggctcttccgacagtattcttgggcatatacgcctttcttataataaccggcggcggaagattctcattggacaattttatttttaagaactttaaggaaagggaaacttgcggaggcgacaaacattacgcgttaagaattgcgcttatggctgcggcattctgcatttcatggattgtatttggcaacatattcaatctcggagggctttttagcgcgatagcgctggttgtagctctcgcactttttatcctgtctatatacggaattttgcctaacaataaagcttccggcaaataacagaaaccgaataaaatttacgccgccttgcgcttttaagtatgaatagcgcataggcggcgcagttttttatcttgcagcgcgcggcaattgtagatgcaagaagcgcaataaatatccttagaaaaaaccgtatttgcaggaattgaacaacctagaaaaactaatcagaaactttgattgcgaatgaaaaagctctaagaattatattttgagggttctcgtcaaatgcggcatatttaattaatttccactggcatttgggctatacaaaactaaatagtggcttgtccaatgcggtatattccactaacttccacagactttggcgttgacctcttgatattaccccgacttttcgagctaaaaaacacacaaaagaaacctattggacgcgcatacggcgcatatgggaacatagcaagaaggctttatttatcagacaaataagcccgcaaagcgtttgcaattgcgggcttaaaaatagtgctcaagaggggactcgaacccctacgcccttgcgggcactggcgcctaaagccagtgtgtctaccaatttcaccacctgagctttaaaagatactactctccatattttggttaaaaatgcgagctaaaaattccaagtttatttatttcccgctatattctgcctgcccgtgggttaatattttcggattattcataaatttttcagagtttaagctttcatgaatcccccatggccccgaccaaaatactacgccgtacgcgcgcggacaatgtttgtccaacaaattaggcaactcggcgagatcgtacgttccaaactccttgtcgcggcgcggattatgcgcgctgtatgcgccaaattctgacaccgtaaatagcttgcctttggctttcgcaagtttgtatttttcgtcaacgactttcagatttttcgcggatttatatccgtacacatcgcagcctatgatatccattttatcaaaattcgggccgttttcgacatcaatcggaaggcttggcgaaagcgcgtttagccatactgctcggcatcctttcttttcaagctcactgtatatctgattccacagcgccctttgcgattttggcgacaacgatgctccccaccaaaaccacttgccgttcatctcgtgcattgggccgaatatcggcaccactcccagatcgtttagatttttcactccctctgcgacatcgtctatcatttttagccagcgcattttttcgggggaatcatcttttgagagcaatttagcggcgtcgtctccgagcttcgttctaagcccaccgtaagactcgttgtatgggtttgggaaatggcatgtaattctaacaatgccgccggtatcccaatgcttttttattattggatttatcttttcccactgtatgggcttttcattttttccgagttttctgttgccttcgctaatgcaatattcgacgcaaattatagcgggcgttttgccggttttttctcttaatttttcccaatcggaagcattccagcgttggccgctgagatatttatccgattccgcaaccgactttaagtaggacattagcgcctcttttttggcgtcgagggcatcctcttgttttgcattcaaataaggagaaagcgcgactattgcaatgagagcaagtgcgtgaagcggtagtgagtatttcatttatttattctttaatgataaatttgaatggggcaatttttttcgcactggatattttatttaaagcctcacattagcccagcccaatctataacattttttacataaattttaccgcaatccgaaaaaaaacggcaagctaacaggcatgcttgattccgccgcataaacgcgcaattcgcggtaattttttttacaatctttatgaacgccaatagtaccgcaagttcagtatatcgcaaagcggcgaatgtccgaaaaaatggcgggagtaattccacgttacttctcattttttactgccaatccgcatctgcgcgtgtatttttcctctttcactatcccttcagaaaaaagaatatgaaaatagcggcattgcccgacgctaaaaattttatgacttcctatcctctctcaaaaattctgagcgcaagattactgaatataaattttttttatccccacccaagaaacaggaataaaatttacataaatattatttttcttaatggggtgcgcattggcaggtttgcactcggcaaaaatttgtgcacttaatttttgaatacttatatattttatttgagtgccggcacgcgttatttatgcaaaggcaaaattgttccaaattcgatttaccaaacccgcgctaatggaaaaatttttcctgtattgcagccccccccactaagaaagccacaacactttttatagagccatgcacgttatataatgtatcgcatcgcgcggtttgaggaaataaatcgaacgtttgaggaatttggctcttttcggcggatttaaaatcaacttgcaagatccttgcaatgtccccgaacgactcttgcaatttccattaaaagcagggagtctcgcgtattctcctctcgtatatatttgcttcgggtatatattgcaccgttggttcggcgtatataaaccattccccgcttgcaacccgtcccttccattcacccggcgtcggcaccgtatatcgcgatattgtcgtctcttcaaaccccgtctccttttgtggcacaaaaatctcaggcaactcgggaaactccatgtggaacgagacgcgctcgcgtataatgcgctgccgttttttgtgagctcgcgttgcgtatgctttgagcaaataaccggacgttggccgcatacaataataaccgtatgtttgcggcgtcaattcaagcccgtttagaattttgtaccattgagtatctctatatatattatgattgttataatttgcgtatttctcatcaaaatgcgtcggccacgatgcgccggaacctttaagctcgattaagtttccatcaattcgcactatctcggctgggccaaattcgcaccaagcgtcatcgtaccacaacaccgtgcctgtggcaccggtttcagctccgaacctgcatgtatagtgcccgagaacaaagtcgccggttttaaaattcgatacatctgcaaccggcaataggcagttattataaaattgagtagtttgcacatggccggcgttagcacctattatgattggagtttgagttgcatagtctgtatcattgagcccccatatcgggacaacatcactatcgtatcgaaaatactcacggtcaggcgcgtaaacgtaaagctcgcgcgcatgaacgatcgtttcatcttctccgtcaggctctggctccgggatcccgcctaaaacatacccgcgggactttaattccgcgagatgctctgcttcgacttcgccaaagattttgtcgccgtcctcattgagcaaatcaaagtcgagaggcgatccaagactccccttgagggattgccaatcgtcgcggttgcaaagatagctcaattctatccagtagttgctcacgtcgccaaattccgcaaatctatagaccggagtgtataaaccttgatagacctttctcgaaaaaaatccgtctttcatttaatcgctttctcttatacttttaacatttatcaagatttcgcgcaatatatcgagcgttggattttgcaattgcgcgctttgttggcgcgttaattgaaacttcgtttgattttgaattcgccgcggcctattttcgttagattcgtttttcgcttctccgcccgcacctggagccttgcgtggagattcttttggcacgtttgccgcagttacaagtgcgccgctgggtgccactcttgacgccatgtcctttgcttggctttcgattccggagagcgtgcgcgccgcgcggtcgcgctgtttggcgactggcgtgtttgcgtcggcggacattgttctgccgtaggatattccggccttttctgcggcatcgatttcaccacccctacgcatgcggtaatccgtccaactttcgccgcttttggagcctccggcagctttccattcctcgtaaagtccgagatactttgacgaaacagtcgctggacttgggcgtctcggcggcgtagggcccgtatactttgccgacccatcgtatcccctgacggaatttcctccgtaagatccattagaacccgcgccagccggatacgaagcccccgctccataaccgtttccgctaccgcccttgcgcatattttgctgccgatcgcggtaggcgttagtttggcgcattgtctcggcaagtttcttcttttgctcttcactgagcccactcatacctgcaagcgttctctttatttcccgctcgcgttcaagttcccgtgcctcggtgagcttgccttcggccttgagctgctcaattttatttgttagcagtatatcttcaattttggcttgcg

SEQ ID NO: 2044 - DNA, 9829 bp, Unknown
  16S sequences of unknown bacteria
ccggactggctcgcacacagagttcgttatccgcggggagatattcagttttcaaagaacccgctgaatttttcagcgtcgaacaagaggggttaaactattacctctggtacggtaaagagattttttgtcccttcattctataggccttgaaaaccttcattttacaacctcatctcaaaagttttctgatcttttcaatcttttttgcgatgttctgctgtgagcagttcattcgcccggcaatttccttctgagtcaggttttcgagcaccatgagatcaatgatctctatgtaatccgcgggcagtttccgaaccttccgaaccttccgaacgaggttcggagtctcaagaagctcaatccattcttctgaaaaagtcttgtcaatagagtctccatcctcttccgcgatgctttcaacgtcgacgtcatcgtctccgtatctgtagaactttcgggttgagttgaactctctccagtcgtactcgtacatttcgcgtatcgtgtcctcgctcatgccggactcgcgataccatcgttctttctcgttccattccttgttgaattttcttttttcccgggcataattgaatcccatttgggtttcctccgttttgattgaaattttttcgaatcaaaacggtggtcaggggtattttgccttgtatgtctcccagaaaatgggcacaaaaaaacgccatacagtttcatgctcgtttgaacatgattgtatagcgtttaacttattcagttgtatgagtctatgattccggagctgtacgaactcgagcttcaattaagtcataacattcgtccgaccattttcaaagttgcggtctgcatttctgacaagcttccgtcacgatacaatatgacatcaacagagacacacccgccgatcgcgttgacttttctgatgtattccactagttcatcgcccgagcaggaaagaccgtctgacgcccagcttccgcctatcccgcttgacgatacaccgaggggagcaagaatatgtgcctgtgcccgcttccatcttccaagaaatctttcccgtggaatatacccgagcagcttctgttgctcaccgcagatgaagtcctgctcctctatgagtacgctcgcgttgatggccgcaagctccgcgcgctcgctttccgactcatacctgtctcccgtcagagcgttcagctcatcctccgtgtaaccaagaacatgacctgagttaagagcaacaagcacatccggattcccagctttgcaggcgtcgacatacattttcagctgtcccggtctgtaaccaagaaaatcagagtagcaaccgtctatccaccatgccttcacttttttaccgtatcgcatagcgtactcgcgcagaacagacgaccattttctgacaaactcgtcactgacttggccgcgatcagccgataaaccaaaggcactgccctccggctccgacttgtacggtccgtcgccggtaaaatacaagcacagatcgatgccatacggttcgagagccgcataaagttcttcaataagatcgcgcttcgagcacggatttgttccggtgatctcactgtaagctctgttcggggccgccagatagcgcgtcccctgcatcacaatgaagaacaggtacccggctccgatctcatgaagtgtctttgctagctttttcacatcaaggtcagctgtgcactcattccatgtagtctctctgccaagactctgcggcatcgagggattgttctggagaacacttatatagtgagtgaatacgccccactttcttgaagcaaagtgatcttgtgcgcttctcacagacatttcacttatccaccatgactttcaatttgaaagtttcctttctggaattaattcactgattgctgagactgccgcgtgacagtttttttcagctgagtttctgcatgaacgactcaatatcgccctttatagcggatttatatgactcataggttgatgcgaccggatatttgtcagtcgcgcatacctcgatatatttcagtgaccatcctccgaaatcgaacacctctcctgagtcgagcttacgattcccgaagattatatcaagcatcttcaccgagtcgtcgtcacgaagcagtttgttcttcagtgtcacgtcataatacgctgggataacggtatctgatgactccctcgcaagcgcctcgagaatgataccggtacgttcaaggtcggagttcgttttaggcacggacatcagaccgcaaatatgctggctgacaaagctgatatagttctcctgcttctcatcatatttcggcaccggaactattccgtaatcaatctcatcatcgcgcagctggctcaccgagtcgaatctcgaccagaagaagagaccgtgtccgcttgcgaacatcttcagataatccgcgtcgttcgtattctttgcctttccggtgccaagatgatggttgtagaagtttccggcatcattcatcatgtcgtgaatcttttgcgtgagctcaatattccgctcatttccgaaagaatccacaaagccgccatcactgtcgcgctcgacaaaggttccgcctccaccgatgaagaaactcggcggaacgtcgttcgctccaagaaccccccagagatcatcggtgtccattccgtttccgtcaaggtcgcggctgaccttcacatagatgtcgcgcattttgtccatcgtccatttaccgtcgtttacgagcgcataaatgtcttcaacaccattatccgcggcgatcgtcttgttgtacaatatgcatgccgtcgcgtccttgtcgccgaggtttatgtctgacgcggcaaaataccgcttgccaccgaccataagactgtccgtgatgccgctgtcccaccagtctgcggacagatcgattcccggtatatcgccgaagtccacgagcacatcatcggttatgagagcctttccctcgtagagccgcgggtagacaaggtcgaactcgtcgtcaccggacataacagagctacgtatcttctgggttatgctgtcgtatgaaatgttcgtaagctcaagtgtgaagttgtatttgtccatgacaaccatgttgcgtttatagactgcgtcattgatgcggtctccggtttcagtctccgcgatgaggtcacgattgtcataagcgggtcggtcaccgaactgccagtgagcgacgcggaacttatatcctccgaaatcggcttccgggagagtatcagcctcctctgtagtgctgatctcatcggatacggacatatcaggttgtgacgtgtcatcctgacctgtgccaccgcaggatataactacggatgagaggcagagaaccacagtcagaaacgcgagccttgagtaatgctttttcatgatgatttcctccgttcaaaatttatattgtttgttcattcagatccgtttcagtgatatggtcaccagaaacgcgcattgactttatttcatatggcgcgagcgatatttcacacgaaatattcatgtagaccagtcttgccttgcgtctttcatcggtcgggttgaacaggcgcaggatacttccgttgttgtcctcagcaggtttccatgccgaaagcaggatcgcgtcgtctccttctatgataacaccaggcttcgtgacatgaccattaccgtccggatacatcgaaatcgtcattggaggatcattcagtacagccgcttgacgcgcggcattgtttcttacagtcatcctgttaccagccacgaaactgaacacaaattcatgctcgccgatatctatgtgcggcagataccggtcttgcggagtatttccggtctcccttgtcggatgcccactgtagacaggcgaacggagaagtgaaatgagaatggcgttgccggaactatcgaccgctgatccatatgtaccgttattgtatacagcaaatgaagtattatcgctctccactatcacatattgtccggagcagttctcactcatgtttccgcgcagcttttcgacaccgaacggctcatctccgattgtttcccggattcggaacgccgctggaagcctgagacgcagcatcttttccggttcgttccagatgactctgaggctcacctccataccaccattttttgagatgatatagtgtaataccgctcgtgaagtcatgtatccgaatacagcctcaaccgttgtcctgacatctccatcctcgataacacgaaccgattcgatctggttttcaagcgcggcgaatttctgtccttcctcgggcgaaagcaggctgaactccccgaccttttcatcccatttgctctgaagcattccccacgggtcgtagttatcgcggtacacctcaagcgcacaggcaccttttccgagtatgtcagcgtcatccttcgagtatacgctgataagcccggttttgcggttgatctctatatgctcacccgcgttgtcaaagatgaacgcatcatcccttactgtcacgttcggcgtcggctttgaatcaagccgtctgaaccggcagtcgaagcagttcatactcatcggtttcagtctggcgtgaaagataactctttttgcccactcgatggcaatcgtacttttttctttttccggctgtgtcgggagcgcgtttccgttctcgtcatacatcaccggatatagaaaatctcctgtccggtcctgctcccacagcatcaggtcacaggaaagatctttttcaacttcatacgggtacgggttgtacaccataacaggaatagcgtccggatacgcttttctctgacaggaagcaagcgcggtgaacgccttcatgcgcgcttttgacagcagtctctccgcgctgccgagcatatccataagcgtttcctcagcttcttttattgatgtcccggcgagggcgtcgtggaactgaacggttaaaagctccttttcggcggcgcgtatgtctgtcgacggatagtcggtcagtccggtagtcattgcatgagtgcacatcttctcggttgaaaagagcatattctcacatcgccggtattttcgcttgagccgactcatcgtggtataacatccggcgttgcagggattcagactctctgcaaaaaccttgtacctctttccggataactcatcaaacagtgcctccggtgtcgagtggagaatattgcagctctcgccgtactcttccctcaacattgatatatccttcaggtcttcggcggacagcgcgccgccgtgatttcctattccccaaaccacgaacgatgtctcaccgtcaggacaggagtcgatcactccgcgtatcttttccgccgccttccctttcagggttccgtagcctccgccggtcagtctcaccgccgtcacttcactgccgtcatacccgcgccactcaaatatctctgacggaagctccatctgaccgacaagcggcctcgagaacatatagcccctgtaaccactcttttggagtatctggacaagcccgcgtgtgtgaccaaacgaatcgaagttgacggctacgtcgggaacgactccgaacttctccctgaaataacggtgtccggcaagtatctgacggacgaatccctctccggacggcagattgcagtccggttgtagataccagccacccattatataccattttcccgcgcggacaagcccacgtatccgtccgaaaagcccaggatcatattcttcgacccattcataaagcagagcctcgttatggcagaatatgaaatcgtcgttgttctcacagaattccgctgcaatgcggaaggttgatactgcctccgccgcgccgtcctgccagttccagagccagatcggatctatatgcgacgcgcagataagatgaattttctttgacactttgctgctccattcacgtttttttatcacttatattatactccggcgaggcgccgcggtcaagcaattatcttgtttatttttgacactatattgacttttgccgaattgtcgagctagagtttcaagattttaaggaataatttcagaatgctattgacattatattgattatatgctataatgccttacaaggagcagtgatttcatgaatgatttcagatacgagacgcatatagcgtgtgacccactccttccattcgtgctcgacgatatcatgaccctggccccggatttcttcaacccggttccgaactggcatgatgacctcgagatactgaactgtcgtgagggagaaggatatgtcataatggacggaaagagggtggacttttccgccggggacacggtgattatctgtccgctcgtgatacacaatgtctacagtgattcgtcggtcagcttctttccggtcacaccgggacgggatttctgcgtgtcaaatgggatagacaccgacaggctcgtgtatccggagaaaatacgtgacgcggaaatgaacaaactgtcgcgtgagcttgagagccattaccactcgtcagattatctccgaacagcgaaaattcgccggacagtgctcgatatgatgataaatctgaccgaaaaatacggaaggttgccggatgagacgagcaacgggaaaaaagccgacttcataagggtgagaaacgtaataagattcatccgagacaattacggacgcgggataacgctcgatgagatagcgaggtattccggaataaacaaatatacggtttcacgggatttcaaggagctcaccgggatgaccatagtgtcatacctgaacaattaccgttgccgcatcgcgcgtgagcggatatgctcgggcatgagtgtcagtgaggcagcggagatatgcggcttcacgaatctgtcgtatttctcgagaacattcagaaaatacgtcggcgagctgccgtcgaaaaacagaacatagggagaattgaaagatgaaacaaaatttcaacgacggatggcgctttcacatcgaggacgcgaacgaacgcgtagtgaacaggcatatctacaaaaacggtttttcaaaaggatacgcggcagaggatttcaacgacgctggatgggaggacgtcacgctgccgcacgactggtgcttcggacttgaacaggatccggaatacgatgtgacccatggtcactacaagctgaacattgccgaccagatgtgcatggacccgcgcgatgtgccggaggacagaggctcacccataggatggtaccgcaaaagctttgaaatgccaggaaactattcagataaactcatttacatagaatttgatggaatattccgcgattccgagatatatgtcaatggcacatttatcgggagccatataagcggctacaccggcatgaggttcatgatcggtgacgagctgtactatgacggcagaaagaacattatcgccgtgcgcgtcgactgcacgcagaacgaaggctggttctacgagggcgcgggaatctacaggaatgcgtatctcgatatccgtgaccgcgtttcgataattccaggctcactgagcgtaaaagccgtaccggttcttgatggaaacagagcagtatccggaaatgtcaatatgacctgccagataaggaacgagacggactcggagaaaaaagctgttttgggcttcaccgcctgccggcaaagcgcgtctgttagcatctctgtcccagcttacacggaaatgccggtaaacgcgtccatgtgcgtcgaagatcctgagctctgggacatcgccagcccgactctgtatactctcgacgccgaggttcacgcggatgagttccgggataatgaaagcgtatcgttcggcttcaggacaattcgatttgatcccgacaacggattcttcctgaacgacagacatctgcctctgcgcggtgcgtgtctgcatcaggattttgcctgcgtaggcacagctctgacgtatgaaatacacgaatacaagatagagcgtcttcgcgaaatgggctgcaacgcgataagaaccgcgcacaatccacccgcaccggaactccttgaagcctgcgacaagcttggaatgctcgtcatggacgagacaaggttttttggcagttccgatgaagcgcttgaagagatgcggtcgattgtcagacgagatatgaaccatccgtcggtgatactctggtcgataggaaacgaggaaggcgagcggcagaacaacacgaacggtacacgcatcgcgcggcgcatgatccgtgatataaaagtgatcgacgattcccgtcctgtcacctacggcggaaacaacggcggtcaatacgaaggaataaacgaagccgtcgacgtccgcggtttcaattaccttcatcttcccggatacgactatattgagaaatatcacgccgatcatccatcgcagccaatagttgggtctgaggaggggagcgctttctacaaccgcggcgagacgaagttcgatacatccgcgcgtacggtcggcgggtatgacgaatggatcgcgccgtggggctcaacagccgagggctgggtccggtactgcgatgagcacccatatatcgcgggcgccttcatgtggaccgggtttgactattcgggcgagcccgcgacacaccttgaaaacaccgtcacgagcttcggggcgattgatctctgcggatacccgaaagatgtatattactattataaaagttggtggcgggatgaggatgagctttatcttttccccgactggaacagagaacccgatgagaacgtcagagtggtcgtcaactcgaatctcgaagaggtcgaactgtttctgaacggaaggtcactcgggcgcaagacaatggaacgccttggccaccttgagtggaatgtgccgtttgaggcgggaaaaatcgaggctgtcggatacaggaacggcaccgtaatgaaacgtttcgtgcgcgtgacgatcggaacccccgcaaagcttgcactgagagtcgacaaaaagcccgggagaagcggaacagcgctcgtcacggctgaggtcctagacaaatacggaaatatcgttccgtacagctccgataaaatagtctggaagattgaaaatggcgaaatccttgggctcggaaacggcgacccgaagtcttatgaaaagaaccgtttccagaagaaaacaaaaaaaagaccgctcgaaaatttcgaacggctcgaaaacggcgagtgggtgccatatgatacgactggagcggcggacggcagcgttttcagaatgccgccgatgaacgttcagtttccggagaaggcagagccgccgttccatgacatacatcgcgttgtaatcaaccatccacagagaaatgtgaccttcagcgaattccgctgtgtctttgacgatgagggcggcgaggctcttctggagttcgaaagaatcgagggatttatgcgaatagaactgaacggaagcatactgactgacgcggtgcagagcgggtatcctcagccgttccgggtcaatttgagagaaggaaaaaacgagataagagtcaacctgaactctcatgattcgcttgaggcaataaaattcggtgtcttcatcgaacgtttcgaggaaccggaaatgttccgccgggcataccacgggctctgtatggcggcaatccatgtgactggcgagagcgcaaaagtcatggcttcagcgcaaggaattgatggagatatgattgaaattttgcgatgactttacttttaaggcaacaccgcacaaccacaataaagcaaatcggtgatgcgaaacgatggcaaatatgatagattctgcccgtttcagttcgcacagggcgcacgaggtcagactgccgggcaaagcctgtcagccagaaccaag

SEQ ID NO: 2045 - DNA, 18460 bp, Unknown
  16S sequences of unknown bacteria
tgtttcactgttcagttatcaatgttcttttgttgatctttgttatctcctcaccagagcaactctgatatcatatcatgtcatccgcggtttgtcaagaacttttttcaactttttcatttttcttttttgctgtctggccggaagtcttttcgaacttctttgtgaaatcctttgttttaaggtatttcctcaacagcgaggtttataataccatcgttctttttgtttgtcaataacttttttcagttttttccaacttttatgaataaaagaaagatcctctgtgtagccaccgtaaatcagctgacacagaagatcttaattaatctgctattctttccctctgcttattgcgctgcgcaatgacagcagagaacctgtctgattcgagtcgattaataagaaacaaccgtcgtccccatcgggcatgtattgttgatgtaactcagatcggcatccgacagacgcacacatccatgtgaataagcacctcttgtatgaccatccacacggcggtggaaggaattcccccactgcttctgctcgttccaagtaaaataaatccgaacgccgccatatgcataatcctttcggcaaagccggaacgtacctgtcgacgtttttccgtcttttcctataacgcatggcatccgccttacgagcttccatgaaccctgctgtcctttaaacacattcacggaaagtgtgtactggctgacccagatcagatatttggtcctgctggaatatcccttttcattgacaaatgcctctttgacatttgtcgcgtattcctgttttgttgcatttatgctgttatagcgaaggtcagaaccttttaccctaactcttgttccatccttcataataacggtaaccaccttactgcttctcgcagttgccgttacctttgtaccctttttcagaaccttctttgctccgctgcctgccagcgtgcctgttgaatttctgcgcagtgtcgcgttaaaataacgcccatgtacctgctttgccaggccgctcagagacttcggtgttccgcttacctcagccactccgcctgttaccatctgaccgctcaccttccgaaagctctgtacgctgaatttagccgcaacgccttctgtcagatttgtcacattgaagcttgttttcttcgtcgtcgtgagcagcttatattttccttctgtctcatcatagcgatatacataatatccacttgcatttttcgccttattccatttcagcttcagtgcggtctcactggaaccggcaattttcagaccggacggagtcgccggcttcttcacggaagtctgcacccggatcgtagcaggctgcacactctccgtcgtggtatccttgctctttacgaatgcacgcacctgatatgtatatgccgtattcggaacaattttcttcaaagtatggttcgtttttttcgtcgacgcaatctttgtcgccgctccgcttgccggatctacccgataaacctggtagccggatgccccctttaccttggaccaggtcagctttaccgatgtctcggatacggccttctgcttcagattcttcacatcgcccaaagtcccggctgccagagcagacatagccggaagaatcagcatcgcagtcagcataaacagcagtagcacctgctttttcaaatgttttttcatggctgtaatcctttcttttcaaactttatttgtatgatgatacaagggtcaaaaggtcatgtgttccatgcttgcatgaaaaagcatgacttattgacccgccaaacatgagaaagcagcgatttacgtagtaaatcagcggatttcgaatgtttgtagctttgtatctttattgtaaatttattcctgttaaatgtcaatgcgcattccattctttttgcgggcttttaaccgaatcaggcaagtcctctgcttcaattgtgccaagcaataagccgcggatcggagcacgatgcaatttcctgtaaaacaaaaagacagctgcgaataaacaactgtcttcgtcatactgtctttaatacccagagtgccgtttccctgcttctgactcctagctgagctaggtgggtaaccgcagcaacgacttctgccttccactgcaaacggaggcctggcatatgccgcgcgatataggaatcccgtttaaagtaaatgtaggttcaaaacacagggattgtcgaacaccccaggaacttataacatgattatactctactattggcagatacgcaatcctttttttctgtcgcccacaggttcctgttcgatcagcaacaaaagcggatatcctcaatctgcttccgacttgcaggattataaggaagtctgtgaaccgcagcagtcgtaggtcgcacgcaccgccttgataaagtcctcactgtttaagacagtcacgtctttcaaagaagtgatcagagccaggtccttggtcatcttaccgctctcgatcgtagtgataactgcctgctccatccggtctgcaaactgacaaagctcagaaatcccatccagctctccgcgcttgcgcaaagctccggtccacgcaaagatcgtcgcaacggaattcgtggatgtctcttcacccttcagatacttataataatggcgctgtaccgtcccatgtgccgcctcatactcataattgccatccggagagacgagcacagaggtcatcatcgccagcgaaccaaacgcagaagaaatcatgtcgctcataacatctccgtcatagttcttgcatgcccagataaatccgccctccgacttcatgacccgcgccaccgcatcatcaatcagcgtatagaaataagtgatccctgcctcaccgaatttttcctggtattctttttcaaaaatttcctggaaaatatccttaaacgtatggtcatactttttcgaaatcgtatccttcgtcgcaaaccagagatcctgctttgtatcaagtgcataattgaagcagcttctcgcaaagctctcaatcgaacgatccagattgtgcatcccatgcagcacgcccggaccacggaaatcaaagatcgtctccctctttgtcgtaccgtcctctccggtaaaaacaagctcggcttttcccggtccgtccacgatcatctctgtattcttatatacatcgccatacgcatgtcttgcgatcgtgatcggctttttccagcaccgcacatacggctcaataccttttacggtgattggtgcacggaataccgtaccatcgagaatcgcacgaatcgtaccattcgggcttttccacatttcttttaagttgtactccttcatgcgcgctgcattcggagtaatcgtcgcacatttcacggcaacgccatattttttatttgcattcgcactgtcaatcgtcacctgatcattggtctcattccggtgctccagtcccagatcataatattcacttttcaggtcaatatacggataaatcagttcctctttgattattttccagaggactcttgtcatttcatcgccgtccatctcaacaagcggtgtggtcattttaatcttttccataaagcatctcctcttattaactctgttttttcggacgttctccgtcccgaactggtttcggttcattttaccattttctctatactgcgtcaaatatatctttttccgtccgcatgccaaagaagtaaacgtcgcagatccggcataccccatccctggcagtttttcggcatgccggtatcgacggcagcctccttcagccgcatctttacttcaacattcgtcagctccggctcctgttccagtaaaagtgccaccgcgccggccaccgcaggagccgccatggaggttccgctttttcgcgtataatacacgccccttcgaaaccctgaatagcaggagatgatccgtgtccccggtgcgaccagttccggcttacagatacactcagaggtcggtccgcacccggaatagtggtcaaatgccccaacggtaataacctttctgcagttgcccgggatcgtaatgctttccggatcaggccccagatttcccgctgccacgattacgaccaatccgccgtcccatgcccgctccacacaccggagcagctctctcgcctgtcggtcttcttccgtcctagttgttcctgccgaaatattaagaatccggatccgatacacatctcgctgttctatcacccattcgatcgcccggatcagattttccacttcgcctgccccaaagctatcgagcacttttccggaaacgatccggcagccgggtgcgattccacaatatttcccaccgctgcttttcccacttcctccaagaatccccgccacatgtgtaccatgggaggcgtcatcataacacgacggctttccgttgacaaaatcccggaatgccacgatccgctcgctgtagtccggatggcggctgataccggtatccaggacagctgcggtaattccccttcccgtgattcccgcacggtgtatctctgtggcatgcaacgcctctctgacccgattcatattcactcctgcagcgctctttctatcatcctatgcaccttttccctttctgatactttcttttattcagttccggtatttattcctgcgaacaccgggccaagcagccaggcttgcatggatatttcatctccacggctttgctgcatggtgtttgatttatctgaacacaaaaaggcgttgagttagttcttcctactgagaaaaaatacaaatctgtttcctttaccagtggcaaaaagtatgctatactgaagaagataacttgctttccaaggtatcaataacgaaaaaggggggaattacatgaatgtcaatgaatctgcggaaaactatctcgagacaattctaatactcagtcaccggcttccggttgtacgttcagtagatattgcgaatgaattaggctttaaaaaatcaagcgtcagtattgcaatgaaaaatcttcgcgaaaagaaacacatcgtcgtatcggacagcggctttattaccctgaccgaatccggcaaagcgatcgcggatgagatctatgatcgtcatcagtttttatctgcatggctgatccagcttggcgtcagccctgaggtcgctaccaatgacgcctgcaaaatcgagcatgtcatcagccacgaaagcttcgaggcaatcaaaagaaatattaaattatagcatcaactccgaaagatcagccgtgctttttctttcggagttttatcatatttaaaaaagataacccatatactgtccggaatccatatatccagaggttccttatgccttctcccattcccgctatttcagaggactattccgatatcattgtaaaaaaacagctgctcccattccggatcgaggagcgctatcaggagcagcccgtcgaccggcaatacagtatcctctatgccccgctctcggaaaatctatacgcagcacatcagatcggctatatcagcgtaccaaagctttacacctttatcagtctctccagtctggagcgctccggcatcctttctgcccagacacagccctatctcagactcctcggaaccggaattctcatcggctttctcgactccggcatcgactaccggcaccccgccttccgaaaagcagacggaacgacccggatcgctgctctctgggatcagtccgattcaaccggaattgcaccggaaggtttttcctatggcagtgaatatcaggaggatgccatcaatcaggccctcttttctgaagagccttatcgcatcgttccctctcatgattttgacgggcacggaaccgccgtcgccgggattgcctgcggcagcgcagatccggaggctgattttaccggtgcggcgccggacagcaccctggccgtcgtaaagctcaagccggccaagcagtacctgcgcgactattttctgatcccggacgatgcgacggcatttcaggaaaacgatctgatgctcggtatccgctatctcatcgacaccgcaatccggcttcgcatgccgctcgtcatctgcatctcactcggaagtaatcagggcagccacaccggaaacacacctcttgaagaggttctctcttctgctttgctgctcggcggaacctacgtcgtagccggcaccggaaatgaggccggaatgtcccatcattactacggcaaactcaaccgtgctgccgaatctgccgagctggagcttctgatccgcgatgcttccaaaggagtcacgctggaattctgggcagagccgctcgagctctatgacatcggcttcacttctccgctcggcgaatcgatccagcctacttattatggaccattctcctaccgggaatttacctttgctctggaaaataccaaaatttatgtctattactctgctctcgaactctccaccggacagcaggtcattcagatccggatcgaacacccatcgaccggaatctggcgacttcacgtcgtaaatcgctcctatataaacggaagctttcatctctggcttccgattaccgggttgtcttcaccgggcacattctttaccgctcccaatccggataccacactcgtcatcccatcctgtgcttcatcgcttctctctgtcgccgcctacgatgccgacagcaaccgtctgtttctgaattccggccgcgggtatacgcaaaatgagatcatcaagccggaccttgctgcgcccggtgtctcagtcactgccccggttgcaggcggcggctacgaagcgttcaccggctcctgtgctgcctctgcactgactgcaggcgctaccgcactccttgcccagggggggcggcaaatgcgtccacccctcaccttcaccgcacaacaggtcaaaatgctgttcctgcgtgggagccggcaaagcagcgcctatgtctatccgaaccgggaatggggctatggcaccctggatttgtaccatacattcgaattgattgtataacacaaaatttctttctgaacctttttaaccgacaggcatatgatacactgtaaatgatctctcggaggaaacaaaatgagcgatttggctgcaacaaactgtggatgtggatgtgataacaacggctgcaacaacggctgcggatgcagcaactggatctggatcatccttctgctcgcctgctgtggaaacggcaatggctgcggcagcggatacggcttcggcaacgatagctgctgctggattatcctgcttctgctcttctgcggaaacggcaataacttccttggctgcggcaatggctgcggcaacggatgcggctgctgatggcagctgtcggcggggtctgcgccccgcctttttttattttacaagaactgctttttttccgtttttcacaagatcggtctgttgtcccatattctttttttcctgttccctgttttctatccgctgctgcgccgcagctgctttctcctgctttcgcctcacacaatcctcatcgatttcataaaacgcatttccatctataataatttgatgcataccctcacctgctgtttttcttccattcttaccatattccatctcgggggcaccggtgcctgtcgccgggcggattccggttctaaaatatgtctaggcaacatatgattagaaaaaaagcatcggggccgccatgctcactcccatcgacgaaattgcaaatcagaaccatctccagctaataaaagctgcaatcgcttttctgccaccgccaagccagcggtctctttcgcttctgatcaagcttttggagcttcggaacctctctgccttttttcagaaacagggaagtctccatgcctgcaatgtcgcctcttctgcatcccttccggaaatgctcgcggaaatgcgcaattactgcgatggttcggagctggagctgatcgatcagctcgggcagatatgctctttgatggaattgtattccgtcatgatgcagcctccggaggacgaatcgtcctgaaatgcgaagtgtatatgagcatacttcgatgctgatagagcgtgtttccaaaatgctctggaaaggtttttctatgaatccaaattcctggatggaaaaccctgcgctttcgggaatcgatcctgcaaagctgcagcttctgacctctctcgccggacaggcgcagggaaaaagccagaacgagctgctcccgtttctcatgtctgccgcttccggacagctctcgtttgacccgactgaaatcgataccatcatccgtgtactgaaaattggaaaatctcctcaggaaacccagcggatcgaccggatgtgtgcactgatgaagcaatttaaccgacacaaatagaaaaaactgtccggccataaaaatcaacaaaaagcaggagatgtatacaccattgcgatatacatctcctgccccatttaatctttggcacctatcctatttgcatttcatccgctgcttattgctctgcacaattaaagcagaagacttgcagcagtctacatatctcccgaaagcacgctgcggttctttaccatataatcagcaagcgacacaacagtcagcacaagcgctatccacatgagcacctgcgcgatcgtatggaatacaccgccaagatctaggatcagaagaatcaccatcagcatctgagaaactgttttaaatttaccccagtagcttgccgcgataacgacgcccttgtccgacgccacaaggcgaaatccgctgatgataaactctcttccaataataatgattacgatccaggccggaagcgcacccttttctaccaagcagatcattgccgagcagacgagcagcttatccgcgatcggatccataaattttccaaaatccgtcaccagattgttctttctcgccagatatccgtcgagccagtctgtcatactcgcaagaatgaaaatcacagcagctacatatttcgccgaactgccaagcccattccagagcataaatactacaaataccggtaccatacatacgcgaagcaccgtcagtcgattcggtaaattcataatcaacactcctatctgtcgtcaaatatcttctgtaagctcaccgatcagatcatactccaccgcaccggtaatgcgcacgcgcacaaaatcgccggaattcagctcttccgtcgtctgtacaaacagcaatccatccacattcggcgcatcgccatatgtacgtgccacataggcatcctcatctgcgaccttaccttcaatcattgccgtgaccacactgcccgtccgttcctccgcacggtcaaacgcgatctcctgctgaagctccatcagctcttcctgccagttcagcttcgtctcctcatcaatctgatccggcatggatgctgccggtgtgtcctcttcctgagagtaggtaaacaccccgagtcggtcaaactccatctcatcgataaattccatgacctcctgatgctgttcctcagtctcgcccggaaatccggcaatcagcgtcgtgcgaagcacgatgtccggaatctcttcccgcaaatgcgtcacgatctgctccagatccgcccgtgtcgtcctgcgacccatacgtctgagcacagcatcggatgcatgctgaatcggcagatccaaatagtgacagatcttctcttctcttttcattgtctggatcagatcttcataaatctcctccggataacaataaagaatccgaatccaacgcagcccactgatccggcaaagctgctccagaagcagatgcagtgactttttcccgtacagatccacaccatagactgtcgtctcctgtgcaacgagaatcagctccttcactccctgtgcagcgagctccttcgcctgctcgatcagccgctccatcggaaccgagcggtaacgtccgcgcagcttcgggatgatacagtaggtacagcacttattgcacccttctgcgatcttcagataggcataatgcccgccggtcgtcaccatgcgcttcgcatcggtctgcggaaggtaggataatggcttctcctccacaccacggctgcccgcaagtgcctcatccaccgcctccacaatcttctcataggcagtcgtgccgagcacctggtcgacctcactcacctcatcgagaatctcctgcttgtagcgctgtgccatacagccggtcacgatgagtgccttgcattttccggtctttttatattctgccatctcgagaatcgtctgtacgctctcttcttttgcatcgttaatgaagcagcacgtgttgataatgatcacatctgcctctgtctcatcgtctgtgaatgtatagccccggctgtttaataagccaagcatttcctcagaatccacaagattcttgtcacagccgagggaaataaacaatattttcattcattactcctgtctttgtcttccggctccatctcatagacgaccggctgctgcttctgtgccttcgccttttccttctgttcaagcagatcgctgacatccgcctgcggatactccttctgcagacggttgagctgcttgacccgcacctgaatgcagatcaggctcgtcagatttgtcagtccatccagaatcagacagatcccgatgtagagaatcatatcctcctctttctgaaatggattgcacagcaatacgacgccaagcgcgccgatcagaatcgcacagatcagcaccagataccatttggcaaaacgtaaccgcttcatattgatggaactctgaattttcacgattgcgccgagcagtaaaataatgcccattgcaaacggaagcaccgaccccaaaaaggtcggattcagtaaaataaacaggccgaacgcaaggcagacgatcccgatcacaagatccatttgaagaaagccctgcagattatcctttgtaaaatacatcactccataggaaatgccgatcacaatcatcgcgacagcaagtccgtagcagatcatctttacagacatcatcggccacgccagtaaagctactcccaatactacatagagcgccgagataaaaatatagcttttactgaactgctttacctctttcaatggtcatcgccccttttcagccctcatcctcttccttcttctccggaagtaccttcagctcaccatctgcaagctcctccactgcacgggagagcggcttggaaatcaccggaacgtccagatctcccttggactgacgcgcaatgatctgacgcgcacgcttcgcggtcgccataacgatagaataacggctgttgactaccggagtctcgccctcctctacgccactgtttactactttcattaaatctgaataagacggatgtaacataattatttttctcctttcacaaattcccgaacctcttcctgtatctgatggataaatgcaaggttccggtctgttttattatgctgactctcgatcaaatgatgcatcagctccatgctctgttcgagatcatcatttacaataatgtaatcatactgctcaatgccctcagactcctccgcggcacgtgcaagacgcttttggatgacatcctcagtctccgtattccggccccgcagacggtcaagcagtgtctttgcatccggcggtacgataaagagcagcagtgcctttggaaacttctttttgatctttaaagctccctgcagctcgatctccagaatgacatcgcgcccctgctccatctggctctccacatattcccgcggcgtcccgtaataatttccgcaatattctgcgtactctacaagctgatcgtttgcaatcagctcttcaaatgcttctctcgtccggaaaaaatattcccttccgtcttcctctcccgcacgcgggctgcgtgtggtggcggaaatggaaagcgcatactgtccgtaacgctccgtcagaagcttcatcagagtcccttttcccacaccggaaaacccggatacgacaacaagaattccttttctattcatgctcctctccctttccttcctgctcggacagctgccgtgtggcaaaccgtctggcaatggtatccggctgaaccgccgaaagcaccacctgaccgctctccagcacaatgactgcctttgtccttcttccctgcgtggcatcaatcacaagatgctgctctttcgcgttctgcaccagccgttttaccggcgccgcatccggatttaccacaaccgaaatcttctggtcgtttacaagattgccaaagccgatgttcaccagtcctgccatcgctgcctcccaagtctttattcgatattctggatctgctcccggaccttctcgatctcagtcttcagatcaatcgccacattggaggtcgccagatcattcgcctttgagagaatcgtattggcttcccgattcatctcctgtgcaataaaatcaagctttcttccgatgcttccgcccttgagcagtgcatccctcatggtcgcgatatggcttcgaagccgcaccgtctcctcatccgtacagatcttgtctgaaaaaatcacgacctccgccgcgatccttccctcgtccatctgcacatctgcgagcagctcctttaccttctcctcaagcttctgccggtattctgcgacgatctgcggataccgtgtctcgatgagagttacattttcgtccattccatccaatttgtcaagcagatctgctttcaaagcctcgccttcccgctctctggcctgtacaaactgctcgcaggcaccctccagggtctttttcagctctgcccagatctcctcctcgtcgatgtccgtatcttccatcgtcagcacctccggacatctgccaagcgtcgacacccggatatcgttttccaggccaaaggtctcctccatcttccggaaatacttcagatactctgccgcgatctcttcattatattttaaagcgccctgtccctcgctataatcctcataggtgacaaatacatccagctttccgcgctgcacatactgcttgagtacgccgcggatcgctgcctcaaaaaatccaagcttcttcggcatcttaatgcttacgtcaaaataacggtgattcactgccttcatctcgacggtgaactttctgctgccctggtgattctcgcatcggccaaagcccgtcatactttttatcatgtcaaatatccttcctgcccctgcggcactttctgctgatggcataagttcccatactgattcattatagtcgatcgcccttccgccgtcaatgccaattgttttttctttcaaaatctgatatgataaattttaaatgtctgcagtcttctgcagcgttcacttgaactatggaggtatgtttctatggcattagacggcattgttgtttcaaatatagtggcggagctgaatgcaaatcttgcgggcgcccgcatcgccaaaatcgcccagccggaggcagacgaactgctcctcaccttaaaaagcccgaattccggtcaggtccggctgctgctctcagcaagcgcaagccttccgctgatctatttcacttcggtcaataaaccctctccggtcactgccccggcattttgcatgctgctgcgcaagcacatcggcggcgggaaaatcatgcgggtttatcagcccggcttagagcgcatcatccactttgagatcgagcatttaaatgagatgggcgacctctgccgcaaggatcttgtcctcgagctgatgggcaagcacagcaatctcattttctgcgatgacaacggcacgatcattgacagcatcaagcgcgtatccgcacagaccagctccgtgcgcgaggtacttcccggccgtccgtactttattgcgcagacacaggaaaagctcgacccgctctccaccacagaggatgcattctgtcagagcgtcttttccaaaccgatgaagctcgcaaaggcgatctattcctcttataccggcatcagcccggtcattgcagaggaactgtgccaccgtgcttctctggaatccgaccagagtgcaaatacgatccaggaaatggctaggctgcatctctatcatctgttcgaccttatgatggaggacataaagcagcaccgctacacacctctgatcgtcagcgactgccatggtgacccggtcgagttttcttcccttccgcttacgatgtatgcagatatgcagatcacggaatatccgacgatctctgaagtactcgaacagtattatgcccggaaaaatacggtcacacgcatccggcaaaaatccgcagatttgcgtcacatcacggtgactgccctggagcgcaaccgcaaaaaatatgcgctgcagatgaagcagctcaaagacacagaaaaacgtgaccagtacaaagtatacggtgagctgatccacgcctacggctatggaatcaatccgggggcaaaaagctttgacgctctgaattattatacgaatgaaatgatgaccgtgccgcttgatccgacgctgacaccgcaggaaaatgcacaacactatttcaataaatataacaagctcaaacgtacttatgaagcactcacagagctgatcgaggagacaaaggcggaaattgaccagctcgaatccatctgtacctttatggatctggcactttctgaggacgatcttgtacaggtcaaggaagagctgaccgacgccggatacatccgccgcagatacaatggtaaacgggtaaaaatcacctctcatccgtaccattaccgctcatcagacggcttcgatatgtatgtcggaaaaaataattaccaaaatgatgagctgacctttaaatttgcttccggaaacgactggtggttccacgccaaaggcgctcccggaagccatgtcatcgtcaaatcgcacggtgaggcacttccggaccgggcctttgaggaggcagcccgtttagccgcatattactccaagaaccgggatgcagagaaagtcgagatcgactatgtggaaaaaaagcatgtgaaaaagccaaacggtgccaagcccggcttcgttgtatactacacgaattattccatgatgattgatccggatatccgtaatctgacgcttgtctcagactgatgatctatccttgtaaaaaccttcccaggttccggcagagctgccgctgcagctctgcctcattcttccccgtcgcttctgccagcgattgcatatttgcctgcagcgcaaacggcagcatgttccactctgcctccgcttctcccatcgtccatgcaactgcggaaatcccgtccgtctctataaacaatcgctcaaccggaatttcctgcagcattctttgatataatgaccgtttctgttttttttcttcctttgaaaatccacgaagcagccgtcgatctgctgccgagccacatgccgccgaaaaatccggccccagtgtaaaatagcagcccagatccagatagggctccagatcctgctcggtaccggaataccagtgtgcacagatatgatacgggaaaccgcgcagcaattctgcaatccttttctcctgccccttcgtatgcagcaataccggcttctttagatctgccgcgatctgcagctgctcctccagccgtttttgctggatatccagtgggatgtcacaccagacagagtccattccgatttctccaatgtaatcacactcgctgtatgcctcctgcatttcctctgtcagatgctgatctgcataccatggatggattccaaagctcagcagcagctcctctctgttttggaactgtcttgtgtacgcccattctgccggcgtcccgctgcttaaagatgttggggtcaagaaaagccggtgtgcaaaacacaccggctttcaaacatcatagaaaacgacacctgttgcatcgtctacgtcctgttttcctgcgccagcattatctgtatcaggttctaagggtcaaaaccgtacggtttactctcaggcctccacgacctccccattttcaagaatagtaaagcggacattcgcaatccgcttcgctacttgctcatgaacgcagtcgcttcgcgatctgtcagtgggagctttcaactcccactgacataagcatccccctcacccgtcgcttagtgctccgcgcacttgaagcgggggaatgcttatctgcgttcaatttatatgacattcacagcttattctgcattgcagatcttcataatcgcgtcagcaaagatcttcgcactgcgcagcagcatctcaatctccatgaactcatcatcaccgtgcatgtgattatcgacctccggaaccatgcagccaaatgcaacgccccgctccagctcatgcacgtatgtcccaccgccggtcgaaagcgcttttcccttctttccgaagtaacgctcatagcttccgagcagcgtctgtacaaaccaggaatcgcccggtacgcaatgcggctcgcgcagctcatcattatccagcgtgatgccatactgtgccagcgcttcttttaccggatagcttgtattttcctttgtgcagccaatcggcagacgcgcatcaaaaatcgcatgcagatgctccggcgtataatccataatgctaaagcacagtgtcagtgccccggattcctcattttcccggtcgattccggcctgctttccgcacgtatcctcatacgggaaaagtgcctccaggccaagcagcgccgtcagtccctttgtcgcatccagcggaagtgccgtgatcagccgaagcgtcgcggtcagcgcatttttcccctctgcaggtgtggatgcatgagccgccactcccttcgcagagacttttactgtgccatccgcctgactctctgtgataaatgccacattcgtctgggccgttacacgtgccgccgcctcttctactacagctgcttctaccccggccacaacaagcgttgcacgcgcagggacaacgtttaccttatcgccgcttgtaaaggaaaccacataagcctttgcatcctccgccggaaaatctgctgaaaactcacccttaaaggagcctttttcgatattaatcagtggaaaatccgcatccggcgtaaaggtgtacggtgcttcctgctcctttgcataataatactccagatccccggatccgcactcctcgtctgagccaaggatcagccgcacactctttttcatcggaagccccagctcccggatcgcacgcagcgcataaagtgccgcgatcgccggtcccttgtcatctgccgtgcctctgccgtaaattcttccgtctacgaccttcggctgaaacggctctgtcacagtccagtcctccgtcaccgggacaacatcaagatgcgccagaatatccaacgccttctcctgcgtcccgaaatcgccggtcacaacgtagttgtcatagtttgtcgtctgaagcccatactgcttcatcagtccttctgccgctgcaactaccttagccgggccgtcaccaaacggctttccttccttcgcccggccacgctgactgtcgatccgtacgagcgtctttaaatcctcgatcatctcgtcctttttgctgtcgatatatgcatctattttttctctgtacatgtctgtagtccctttccaccgcttcctgtcctactttaaaaatgcctcgatctcttcctttgtcggaagtgccggaatgccgcccatcttctgtacacacagtccaccggatgcatttccgtactttaacgcctcgcggattttatctactgtgagatcatcggccgttgtcactccattcatcagaaggcttgcaaggaaaccgccccaaaacgcatcgccggctcctgtcgcatccacagcctttaccttatgaccctctacggtctcttcctgccctgcgaaaaagaactttgcaccctttgcaccgagcgtctcgatcacgacgctgatctgattctccttcatcatcgccggaatattcgcctcgccaccgacaaaatcgagctcctcgtctgaaatcttgagcagatccacatacggaagcacctcatctacgaccttctttgcgtcctcaaagctccagatcatattgcggtaattgacatcgtagctgatcagcttgccgagcttctttgccagcttcatcgcctcaaaatgagcggtgcggctcggatccgcggacattccgaaagaacctgcgtgcagcatttttgtatctgcaagcatttcctctgtgatgtctttcgcatccagcataatatctgcgcccggttttctcacaaacgtaaaggagcgctctccaccctcatacaaggtgacaaaagccagcgtcgtcactgccttatctgtcagctccgggcaaagcattttgacctgattgtcttccagtgtctttttcagaagcttaccaaaatcatcattgccaaggcggccaaggaagccggtctcaagcccgttccgtgcgatcgcaatgcaggcatttgccggcgccccgcccggattgcacacatagctc

SEQ ID NO: 2046 - DNA, 5844 bp, Unknown
  16S sequences of unknown bacteria
accttgtattatagaaaaaatggcgaaaaaagtcaaccgtcgtctgccaggtctttttgttgatttttttacggattattcatcgtttttcgggcgtttatggtatgataaaagagaagagtagggacttttttttatcacgtaacgattgaaaacaaagagacatggactgatgtgtttttaggattctgccggttggcgtgtatgcctgaaaaatagttggatgtatctgtatgatccatacaaaattcaggttttgaggcttcggtatcgaaaaaagaagaatgcacacttgtatcaaaagataatggggcagggaagacaaagagcgagatgattttttcaaagacaggagggtgcgtatggctgcttttgtaactttaaaagatgtggtaaaagaatataaaatgggtgaagtgaccatcacagctgcaggcggcgtaaattttgaaattgaaaaaggggaattctgcgtgattgtaggaccgtccggcgcgggcaaaacgacggtgctgaatattctgggtggaatggatagctgtacccggggcagcgtgttggtggatggacgggatatcagtaaactttctccaaaagacttgattcgatatcgccggctggacattggctttgtatttcagttttataatttagtgcagaatctgaccgcaaaagaaaatgtggagctggcttcacaaatttgccctgatccagtagatgcagcgcaaatgctggaagaagtaggattgggcgggcggttgaataattttccggcgcagctttctggcggtgaacaacagcgggtggcgattgcgcgggcgttagccaaacgaccaaagttgcttttatgtgatgaaccaacaggcgcgctggactatttgacgggaaaaagcattctaaaactgctgcaggatacctgccgaaaaagtggcaccacagttgtagttattacgcacaattctgccctgaccccgatggcggatcggatcattcgcatcaaaaacgcccgagtggagtctatggagaaaaatatccacatcgtaccggtggaggcgattgaatggtaacaaatcggaaatggaaaaagggaatctgcagtgccttttccaaggatgttttacgagagatattgaaaacgaaaaaccgattcctttctattttcttaattgtggccataggagtcggtttcttctcagggctgaccgcttctgggccggatatgaagctgacagccgacacttattttgacaatcaaaatctcagtgactttcgtttggtttccacgatgggctttacagatgacgatgtgcaggcgcttcgcaagacagaaggcatacaggtggcagagcctggacattgggtagatacggttttggaaacggaagtggacagcgaagtagtcaaagtcatgggatatgattttgaccaactgcatgagggcggagaaggcaagatgaatgtacctttgcttttggagggacgttttccccaatctccggatgaatgtgtggtagaagccactgaggaaatccttggtgtttcttttcaagtaggtgacacgattgcgttgacttccggaaaagctgacaccgatttggcggatacattggccggtagctgctttaccattgtcggcattgtccaaaatccgctttatatcagtattgatcgagggacctctaccatcggaagcggtaaagttaacgcatttatcatggtgccaaacgatgcttttttagaggactattataccgaaatttatctgagggcagaggatgtggaagggttgtcctcttactcgcaggagtatcggcagcagattcagtcgctgattccgtcattggaaaagctgggagaagaaagagcggttattcgtttggaagaagtccggaaagaagcgaacgaaaaaattgctgatgcgcaaaaagagctggatgaaggggttgaaatccaacaaaaagaattggcagatgcacggaaagaactggatgacgccagagaaaaactgaaagacggcgagataaaattggcggacgcgacacaggagtactatgactctattgccgatgcccaacagcagatcgcggatgcacggcagaaattaaatgatggggaaaaagagtatgcatccggcctgcgggaatatgaaaaaggagaggctgcttatgataaggcattggccgaggctctcccgcagatagaagaatcagagcaaatgttggcgcaaaaagaacaggagctgactcagggacaggcacagtatgaccaggtgcggactctggtacccgatgagagtacggtatcagccgttttgtcggatccttatgccgacccatcgggagcagcgcttctgattggtcagctttctgcgctgtcacaagcggatacgagtcaggaatgggctggagatttagctgattacctttctaatccggccgaaatcacccctcaggaaaacgcttatcatttggcagttgtccgtcaggtaaatcttgaattagacgaacaggggaaagcgttagacgacggttggctgcagctcaatgaaggaaaacaacagctggcagaaagcaaacagcagctttacagtgccggcagtcaattggatgatgccgccgcacagctaaaaaaagcccgtgccgaattggatgacggttggactcagctgactgaaaaagagcgggaattccaagatggaaaagaagagggatggcaggaaattttaaatgcgcgacaggaactttctgacgggaaacaaggacttgctgatggcgaaaaggaatatgaagagggaaaagcggaatcggatcaggagattgctgatgccaaaaaagaattagaacaggctagaaaggatctgaatgagctggaagtgccggaatggtatgttttggaccgtaccgattatccgggacactcagattttggagatgattcagatcgaatcgctgcgattgcccgtgtgtttcctgtgttctttttgcttgtggcggcgttggtctgcctgacgactatgacccgcatggtagaggaacagcgtacacagattggaactttgaaagcattgggatatcgttctggcgcaattgtatcgaagtttttggtttacgcgctggtggcgactgtaacaggcagtttggcaggattggctgtcggtatgtatctgttcccgacgattatttataacgcctatggtatcctttatacgatgattcccgcccgtaccccgtttcgagtggggattgccgttgcttctacgttggcggccgctgttacagtgttgataacagttttgttttcctgctggaaagaaatgtcggaacagcctgcttctttgatgcgtccgaaagcgccaaaggcagggaaaagggtattgctggaacggatcggatttctttggaaccggctttcctttagttataaagtgacattccgcaacctgtttcgctataaaaaacgaatgttgatgactgtggtggggattgctggatgcagcgctttgatgctcaccggatttggtatgtacgattctatccgggatattgtaggcattcagttcggagaattgtatcattatgatctgacgactgttttgcaggaagaactttctgcccagcagaaaacgcaggtagaggcgtatttgtttgaaaatgaagaagtgcgtcagtccatgtatgttcagcaagaatcgatggaggtaaaggctccaagcgggaaaagctatgatatctatctttttgtaccggaggagccggatcgactggattcttttataacgtttcgaaccaggaaaggacacaagcagttgtctttgtcgcaagaaggcgttattcttactgaaaaggcggcaatttttcttggggttgaagagggggacagcattgccataaacaccgcagaccatcattcttatacggtaccggtgagtgccataacggaacactataccaatcattatctttatatgacgccgcaagcatatgaacaggttttcggccagacaccgtcctataatatggttcagtcaattttggtagagccgggcggtgaagcacagacgttactgtcccagaatctaatcgcttcggacggtgtgttggcggtatccgatacttctacgatcaaagatcagttcaaagatatgatccacagtatgacttatgtcatgttggtgttgattgtttctgctggcgcgttggcgtttgtcgtactgtataatctgtctaatatcaatattacagaacggatgcgggagatcgccaccatcaaagtattggggttttacgaccgagaggtatctgcatatatttaccgagaaaatattttcctgacactgatgggggcattggcagggctgggcctaggtatcctgttgcaccattatgtagtaattaccgcagagacggatattgttatgttcggacgaacggtaaagtgggcaagttacttctattctgcggcgttgaccatggcgttttctttcttggtgaatttggttatgcattttaaattgcggaaaatcagcatggtggaatcgttaaaatccatcgaataactgcaataaaaaagaaaaatccttgcacttatttaccaaaggcttgttttgagtataaaagtttgggagggatttttgtgaaacgaaagattttttcggttgccgtctgcacgatttttttgctgattctttgtactggctgcggttcgatcagccttgcagacaagtccaattccacagcggcatatgtgccgactgcggcacagaatgaaaatgcgatggaagaacaggacactactgaaacagctgctcctggagaaggaggattttcatcatccaacgttatgcttcctgcgcaggcaccagcggagcggaaaattatttggacagtggatatcgaagcagagacattggagtttgacagtttcctgtctaacctggaacaggcagttcaaactttcaatggctatttggaaggttcttcggtcagcggcagttcaattcaatacacctctaaccgttatggaaccatgaccattcggattccccctgatcaactggatccttttctggaccaggtgggcaagattggtacggttacttataccaacaagtcctctgaagatgtgacgctcgattatattgatgtggaatcacgtattgaggcgctggaggttgagcaggaaaggctgttgaccttattggagtcagcacaggatctggaatcggtcatccagctggaaagtcgcttatcagaagtgcgatatcagctggaaagctatcattcagcaaaaaaccgatatgacagcctgattgattacagcacggttcatctgtcggtgcgggaggtacaacgggtgactaccgtacacgaccggtctgtgggacagcgcattgctgccggatggtcagacaccctttaccggttgaaaaatagttgtgtagatttcttcgtttggtttgtggttaatcttccgtatttgctgatttgggcagcttttgcgggtatgattatctggatttgtctgcgccagataaaaaagcaccgcaaaacaactgttttgcaaaaacaggaacatgcaggagaaagtaccagtacagagcaaacaaggggaaaataacaagtctcttttttcttttgttgtttaatatgaaaaacgcagttttgttccaacgtatttcctgtctttccatcccgtgtttatagtagaagcccgttaaatctgggaccaaagatttggaagaaaaatagaagagggccggatgcaaaaattttttgtatccggccctttgctgttgcctttaggcttaacaaaacccctggtaggaaccaggggtaaataaaaaag

SEQ ID NO: 2047 - DNA, 12973 bp, Unknown
  16S sequences of unknown bacteria
cgccgcctgtggcggaaacaggccgtagtaagcccaatgagcaagggagggccgcacatcggaggcccgaagggctggagtggcgagcacacgaagcgaagcgcagtgcgcagccacggaacaccgcaccgccgaaggcgagggcggtgcgaagatgcggaacgaccattgcgaattgaggatggcagtggcgggggagtttactcccccgtccaccagcttgtcaaaaagacttttttgacaagctgagacggttcaaagcggcgtttacgcctggcaggcggagagcagcgcgtccaacgtttccttttctgcttggcgcaagggacgcagcggcggacggcaagcgcaggagcggatcacgcccagccgcatgagcagatatttgatggcagggatttcgggaatgttccgcatctggttggcacactcgataatggcgttttgcgtttttgcggcctcggcaaaggattgcgcgcaaatttcgcgccacaagcgcgcatgcagcctcgtgaacgcggcggaaggcccggaaacccatccgtcgccgccgtacaatatgcagggaagcgccatggcgtcgctgcccaccagcacgctggcgcgccgcggtagcgcgcacgaaaggtaatctagcacctttgccgtcgtgggatagctatatttcacgcctttgagcgcgtcgtaacggcccatcagcgcgcccagcacggaaggcgacaggtcattgcccgcgcggggtgggatgttgtaggcgtatatggggaaatcgcctacgccatccaggatggaagcgtaatagcggtatatggcctcatcgtccagcgcgaaaaatacgggcgtcatcactccagcgccatccgcgccggcggaaatggcatggcgcaccagcgcttctgtttcgcgcaccgtggccgcgccgcattggatgtatacggtggcccggccgcccgcctcgtctatcacagcctgcgcaacggcttcccgttcggcctgcgagagggagaggctttctccgttggtgccgttgggatacaggcagggaatgccgccatccaccaggcggcgcgtgagcgcgcgaacgcccgctaggtctatgctgccatcttcgcacaggggagtgatttgcgcgcaaacggcgccttgcagcaatttcatgctcatcaccagcttttcttatagatattgccggaaattccggatgcgatgaaaggtttgatagttggcgtcgtggaagttgtaggagcggccaaaggccgtgcgcaccagcagcaggatgtcgtctccatcaaaaatccagtcgggatattggaagccgacgtgcttcggatcggcggtgcggtagtctaggatgcgcttgaccacgcgccaggaataaaagtcctccgaaactgccatggaaagcaccgtgcgccccggcgtgtcctcgctttgctcggtgccgatcatgatgtatttttggctcaccgggtcgcggtagagctggaatttggaattgctgcccaccgggcaatcgacgatgcggtcgagcgtgagcggcgcttcgggatcggcgttgtttcccttgagcactacggccttgccccagcgcggatggcaggaagcgaggtcgatgcgcagataattggcaatcgtgccgtccggcgcgacgacggcgttcccttcgatgcagccgggacatgggcccagcggcgcgcctggccaatcggcagaaaactgcgtgaaaggcgtaaagcgccagtcggcggcgttgagcagatccgcgtccacatcgatggagagcaggccgttcgcgtggcggtggtgccgccagcagccgtaatcgatgccggtgtataggcggccgttgtgctcgatcacgggcatgggcgctttgtgcggccccatttcgaagggcccgcaaccggtgatgatgtgcgtgggcgccgtccaggtttcgccttcatccagcgagcggccaatgagcagatcgccataatcttgcgagacagagagcagatagagcgcgccgcgatgcacgaagagtttgggccagaaactgggatagatgtccgtcacgtagcgccagttttccccgttatccgtggatttgaacaagagcgtgagcttgctgttgccatattggccggcgaacacatccattccggccaatagagcgcccgagggcagccgcacgagcgtgggcgagcaaaggctgtggcccgaaaaagcgtacacttcgtcttctgggtgcagatagtttacgatggtaccgggcgcttgcccggtgcgcaccaaccgcacagcgctttcaccgcgctggcccacgcgtgcgaggcaaaattcgtagtcctgctcatccaccaggccgtctatgcgcacggtatcgccttcaacgggtagggaaacaaagggtttttccgaacggtaaacccggtagcgcacttcgtgcgccgcatcgggcgcgccatgatcaaaccattggaaggcaaagccgccggcaaatggcgcgatccggcaaataaagggcagatcccgtttttccatttccgtcagtcgcgtaaacggctggtaattccattgtgtggcgcctttcatgcttgtgataaccacctttccgcgggaaaggcagaagaagctttcccgcaattgtcgttgcaacaaactttgccacaggcccagagggactctggcaaggggcattttaagaaaacgttttctcaaatgccggataggattccttggcgcacggtggatgcgccaatgcgcaaaacgggttctatggcgatggaaatatcgggcgctatgggttcgccagcgatggcccgctccagcagggctagcaattgcgcggcggtttcctccacgcaatcgtccaaatgcgtgaggctgggttctataatgccggggtaggcaaaagtgccggtggaaaccagcgcaaggtcttctggcacacggatgccctgggcccggcaatgttggagaatgccggcggtaatggctacgctgccggtgatcaccgcggtgggcggttgcgggagggccagcaactgcgcgatggcgttttggccaaagtcttcgctatattcgccaaagcaaaagggaaactgcgctggatcggcatcgtgcgtataggcgaattgttggacgccgatgtagcggtcgtaatttgtggccagcgccttggcgccggataccaacgctatgcgctggtgccccagcgcaaaaaggtgcgctagcgcaatgtgcatggatttttgccgatcgacataaacggagggcaatttgccctgcaaagggcggcggtcgtacaagatcacaggcgtgccgcgggcggcgatctgcgttagctgctcttcgttttggcccgtagagcataccaccagcgcggcaaccatgtgggaacacatttgcgcgagcactttttgctcggtttttgggtcttcccgggtgccggcggaaaacaccgcatatccgcgcggctgtagcgcgcgttctagcgcgctgacaatttgtggaaagtagctcacgcgcagatcggaagtggtgatgccgatggtacgcgagcgcagctgccgcagcgattgcgccacgctattgggcacatagcccagctcttccatggcggcttgcaccttttcccgtatgctcgcatccacatgcccgttggcgttgatcacgcgcgacaccgtcgcgttcgaaacgccggccagccgtgcaacatccgcaatcgttgtgcgaataacagcacctcctttgctgtgaaaacgttttctcgcgcataggataccacatccagcgccgtttgtcaaggaattggagggctttatgccaaatacataacagcgcgcaaaccccagccgaccttgcggacggatgggatttgcgcgcgaatggctatagggaaattacaaaatggtggtctcgatcaacaggccgtgaggataacggccagaattgcggccatacagcgcaaggccgccttcgccccgcacgcgcagggtgagggtaaacttgccggcgctttggatgccgggcaacaaccggctgggcacggcgatgcgcttttgttcgccgaaggaacccgcttcgtccagcttgcgggggtttggctggcggtgccaggaaagcatgccgcgggcgtcggcccagtcgttttccaggaacagcgtctgcacggcctcgccgttgatcagcacgtctacggtagaaggcaggcgggattcgtccgtcatccaatacgaattttcaaacgcgccgcggtcgacccggtagccgcgcataaagcccagatcggcttctgccgcgccgatgtccttgcggtccttgctcaacacgcgcttggaactggcttccagataaatcgtgagatcgcgcagcgcggacgcttgcgcgggcagggtgatttcgtaagaaacttcgccttcgccgcccatgcacagcttatcgtccatcaaggcgttccacacgagcgcaaagccctgggtctttccctggcaaacggggatttccaccatggtttccggcagcgtggcctgcacgtcgaaggtcgtgaaattgcgcatgatcacgttcccggcgctgtccttcaaatacaggctcagcaccgcggcggcgttttcttggggcatagtcacggtgagggcgggaaggctcgtcgtgccccagccaaattcgggcagggcaaacgcgccctggccgtcgcaaacgcggccctgcaacccgtcgtgccacaattcccattccacgctgcacgtttcgccatggtgggcgtcggaaaagctggaaagcaccagcggtacggccaccgccgcgccgggcgcgacggtttgcatcggcgggcaatccacggccagaaaatcggcggcgtgcaaatcgcacaggctcatgccgcggcaaaaatcttgatagccaaagtccttatcggtgttatcgatgcggtaatatccgttgaattcgttcaccacatcgtggaattctgtgaacacaaagccgcacagcttttcgtgcaggcggtattcgttgagcatgtaatggtattgccaggcgaggtcgctgtcgccggcggaaccatccacgccccacaccatgccgcattcgctgttcatcagcggcgcgtccgtttgccggttttcgccgatgaaattgaacgaggaacccggatacgtttcctccaccactttgcggatgtggtcgcgcacgatctcatagccgttgagatagaagtgccaggtgttcaggtcggtttccacgtgatcgtagcggcagggcgaattgtcttccacaatgcgatggggatccagcgctttcgccttgtggtaaatggagcgcacccactcttgggtttcgggcagatacactttgtcatcgcgcttgccgtgcaaaaggccccagctctcgttgaacaccacccaggcgaaggttgcgggatggttgatgtcgcgggcgatgatttcgggcaattcggcctcgtaggcggcgcgcgcctccgcgatgggttcgccccagaagcaggggatgtcctccatcaccaaaatgccgagcttgtccatccaatagagctttctgggctcttccggcttgatgtggatgcgcaccatgttcaggccgagccgcttgagccgccaggcctcgtcatacatatcctggtcggaaggataggtgaaatgcccgcgcggatggaaggcctgatcgagcgtgccgttgagatagatgggtttgccgttgagcaaaatccacttgtagccgcggccatcgacgttgcccgcgcggatttcccggatgccaaagtaggtgaagacctcatcgtcccccagttttaggctgccttcgtacaaatagggggaatcgggcgaccacaggcgcggattttccatggtaagggatagcttcgccgcgccttgccgcacggcgcttctccagcattgcccgccaaaacaggcgcagatttcgctgccatcggcggcgtcagcctgcacggtgatctccacttcgccgttgatgcgggtcacaacctgccaatcctgaatgtaggcctggggccggtcttccagccaaaccgtctgccaaatgccctggatctcgccgtacccttgcttgccatacagttgcgtttcccggcggtaatcttccgcgcgcacctcaatgatgttttcgccttcgcgccacagagcggtgatttccatctcaaaataggagtagccgccctggtgggatccggcatgcgtcccgttgatatagacgtccgccttgtaatcgaccgcgccaaagcacaggaacaggcggtttttcttctggtaggagaccgcgcggcggtaccagccgatgccggcgacgtcttcttccacgccggaaagcgggcatacccaggaaaagggcacggcaatcgcgcggtcgtatgcgctgcggttggcggcaaacgacttttctgcttcctccgcgccggcggggaataggcggaaatcccattgtccattcagattgagccaattttcgcgccgcttttccgggcggggaaattcgggtttgggaattgcgtgcatggggtgaaactcctccttagttggccgctggccgtgcaaagcgcgccggagcggccctgaattcagctttatgcgtcaccattttaccattggcgcggcagaaacgcaagcgtttatttgcccaggaacggcggaagttcgctggatctttcggcgcaaggaacgaaaaatacgttgacttgcggcatacatttttttacaataaagggacactgcgcttttgtgcaaaaatgggggtggaaattccatgaaacatttgatcattgcgctcaaaggcctgtttgtgggcggcaccatgctggttccgggcgtgagcggcggttcgatggccatgattttgggcatctatcatgaactaatcgcttcgatcagttcgtttttgaagcataagaaagagagccttttgttcctgggcgtgttcgtggttggcgcgctggtgggtatggcgctgttcgccaggccgctggaggcgctgatcgagcgctttcccatgccgactttgtattttttcatcggcgcggtcgtgggcggcgtgccgctgatggtcaaggaatcgggcatcacttcgttttcgctgaagcgcgcggattcctggaaggatatcggttttgcgctggtggggctggtgattgtagcggcgtttgaattcatccccgccgaaagttggggcgcgggcgcgctcacgggcaacgcaccgttctatctgctgctcatcgccgggttggtggcttcggtggcgttggtgctgccgggtatcagcgtgtcctacattttgctggtgatggggctgtatgaggaactgacgcgctcgctcaccgatttcaattttgccttcctcgcaccgctggcgcttgggctggtggccggcattttgctcaccacgcgcatcctggagcgcgctatggacaaccatccgcgcgctacttacatgattatcctgggctttgtgctcggttcgctttttgaagtgttcccgggcgtgcctcagggatgggaattgttgatttcgctggttacgttcgcgctcggctttgcggccgtgtatgcgctctcttggcaggagacgcacgcgaagcaggcataaaaaatcccgcgctttttgttgacaggcaaagggcgcgggtgtataatattccaaaatagaaacgtttcaaaaataatggaaaaggggggtgagtatgccaaccatcaaggatgtggcgcgggaagcgggcgtgtccgtgggcacggtgtcgcgctatctgaatggcgcggtgctcaaggaacagaaccaacgcaagatcgacgcggcggtcgcgcgcctgggctaccggcgcaacgcgctggcccgctccatgaaaaccgggcgcagcatgctggtgggcgtgatcgtgcccgcgctttctaacatgttcagcatgcgcgtgatcgagggcgtggagcacgcgctggaagcacacggattcagcgtgctggtggcggatagcgggggagacgcggcccgggagcgggaaaaggtcgcgctgctgcgcgagcgcatggcggacgggttggtgctgatgccttgcggagaaaacgcgcgcgccattttgcgggcggcgggcaagatgcccgtggcgctcatcgaccgggaaatggatgaacggtgctttgacagcgtgctcgttgaaaacgaggcgggcgcgtaccgaatggtgcgcgcggccattgcgggcggcgctcaccggctgggcatgatcgccgggccggaaacggtgcagacggcgcgggagcgccgggcgggctttttgcgggcgctcgcggaatctggccttgcccccgctgccattgtgcctggcgattacacggtggaagggggcaacgcgggcatgcgcgcgctgctcgacgcgggtgtggacgcggtgttcgccgccaaccacgaactgacggtgggggcgttgagcctccgagatccgcgcgcggcgaacgtgcgcgtattgggctttgacgggatggaactgggcgatttgtgcggcgagcggctcacttcgctcaaccagcccatggaagagatgggccgcgcggcagccgggctgctccttgcgcgcatcgagcggccggatgcgcccatccaatccctgcggctgccgctgtgaggaggaatgcgaatgaaggttcccatgaaaacgttgtataccggcgcgcagattcccggcatcgggctgggcacgtttggttcggatcatgtggacgcgaaaaccgtggccagcgtggcgcgcgaggccctgaagatgggctaccggtatctggactgcgccgcctgctatggcaacgaggcggaaatcggggaagcgattgcggattgcgcggtgccgcgcggggagctctttgtgctcagcaagctgtggaacgatatgcacagccgcgtgcgggaggcctgcgaaaaaacgctgcgcgatttgcgcctggagtatctggattgctacctggtgcactggccctttcccaattatcatccgccgggctgcgatgggaacgcgcgcaacccggattcccggccctacatccacgaggaattcctgcgcacctggcgcgccatggaagatttggtggaccgggggctggtgcggcacatcggcgtttcgaatatgacgattcccaagcttaagctgctcctgcgcgacgcgcgcgtccacccggcggtgcatgaaatggagctgcatccctgtttccagcagggggaactgtttcaattctgcctggacaacgatattctgcccatcggctattgccccatcggttcgcccgcgcggcccgagcgcgaccgcacggaagaggattttgccgatacgcaaatgcccgtggtgcgggaaatcgcccgggcgcacggcgtgcatccggcggtgatctgcgtaaagtgggcggcgcagcgcgggcaggtgcccatcccgtttacgagcaagccggaaaacgccctagccaacctgcgcgccgtgtgcgaggatccgctcacggacgaggagatgaacgccatgcgctcggtggagcgcaacagccgcctgatcaaggggcaggtatttttgtgggaaggagccgcctcatggctcgatttgtgggatataggaggaaagattcatggctgaaacgatgatgggggcaattttgcccggcaacagcacggtggaactgcgcgaatttcccattccaacgcccggacacggccaggtgctggtgaagacgatggcttccaccatttgcggcagcgatatccgctgcatttatcgcgagcacaccggtaagggcgcggaggggtacatccccggcaccatcgccgggcacgaaccctgcgggcagatcgtggccgagggcccgggcctcaagcgcttcaaaaagggcgaccgcgtgatcgtgtatcacatttccggctgtggcgtgtgccacgattgccgcatgggctaccagatttcctgcaccagcgagcaccgcgcggcctatggctggcagcgcgatggcggcatggcgccctacatcctggcggatgaaaaggatttggtgtttttgcccgagccgctcacttacgcggacggggcgcaggtggcctgcgggtttggcacggtctacgaagctttggagaaaatcggctgttcgggaaatgacgcggtgctggtggtcggcctggggccggtgggcctggcggcgctgatgctcgccaaggctatgggcgcgaatctgctgctgggcgtggacgtgaaccccgagcgcatcgaactggcgaagaagctgggcctggtggacgacgcgttcgctccggacggcgcgctggaaaaggtgcgcgcgcgcacgggcggccacggcatggaaaaggcgctcgacgccagcgccagcgaaccgggccgcgcgctcgccatccgcgccacgcgcgaatggggcaagatcgcctttgtgggcgagggaggcacggcgaagtttgaaccctcgccggatatcattcacgggcaaaagacgatttatggcagttgggtcaccagcctgtggcgcatggaagatctggtggagcggctcgtgcgctggaacatccacccggatcagctcatcacccaccgtttcgcgctggaggacgcgggcgaggcgtacgcgctgatggccagcggccactgcggcaaggtggccgtggtgtttgacggcacggaggacaaaaagcatgtttgaagccagttttgattcgctgctccagtatcagtgcccggattggttccgcgacgcaaagttcggcatctggagccattggggcccgcagagcgtgcccatgtttggcgactggtacgcccgcaatatgtatatccaggatacggagcagtatctgtatcacctgcggcactatggacatccctcaaaattcggctataaggacatttgcgcgctctggaaggcggaaaacttcgatcccgacggtttgatggcgctgtatcacaaggcgggcgcgcgctatttcgtggcccaggccatgcaccacgaccactttttcaactatccttccaagatcaaccgcatgaacgccatgcaggtgggcccgaagaaggacatttgcggcctgtggaaacaggcggcgaaaaaatacggcatgccgttcggccttacggagcatttgggcgcgtccttctcctggtggcgcgtgaacaagatgagcgacagccacggtccctacgcgggcgtgccctacgatggcaacgaccccgcgtggcgcgatttctatttcgacaattaccagcacgtggatggcaccacgcaggccagtccctggtacacggaaaacgaggaattccgcgcctattggttgcgcgtgatgaaggagattatcgacctgtatcagcccgaattgctctatacggacggcgcgctgccctttggcgagcacactggcaacccggattacagcaagggcctggaagccgtggcctatttgtacaacacatccatccgcgccaacggcgaaaaccgcgcggtgtacacgcaaaaggagcgcaggccggaaatctaccgcgtgggcgtgctggatgtcgaaaagagccagcttcccggcatcgcggccgacccgtggcagacggacacctgcattggcaattggttctatgatgcgcgcgcgccgttcaagcggccggaacacatcgtggaaatgctggtggatatcgtttccaagaacggcaccatgctgctcaacgtactccagcggcccgacggcgccatcgacgacgaggcgcgcttcatcctggcatccctggcggactggtttgccgcctgctcggaaggcatctatggcacgcgcccttatcgcgtgtccggcgaaggcccaacacaggtggtgatcaaaggcttcacggaggaaaagaccgcctggacgccctacgacatccgctatacccaaaaggggaacacagtctacgcgttccttctggggcagcggggtggcggcgcggcgatattgcgcagcgtggcggaaaccgtgcgcaatgtgcggctgctgggctatggaaatgtggagttcgcgcagaacttcggcgtgctcaccgccaagttgccggagaatctgcccgcaaagtgcgccaactgcctggccatcgaggtggaataaggcaactttgtaaaaatcctggccgccccagcgcgttttgcgccagggcggctgttatatggtataatgcggggtaggcgtcacattgatttgctgtggagggatataccatgcgcgaagaagaaaagctcttgtcgggaattctgttttcgcccggcatgccggaactgcgcgccatcaagcggatagcgcacaacttgaacaacgattataacgcgacgtatgaggacgaaaccgaaaagcgcgcggaaattttggaacaactgctcggcgagatgggcgagggcacttttatgcaaggcccgatctatttccactatggcaagcacacgaagattggcaagcgcgtgttcatcaatttcaattttaccgtacaagatgacgcgctggtgaccatcggcgacgattgcaatttcggcccgaacgtcaccatcgtcacgcctgtacaccccatgttgccggatgagcgccgcttcatccgcgataaggacggcgtgccgcgtcacatgtgctatgccaggccggtgaacattggcaaggattgttggtttggcgcgaatgtcgtggtttgcccaggcgtcaacatcggggacaattgcgtgatcggcgcgggcagcgtggtcacgcgcgatattccggccaattcgttcgcggcaggcaacccctgtcgggtaattcgcgaactcaccgaggcggatagcatggcgcataaacccgcaatcctggcggacaaccagattattccggcggacgagcaaatttgagcccctggtggcgggggagcaagcttccccgccactgccacccctaccagtttccgctaaaatcctgcggattttcgggcgcggaaactgcaaggaagcga

SEQ ID NO: 2048 - DNA, 3940 bp, Unknown
  16S sequences of unknown bacteria
agtcccagagatgtattgtttttcttatcgcgcagcagcgcagcgatgtaaagggatttactgacgagatgaggaaacggatgatgactgtccacgatttgaggagacagcacaggctgtatctgtgtcttaaaatagcgggcgatatactttttttcgctctccgtcagcgatttttcactgaggtcgcagattcccatattttccagtttctcggagacgagccgatacaaaaggtccttcttttcaataagccccggcaccatccggtagattttttccaattgctgcgccggcgtcattcccgtcttattatcgatctgctccggggaaatcagcgagagatcaaagagacttccgactctcaccataaagaattcgtccagattgctggaaaaaatcgagataaatttcaggcgttccagaagaggaaccgtttcatcggccgcttcttccaaaacccgattgttaaaacgaagccagctgagctctctgttttgtgtgtaaaggtatttttctactttgtctgccggttctgctgaattttttgacacagatatccctccctcacgctgtaatcgctgatcgtaatctccgatgcgtgaaaccgattcgtgatataccgcagaatcatcattcccggaatcagcgtatgaatccgctccggaacggatttcaaaatgagatcacagctttccttatccgctttaaagataagatcgcacagctcgttcagctgacgggtgcggatgtggttctgcccttcttcgagagaaaatactctgcgggccagtttcagcacagctctcgaagttcctccgatacagacgatccgtccgccgtcaggactgcaggaaaacacctgatcgccgatttcttccccgattcgcttttccatgcggcgaagcgcccctctgccgggcacgatacctttgacacattcccggtacaatttcagcgaaccgatgggaaagctgaatgccttctgcatttttcccccgcagaacacggaaatttccgtgctggcgcctccgatatccacaaagacgccttccttcagaggaacatccgtcgcagcgccgataaatccgtacatcgcttcctcttctcctgagacaacttcgataggaaatccggccgcctttctgatcttttccacagcttccccggtattggaaatgtttcgcagggacgccgtggcaaagacatagacatcccggatctccagtacgtccagccgatgccggaactccatcagagcgctgcaggcagagtcgatgccttcctgcgtcagttttcccttctccacatatccggccagagccgtcataatcttttctttaaagagaattttaaacgaatccttctgtgcatcgtatactgtcagacgcatagaattagaaccgatatcgattaccgcacatttcataagcctgcctttccttcctgaacccggacaacacgacgactgcgccgctcttttctccggcggcgcggtctctttcacagcgccgctcctttgggcttttcccgtaaagagactgcggctttcgcatcatcccggaaacggaccccgctggtctgcggaaatgaggaatatcggcactatgctatattttacatatacaatgttaattcttctaccctatagatattagcattttgtaaaagacaggagaaagaccggccgccgtcttcttgcgacgcaatgcggcggaatcagacaaaaagagctgactgtgttatattttcatccgccgcaggatgtgggccccttccactttcagggaatgaagcattccgtcgccggccggtctaaatgttccgctttcaaaatatcatgaccggcatccgtctgactccctcttaggaatattcttcgataggagaactgcttttatacttttcaaaaaaataagatattgttctgtacgggagctcccgcccgccgcggcggaacagaatatgtgccgggacacctgctcctgtgttttgccggagatccccttcctctccgccgggccagaaaaaacgcctcccgcagacaaagggaggcgtcggcatgatatttatacggggaaatctcttttccggaaaatcatctgtttctgaacgatccagctgagcagaaacaacacaccttctgtcagcaatttggcaggatatacagacatgtgaaagctctgcacaaacgtcgtcaggatggcgttatttactatcagcagaaatcccgccaaagcaaaataatgcgcagccgtgcggaaacgtctgtgcgtgtgaaatacaaaacggcagttcatgctgtaattataaaacgcactgataaaccgtgcggccacatttgccaaaactaccgaaatccccgtgcggggtacaaagaacagaaatgcggaaaacagcagataatccagcacaaaactggaaagagaggacagcgaaaacttaaaaagtcctctgtagatcctcacagaatcccgaacggttcgaaaatgtgaggtggaattttttctatctctgtaaatcgtatcgacgcaaacctcttcgatgggaacaccgtctttggcaagagacatcagcatgttcatctcatattcatagcgctctcctcctaccgccagaatcttttccagcagttcccggcgaaacgctctcaatccgctctgcgtatccgaaattttcaccccgctgagaagacggaaaacagttctcgtaatccggttccccagtctggaccggagaggcattcggctccctaccgcccgtacgcccagcattagagtattttttcgttcgaaggcccattttatcagcctcatcatatcttcaggaagatgctgtccgtccgcatccatgattccgatcacatcgcagtccggaaggttctcccggatatacgacagcgcggtcttgatcgccgcgccttttcctctgttttccgagtgacgcaggaccgtgcagagctccccgatttcgctgaatatactccggtacgcttcaccgctcccgtcgtcaaccacgacgatccggcagccgtacagccagagtctgccggcgagctgcgccagcgtctcgtccggccgataagccggaataatcacaactgacatcatatctgcctcctcatatgaatgttcttttctctcagctcatatacttttttcaccatccggtaactcatatatccggataacagtccgacggcaatgccgcccagaatatccgtaggataatgaacgtacagatacagcctggaaaaagcgataaacaccgccagcacaagtgcggatttccataatcttctctctccggacaaataaagcgccgctaccgccgcaaaagaagccgccgtatgtcccgacggaaaagagaaatcccccggtctcggaatcagaagctgcactgcggtattgacatcacagggacgtatccggcagaacagatgttttaaaacaccgttgcacaagacgagatccacacataatgcggcggccagaatgatcccgctttttcgggtttttggaatcaaaaacagcaggacagtcagcaaaatccaaagtattccgccgtctcccagccgcgtgacaaaacacatggccgcatctgccgccggcgtgtgcaggttctgtatccagtttaaaataccgatttcaactcccatacttttcctctctttctctgagcatctgcatcccgacgacaagtcccgctcccgcaaggcaggcggcgacactgaaatttcccaaactcagcgccgcctggggaacctgcagggtggtcggtcccaggacgatggcgtaaaaagagccgagcatcataccgagaatggcatataccgactgaggacgaaatctctcaaggcagactttaattcccctgaccacggtggccgcccccgtcagaacgccgcagccgaagaacatcaaacacgggacataagaaa

SEQ ID NO: 2049 - DNA, 3127 bp, Unknown
  16S sequences of unknown bacteria
atgcggttctgggcaactttgatgacgcccagaccggtgtgaagcgcattttttccgatgaggcgatccgtgcgcagctgctggagcggggctatttcctctcttcggccaactcgatcaactggggccgcgtgttgccgcaggtggtctactatgtgtctgtttgttgcgaccttgtccgggatggaaagctcaaagaaggggagaaggtcaatctctgtgttcccacaggcaattttggtaatattctgtcagcatactatgccaagtgcatgggcgcgcccatcggcaggctgatctgtgcgtccaaccggaatgatgtgctgacggaattcctgcgcaccggtgtgtatgatcgcaaccgcccgttttataccactatgtcgccgtctatggacatcctgatttccagcaaccttgaacgcctgctttatgcgctctctgacggcaatgacgctgaggtgcgcagttatatgaaacagctgaacgctgagggccggtatcaggtcagcgatactgtgcttgcaaaagtgcgcaagctgttctgggccggctcctgcggcgaggaggatacgatggacacgattcgccgttattacacacagcgaaattatctgatggatacccacaccgctgtggcggctcatgtgctggagcaataccgcgccgaaagcggtgacggcgggccggctgtaatagtttccactgccagtccctataaattctgcagccccgtgctgcgcgccatcggcgctgtgccggcaggcgacggagtggagctgattgcgcagctgcagggggccaccggtgtgaaagcgccctggcgcctggcggagttgggcggcaaagcggtgcgttttaccgagagcacggagaagcatgccatggagcaggtcgtgctggattatctgaactgagaaagctctggaggaacggcatgggattatatgcaatcggtgatcttcatctgtcgctgtcggtgaacaaaccgatggatattttcggcgaagtttggaaagaccataccgaaaagctccgtgcaagtttttcgcaactgcgggatgatgataccattgtgctgtgcggggacacgtcctggggaatttcgttggaggaggcgctggaggattttcgctttttggaccgattgcccggccggaagatcctactcaaaggaaaccacgattactggtgggagacagcggcaaaaatgaacgccttttttgcagagcatgaaatccatacgctccagttgctgcacaacaactgcttttactatgggaattatgccctgtgtggtacccgtggctggttcagcgatgaggaaacgccggatatggcgcataaccgcaaagtgctcaatcgggaggcaatgcggttggaaacatcaatgaaagcagccgggggcaggcagatcctgtgcttcctgcattatccgcctttgtaccagggttatgcctgtccggagatcttggagcttttggagcgttatcctgtgaaagcgtgttattacgggcatcttcacgggccaagccacaagcgggctatcgagggaatgcacgcgggtgttgatttttccctgatcgcagcggattatctgcgtttccaattgaaaaaaatctgtgaataaacagaaaaaagagtagctttttcatactgtttctgttaaaattatagactgcgtgtgatataaactgcacacggaacggaggataaacaaaatgaatttgaaaaatgtcgaaaagcatgaaaaaaatatggtcaccgtgaccgttgaggttggcaaggacgaatttgtgcccgctattgagaaagcatacaaaaagcaggtcaagcagatgaagattcccggtttccgtcctggccatgcgccccgcaaagtcattgagggaatgtatggcgtggagatcttttttgacgaagcgatgaattttgcgttccccgaagcatatcaggccgcgttggaggaagccaagctggagccagtggagcatcctcaggtcgaagtgaccgaggtcagtgccgatggtttcacgttcaaggctacctttgccaactacccagaggttaaactgggcgagtataagggcctgagtgcggagaagccctctgttgaggtcagcgacgaggatgtggagaaaaagctgcagcagatgcgtgagcgtaatgcccgtttggtgagcgtggagcgcgaggcacagaatggcgacacggctgtgatcgattttgaaggtaagaaagacggtgtgcctttcgacggcggcaagggtgagagctatcctctggaactgggttcgggttcgtttattcccggctttgaagagcagatcgtcggtatgaaagcgggcgaggaaaaggatatcgatgtgacgttcccggaagattaccaagccgaggaactggctggtcagccggttgtgttctccatcaagctccacgaagtgaaggccaaagacatgccggaactggatgatgaatttgccaaggatgtgtcggagtttgatactctggaggaactgaaagctgacttgcgcaaaaaggaagaggagagccgtgaggcgtctgccaagcaggcttttgaaaacaatgtgatggaactggtggccgagaatatggaatgcgacattcccgaggccatggtggaaaatcaggcccgccgcgtggtggatgattataagatgcaggtgcagtcccagggtatgcgttttgccgattatctgcagatgaccggcgtgaaggaagccgacctgctggattcggccaaggagcctgcgctgcgccagctgcgcggcagtttggcattggaggccattatcaaggccgaggggattgaagccacggaagaagaggtggatgctgaaatgcagaaaatggcggatcagtacggcctttccttggaggatgtgaaaaagtatctgcgttcggccgatgtggaagagcagatcaagcgcgagaaggcgctcaagctcgtggtggacagcgccagcgtgaaagttgcagaataaaggtgcagaggtctgttgagtgaaaactgacaattctggcaatacttaacggtagctattgggacaggaggctgttattatgagtttaattccttatgttgttgagcagaccagccgcggcg

SEQ ID NO: 2050 - DNA, 3179 bp, Unknown
  16S sequences of unknown bacteria
ggggtatcagtggccgttcgatgtgcggaaggtggcggggggaagctccatcatcgacgttctggtctatctggaacgctgcaaggggcggcgggtgtatctggattaccgccggaaccccgtgggcggcgcgttttcttatgatgaactggagccggaggcgcgcgattatctgacccgggcgggtgcgtgcttcggcacgcccgtcgagcgtcttggccacatgaacgctccggccgtggaattttaccgggacaaaggcgtggaccttgcccgtgagcctcttgagatctcgctgtgcgcgcagcacaataacggcggcctcgccatcgactgctggtggcagacgaatgtagcagggctttttgccgtgggcgaagcgagtgccagccatggcgtgtaccggcccggaggcacggcgctgaacgcgggccaggtgggaagcacccgcgcagcgcagtatattgctgcaaagcgcggcggcgcgccggaagagggattcgagcaggcagcggcacaggcgctggagcagatgggcgcgctggcgcgccgcgccctgcagccgcagggcaatgtgcgtgcattatgggcacaggcggcccggcgcatgagcgaatgcggcgcggccattcgtgacggcggggcgattgccgtttatctggcggaggtgaaggctcagcttgcctcctttgagcggaacgtcacggcctcggaggccgcagagctgcgctgggtctaccgtctgcgcgatatgctcatcagccagtatgcctatctggcggctatgctggattatatgcagcagggaggaaaaagccggggcagcgccctgtatacagaccctgcgggcaaaaagccttatgcacagctgcctgacgcctttacctttgtgctggatgacggaagccggggcggccgggtgcaggagatgctgtaccgggacggtgcatgtgtgtttgaatggcgtcccgtccgccccattccgaaggatgatgatttctttgaaaatgtttggcgcgaataccgtgagacagggaacgtaggctgaacggctccattcggtggagcaaaaaatgctttgaaattccgggcggcgtcagcaggaagaaaaaggccatggccgtctgcatgggcgcaaacccgcagggcctcgaatacggccagcattacaggagggccgggaataggccgttggatgacggaaaatactgcttgatattgcaaaaacagcggccggagcattttgctccggccgctgttttaattggaataacggtacatgttttgcccgccgcattgaaaacaaattggcttaggctaaagaaagcgctgctgcaaactatataagctgcgacaggaacagttcgttcagctcttcccagccgatttcccgctcattgggaagacgcgcgattttttgttcgatttctgctatgctggaactgagatattcgttgagcgtcctgatctgcggaatcatcctgatttcaggggaattcaccttgagttcgagcagacgctcgacttccggtttcaattccggtgcaagcccgctctccatcagttcggaaaacagcatgggcggcggggagcctttgtcaaggatccaccggcaggcgaggaccgggcgcaggacataaaaatatttctttgcctttatcatatcgcctttgatgtattcgcggtagttgccggccgccatatggatatagtgatacagccctctcttcgaagaaaaatatcgccccataacagatttaaaccgtgccgcaaaatctgtttctaaatatacaatgggggaggcaccccattcaaacagcgttgggttggacttatgcagaagccgcagcgtcttggtgaggtcccacccgttgatatccagcgcgtcgttgatcggcaattcgatcacatcacggtgtttttgaagccgcaaatacgcatctttcgggcggacgtagatgaaccgtacatcatagtcgctgtccggagaggcaaagccccatgcccggctgccggattcgaccgccagcaagatccgcacattttgtgtttgttcaatttgagccagttctttttgtattgtatctttcatccggtgctcctcctttcggcgtgtgtgtcacgcatccatttgctgcttggcggataaaaaagcctttttgtccctatggctgtgctcatcacgggattttgcccggcacatggggcaggaacagtggatttttcctttggcgagacggccgtatgcaccccgcgtccaggcatatacatactcctctccgccaagcctgcgcaggatccccagctttctttcaatggcccggtttctctgccgccggtaataagcccgtgttcttttcaattaaatcactccccgacagttcgggcagcctgtaagaaccgtcagggcaccgctttcttacaggctgcctgtctttacagggaaagtcaaacaaacaggtgttttcatcattctgccgccttaaagttataaacaggtttgacacgctctgcgatttgcgccgtgggttcgatctgcgcgatgatttcctccatgctcttataggccataggggattcatccaacgtatccggaacaacacaggtggagtaaatgcccttcatttccttccggtactgttccatggaaagcgtggaaaacgccgctctccggctcatgagccgcccggccccatgaggggcggagcagttccactccgggtttccttttccgatacagataaggctgccgtcccgcatattgatgggaatgagcagcttttcgcccttcttggcagaaaccgagcctttgcgcaggaccatcgcgtccgtgtcgatatagttgtgaatggtcgtgaattcgtctgcttttgtaaagcccataccggaaaggatcacatccatcatcgctttgcggttcaacacagcgaagcgctgcacaatgcgcatatcatggatataatcctcgaaaagcttgccctccacataggccaggtctttcggtatgctgattttatgctcttttttgagggcggttactgcgggctggatctcctgaaagcgtccctccgacttgagcgtttcgatgagctgcccgatctggtagcgtgcgccgccccacaatgccattcggccctgttcctgatagtaatcggcgacctcaacgcccagatggcggc

SEQ ID NO: 2051 - DNA, 9116 bp, Unknown
  16S sequences of unknown bacteria
ctttatccccggcctttacatcctttaccgtactttcatacagcttgttgtacttttggttgcgcaaaaggtcttctttatagctggctgcattttccgtggcataataggtacggaaaaattcgtctacatcctcatcgatattgccttcatagctttccggcgataccgaattataacccagctgcgtttttacctggtctatcgcatcagcataggtctcttctacttctgcgatctcttcctccgtcaacggcatatcccggtcgcaaattgccgctgctacacgcagctccatccagctttgggccaaggttaccccctgctcgtccatatattctctcaactggctgtccagcccttcatcccaaagatcatcttccatgccataggcggatagataggattgcatctggctgtatagttgttcctttgtcagcgtctcatcgcctaccttggcaacgatctgcgccttatctttatcgcggttgaccgatacgcagcccgtcagcagcccaacgcacatcgtcattgccaacaccgcagctgcccatttctttttcatcggtgtccatcctctcttgtacaaagctcggttatcaaacatatttttgttattataccgcactcgctgcccggtttcaatctcagcttgcctgggtcagatccttgaaaaatgccatcgtctgctctgtcatttcctccgcagaggccttaggcagcttcaacagcagccccggcgtttccccttttgtaaagtgtgcaccttgcccaaaccgttccgccgcctgcatgatctggagcgggtccacctccgcctgcaaggcaaatttcatgcgtgcttggccctgtcgcacagtcacacttgctacgccggcctcatgtgccagcgcacgcagcagcgaaatctcaatcagttggcgcgttgcctccggcaccgggccaaaacgatcctgcaattccttttccaagtcctccgcgtcatgcacgcccgtgatattggcgatcttgcggtacacctgcaccttttgctctttagagcccacatatttctccggcagataagcagccagcggtgcatctaccgtggtttcaaacgtcggtgccggcgtctcaccccttgcctgttttacagcgtccgccagcagcttgcagtatgtatcgtatcccacgtttgccatatgcccgtgctgctccggccccaaaaggttgcctgcgcccctgatctctaaatcgcgcatggcaatgcggaagccgctgccaagatctgtaaactccttgatggcatccagccgcttttgtgctgtttcgttgatctgcttattggcctcatacaatagataacaatacgccgtccttgtgcttcgcccaacgcgcccccttagctggtacagctgggaaagccccaggtggtccgcatcaagcacgatcatggtattggcagagggtatgtccacgccgttttccacgatggtagaacaaaccagcacgtccgcttctctttcataaaattgcagcatcgcactttccagctggttctccgtcatctgcccatgcgccatggtaaaacgcgcctccggcacgagctggcgcagctcatgcaccagccattccattctctgcaccttattgtataggatgtatacctgcccatcgcgggcaagctcccgatggattgcctcgcggatcagccccgcatcatacggcgatacatacgtatttaccggaatcctttgctccggcggcgtatggattaccgacatatcccggatccctaccaacgacatctccatcgtgcgtggaataggcgtagccgtcatcgtcaaaacgtctacgctgcgcttcatatccttgatggtctccttgtgtcctacgccgaaccgttgttcctcatccaccaccagaagccccagatcatgcggttttacatccttggccagcaaacggtgcgtgccgataagcacatcgatgccgccgtcggcaaactcctgtaagatcaacttttgctctttggcggtcttaaaccggctcaatacctgtacacgaatgggatagccctcaaaccgggccgccatcgtcgcataatgctgctgggccaaaatggtagtcggcaccagcaccatggcctgcttggcgtccatcacgcatttaaagatggcgcgcatcgccacctccgtcttgccatatccaacgtcgccgcacagtagccgatccatgatcttattggattccatatcccgcttaatttcttctacgctttgcagctgtccctctgtttcttcaaaggggaaagcctgctcaaactctgcctgccaggctgtgtcctctgaaaacgcatagcctgtcatcgcctgccgggccgcatagatcgaaaccagatcctgcgccagctttttcactgagctggaaaccttctttttcgccttttcccactcggcgccgcccatcttatttaccttgggcgtatcgtcattgccgatgtatttttgcaggcgatccgcctgatcggccgggatatagagcttatccccgccgcggtattccatcagcataaaatccttgggttttccctctaccgtgatggtggtcagtcccttgtatacaccgatgccatgcacatcatgtacggcataatcccctactttcaagtcaacagccggcattgctgtctgcaaagagctcttctgcttggcagacgtacgcgcaccttgggtacggaaaatctcatgttcggaaaacacgagataattttcctctcccatttcaaacccgctgcccagcggcgccactgttaaaacggtgtgccccttttgcggcgggtttttcatcccgctgtccaccacgcaggaaacgcctctgtccagcagcgactgatagagcgtctggcatcgtttttcattttgtagggccagcaccgtgcggtatccatgtttgtttcgtagggtcagttcatcggccagcagatcaaacctaccgtgtagtgcctgggccgggcgtatttgaaaaatatggctgtctccggtctgctgaactgccgagcaggacagcgtaaatacgtctggtggggctgtcaaatgcacatagggcgccagctggttttcccagcccagcggtgccatgcccttttctttaagctctactaccgtagattgaatctctaaatctgaagaatgggccgcatccgataagcgaatcggttcatccaaaagcagcacgctgccggcaggcagataatccaccgccgtatacgctggcaaaaacagcgacaacacctcatagctctgcgtataatcgccttgggcaatgccatcatgtagctggcgcaaccgttcgctttgctcattttgcgcagaaagcggaatgtttttcaggatcttatccatttccagcagtgccttttgcgcctgtttatgcgtcagcggcgtttccacagctggtgatagcgcaaactgctgtagttcctcttggctgcgctgggatagtacgtccagctttctgatttggtcgatctcatcgccaaaaaagtccacgcgcaccgcactgccatcagcaccaaaaatatccacaatgccgcctcgcacggcaaactcgcccgtctcctgtaccgtttcattgcgctggtagcctgccagcgccagcttttccatcaccttattgatctcaatgcgctgtcctttttgcagggtaaacacatgcgtttggaaatcctccggcggggccaaacgagcccgcgccgcgtctacccctgcaataatgacaaacggcgcacccgaaacagcccggcttagggccttagcccgcagcccctgcgtctgcttgttttgaccccgtgcccggctaagctgtacggttcgttgcggcagcagtagacacgcgtcccccagcgcaggctccagcgctgcataaagtttctgtgcagaaaaatcgcctgatgtcacgatcatgatggatttcttctgctgataaaacagcgataagaccaacggaacctttccattttccggcatgccaaaaagagagagttttgtctgctcccccttcatgctcccaatcaatcttttatacgcgccgccctctgtcaacggcttcagcaaagggctaatctgagcccatggctgctgttgcatagatgcctccccggcgttatacgccgttatacgccctctgcgcagcctctaccccttcagtgagcaaaagctttgccgcttgggcgccatgttcaatactgcgctgaaacaaaagcgcgtcctctcctttgggtactcccaagacaaaatcaatcagctcccatttttccggtggggcgcccacccccaggcgcacacgcgggaatcctccctcccccaaatgggataaaatactgcgcatgccgttgtgcgtaccagcaccgccctttcctcgcacgcggattacgccggctggcaggtctatatcgtcgtatagtaccacaatatctgtcaacgacactttatagtacgcagcaaaatccatcacacattcgccgctgttgttcataaaggtctgcggcttgatcaatagcaccttttccaatccgcattgcgcttgccgcaccactgcgccacgctgctttttttccggcgccgcattgagcaacgcccccaattcatccaacgccaaaaaaccggcattatgccgggtcttggcgtatttatctcccgggtttcccaggccaaataccagtttcatcttatttgagtttcccctgttttcttcgtttgtccgcccattccggctttgtctcagcacgaacgcgaccgatcgccatcgaacctgcttccacttcttctgtaaccgtggtacctgccgccacatacgcgccttcccgtaccgccacaggcgctaccaagtttacattacagccgataaagcagtgatcctctaccgtagatcgctgttttatcttcccatcatagttcacaaagatcgtgccacaggcaatattacaggctttgccgatgtcggcatcgccaatataagccagatggggcagtttggttccatcgccgacattggaatttttaacttctacaaaatcgccaaccttgcatccgctgccaatcttgctgcccggccgcaaatacgcaaatggccccaccgtcgtaccgttgccgatttcgctttgtacaaccacgctgttttgcagttccacgccgtctgcaaggatgctgtcctcaacacgcgaagagcccatcagcacgcaatccgctccgatctttgtacggcccttgagcatcacgcccggatataaaatggtatcgcggccgatctccacctgctcttcaatgtatacctgctgcggatcaaggatggttacgccatttcgcatatgattctctttgattcgcgtttgcaaatattgctctgcctgcatcagctgtatcctgtcgttgacgcccatacactcctcctggctcgtcaccacagcttcaacaggacgatgcgcctgtaccaaaaacccgatacagtccgtcagataatactcctgctgtgcgttgtcgcatgtcagctgtgctagcccctctaacagtgcctggttatcaaagcagtataccgaggcgttgacctcttttacctgccgctcctcatccgttgcgtctttatgttctacgatccttaccacacggccgtgatcatcccgcagcacacgtccatagccagtagggttctccgcaatgctgctcaaaagcgctgccccacccttgggggttttgtcgatcagcgtttgcagcgtctgctgtgtcaaaagcggcatatcgcctgccaaaatcaacgtcttgccatcgtaatcctttaggtaaggcatggccatctgcacggcatgccctgtacccttttgttctgtttgctctaccactgccgcggacttttccacaaacggagccacctgttctttcccatggcctaccaccacaatagggctgcactgcgccgggcaagcattcagtaccctctgcaccatttctactccacatactttatgtagcaccttgggcgtcctgctcttcattctttttccttcgcccgccgccaagaccactgctttgatgggttccactgacaaatgccccccttttgttggatctcaatgtatatattataagctaaaatgcttcgttcattgtatgcaaacaccctttgcattgtcaagttttgatgaattttccagtttttctctttcctattatatttatacaagataaaatcaaagatagaattttcagggagtctctctaacatagataaaaatatgaaaaattaatctattatccggaaaagagtcttgacatcctgtttctttgggtgtagttttacatcaagataaaaacaagggtgtttgccaaggcgttatgtctgttgccggtaagcccctttttatattctgttatccataactatgccggcaaaaaggaggagttctatgtccattaccgtatccggtgttctcatcggaatcgtgtttggcattgcgctcggctgttttcagctgtatgcgttgtggcatatggtttccaatcctgcctatcgttggctttggttcatcggcaaaatgctggcctatgtggcggtatttctgttgatggcgctatggtccgtgggccatctggccggctgtgcgggtgcagcgctatttctgttgttcgcaggggctgccgtcatattcaccaaggcaaagaggagttaactaagtcatggagcaaaacacaacctctcaagctgcccagaagcagggtgtcaaaaagaaaaaatccatcaagcaaaagctgctagcctttttaaagctcgccgcgccatacctgatcttatgcgcgatctatggcacattgatgctgattttcggccccaaggaaagcaatagtatggagctttccatcgatgtcggcaccatcacgttgccgggtatcggagctgttagctggtctgtttttgtgggcggcgtcattcttttgctatgtatcgtcgttctgctatgcctaaatctattttattatagaggcatgacggaaaatccgaaaaagctgcaaaactatctgcagttgtttgtcaccacctatgacaaaatggcaaccaaccgcctgggcgaaaccatcgggcgggaaattgccccttacctatttgccttgaccgtatacatcggccttggctgttgtatcgagttgttcggtcttacggcgatgaccgccgacattaatacaaccttggcgctgggaatctgtacgttcatcatgatcaattacatcaccatccgccacagggggttaaagtatcgggcccaaagctatctaaagccgatggcggccgtggcgcccgtcaagttgctttcagacttggcagtgcctgtttcgctggcttgtcgtttatacggcaatgtactggcgggcatgatcgttatggagctgatctattccgtaacaactatcctaattccgccgcttctttccctgtatttcagcgtgttccacacggcgattcaggtgtatatatttgtttacctatcgctttcctatgtaggcgaagcgttggattaagatttcattcccaaaaggaggattattatcatgagtgcaattggattaatcgcaatcggtgctggtatcgctgttttggccgggctgggtgctggtctcggcatgggcattgccaccagcaaggcagtggaggccgtaggccgccagccggaagcacaaggcaagatcaactccgttcttttgttagggttggttttggcggaatccaccgcaatctacggttttgtagttgcgctgttgatcatgtttgtgttaggcggtaaggcataacccttatgctctctgaaccattgataaaggaaagggattatctatgaacatcgatctgtggagtatcggctggcatatgctgtcggtgttcttcctggcgttgctgttcaaacactttttattcaagccggtgcgcgcttttatggacaacaatgcaaaaaaggtgatggaagaccgccaacagctggaagtcgtcaagcaagagattaccattcagcaaaatcaagtcaaagctcaaaaagaggagcttcgcgcccattctgccgaaacgttgacccgttcacaaaagcaggcggaagagcttgccaaggatgtgattgcaacggcagaaaaagaggcagaccgaattcgccgccgcgcaaccgaagaggcggagcagctgcgtatcaaggccatggaggattccgaagagcgtatcggatctctttccgtggagcttgccggtcgtatcctctctcgtgagatcaaaaaagaggatcatgagcgcatgatagacgcctttatcaaagaggtagcggagaaatgaagggctttatccgtaccgcttatcctctttcggaaagccagcttgccaggctgacggctgtgttttccagcaaactgcatactcccattgattttcaagtggagcaagcaccggagcttctttgcgggctagaggtcaccatcggcggccgtatttacgaatacaacgtaaaggatcagctcatcgatgccatgcagttgatgactacgtaacaaggatggtgaaatcctatggcaaataatgaatcaaccgatgtaattcgcgaaaaggtagattcgtttgaatataagcctcaaatctcctccttcggccatgttctcaaggtgggcgacggcattttttgggccgatgggctggaagggctgcagctcagcgagctggttgagctgcccggagaaatatacggcatggcgctgtcgttggcggaaaactacaacggcattgccctgctcaatggtgaatatgaggtaaccgaaggcatggaggtgcgcggcaccggccatgtcgttcaagtgcccgtacaggggctggagggccgtattgtcgatccgatcggccggccgcttgatgcacagggcccgatacaaagcttaaaattccggcccgttgagcatgaagcccccgccatcatcgatcgtgacgtcgtggagcgtccgctgcaaaccggctggctggccatcgatgccatggttcccatcggcaaagggcagcgtgaactcatcatcggcgaccggcagaccggcaagaccgccatcgccctggacaccgttctg

SEQ ID NO: 2052 - DNA, 16881 bp, Unknown
  16S sequences of unknown bacteria
gtcttccagcgtctcagccggccggagctttgaagcccaggccggcatcgaaaaaatttcccctgtttttcagccccaagttgccgctgctggtatgatggcggcacggtatccagtattccataattctcacaaaagggcgtttctatcaaggctgtacggcaaaggaaaaacggctattgtgcgcggcggtggaactgtgctataatacgcacagaaaatttattgcgttaaagcatagaaaaccaaaatgacaggaggagcgcgccatgaatattgtttgcctggatatggagggtgtcctggtacctgaaatctgggtcgcctttgccgctgagagcggcatccctgaactcaagcgtaccacccgggacgaaccggattacgacaagttgatgcgctggcgcttgggtattttgaaggagcacggcttggggctgcaggagatccagaccaccattgcaaacattgacccgctgcctggggccaaagaatttctggatgaactgcgcgcgttgacgcaggtagtgatcctcagcgacacctttgaagaattcgccagaccgctgatggccaagctgggctggcccacgttgctgtgcaacgcgttggaagtggcgccggggggcgcgatcaccgggtttcacatgcgctgtgagcactccaagctcaccaccgtgaaggccctgcagtccatgggctacgataccatcgccgccggggacagctacaacgatctggacatgatccgcgccagtaaggcgggctttttgttccgcagcacggagcagatccgccgggatcatccggagttgccggcgtacgagacctttgcagacctgctggaggctatccggcgggcgctgtgacaagagagaaacaacacaggaggaacaccgcaatggatctgaaacacagaaactttttgaaactgctggatttcacgcctgaggagattggcgggcttattgatttggcggcagagctgaaagccaaaaagaaaaaaggcgtggcccacgatacgctgcggggcaaaaatattgcgctgatttttgaaaaaaccagcactcgaacccgctgcgcctttgaagtggcagcccatgatctgggtatgggggcgacgtatctcgatccctccggttctcagatcgggaaaaaagagagcattgccgacacagctcgggtgctgggacggatgtttgacggcatcgagtaccggggttttgggcaggaaatcgtggaagagcttggtcgatatgccggcgtgcccgtgtggaacggcctgaccaatgaggcccatcccactcagatcctggcggattttctcacgatgcgggagcatttcgggaagcttgcgggcctgaatttcgtctatatgggcgacgcccgctacaatatgggcaattccctgatggtgggctgtgcgaaaatgggtgtgaactttacggcctgtgcgcccagggcctatttcccggaggaaaagctcatcgaacagtgccgcggttttgccgccgaaagcggcgcgcagctgcgtttcttagaggatcccatggaggccacgcgcggcgcggacgtgatctacaccgacgtgtgggtgtccatgggcgagccggcggaggtgtgggctgagcgcatcgcggcgctggcgccctatcaagtaaaccgcgcgctgatggacaacgccggatctcagtgccgcttcatgcactgcctgcccgcgttccatgactggaaaaccactgtgggaaaagaaatggggcagaaattcggccgtgaggcgatggaggtcaccgatgaggtgttcgagtcggaacagtccatcgtctttgatgaggcggaaaaccggatgcacaccattaaggctgtgatggcggctacactgggagcataaaaagcaaaaaagcgcgttctgtgccctttcggcgcagaacgcgctttttcctgctgtctgctcaaagccgttcttcgcagtacatgcagcggtatatatgccgtttccggtcggagaggatgaaagtctgcttcagtccctgctcgatggaggtgatgcagcggggatttctgcatactgctacgccggtgattttatccggcagcgataagcttttcttttcgatgatcttgttgtttttgataatgtccacggtgatgttgtcgtccagaaagcccagcaactccagatccaagggcaccagcccttcaattttgatgatatcttttttgcccagcttgccgcttttggcgtttttgataattgccacttcgccctcgcacttgtccagattcagcgcgtcatagattttcatgcaggagcccgcgcggatgtggtcaatgacgtagccttcttcgattccgctgatattcaacataacgttaagcctccaatcccaaaagtttcatgatgagcgccatgcggatgtaaacgccgtactgcgcctgtttgaagtaaatggcgcgcgcgtcggtatccacgtccacggaaatttcgttcacccggggcagggggtgcatcacaatcatatcctctttagccagtttcattttttcgctgtccaggatgtaatggtttttcaggcggatataatcttcctcgttgaaaaagcgctctttctgcacccgggtcatgtacaggatgtccagtttgggcaatgcgccgtccaaggcgtcgcattccttgtagggaatatgattggcttcgagcacctcttcgcggacaaagtcggggatgcgaagttcatccggagagatgaggaaaaagcgaatgttctcgtagcgggccagggcggtgatcagggagtgtactgtgcggccgaacttgaggtcgccgcacagcccgatggtcaggccgctgagccggcctttttcggcgtggatggtcaaaaggtccgtcagcgtctgcgtgggatgctggtggccgccgtcgccggcgttgatgatgggcactggtgaggagagggaggccaccatgggcgcgccctccttagggtggcgcatggcaatgatgtcagcatagcaaccgatcacacgggccgtgtcggacacgctttcgcccttggcggcggaactggaatcggcgctggaaaaaccgagtacgctcccgcccagattgagcatagcagcttcaaaactcaggcgggtccgtgtactcggttcataaaaacaagtagccagctttttgccgtcgcaaatatggctatattttttgaggttcttttcaatgtcctcggctacggcgatcagctgatcgatctccggaacggacaggtccagaggactgagcagatgtttcatagtttgaccaccctttcaaattttttcaatcgtaccatccatccgataaaaatgcaaggactatttttttccagttttgcccgggccggtgccgctctgcagcgcaggcgggcatacgccccgcagctgctgtgaaactgcggggcgatggagtggagcgattcagcgaatgcagatataaacgagataaactgcgtaaatggccagcattaccatgccttcagtacggcagagccgctgccgggtccagccgaaaatccatacgagcaggctcatggcggtgagcaggacaatgtcaatcatgttttcaaaaataaatgtgaccgggctgattacagcggccaggcccagaatcagaaggatattgaaaatattggagccaattacattccccagcgccatatccagctccttcttccgtgcagccacgatcgaggtgaccagttcaggcaggctggtgccgacggcgacgatggtcagcccgatcaggttctggctcaggcccagggcggcggccacggtggtcgcgccatccaccacgaaatcgccgccgaacttaatggccaccagaccgcccgcaatgaacagaatacactcccacagcggcaggggacggatatcctgcgccatggcggcttcctccgcggccacggatgtattgccgccggcgcgggccttcaatgcggtgcgtaccatgacgatcatatacactgcaaacagtgccagcagcactacgccgtccagaaaccccacgaccatgccggcataccccagagccagcagcagaacgccgcaaaaaatggaaaaggggaattctttggtcagcgaatcccgctggatggccaggggggtgaacacggcgcacatgccgcacaccaccatcagattgaaaatattggagccgacgacgttgctgacggctagggcattgttgcccgacatggccgcagtgacgctgacggccagttcaggcaggcttgtccccatggccaccacggtcaggccgatgatgatggggggcacccgcagcagcttggccacggcggagctgccgtccacaaaaaagtcggcgcccttgatcagcagcacaaagccgatggccaaaaagaatatggcaaagagaatttcctgcatggttcaaatgatcctttctctgtctgtttctgtttcgatggatgtctgttccgcttcctgacggctggtttgctgcgcaggagggatggaggggaacggctgtgccgttcccctccgtgaagtgttgcttatgcggcgaaggccgacaggggcagcagaagcagcgacagggccagcaccacagcaatggcgatggcgagtatacggattccggttttgcggttcaaggaaagcacctcccataaaaaatcaaacaactccgcaagattcagtttacataaggcttgtggaaaactatgtggaaatagtgtataaatccattgtttcctgccgttttcgacaagttgcggcaaaattatgccccggtgcggcgcgtactttttggctcacaacaaggtgcggcgcatcgggcagtgaagccattgtagcataaagtgctgcggacaacaagccgggaattggcaaaaccgatcggaaatacggggctgcttggcacgttttcgcggttttgaaaaaatttttaaaatttttgaaaaaaatctgtcgttttttggcttctgaattgtattactaatagagggaaagcagaatgcgtttctccggctccttttttgtgctataatgggcgcgaaaagaggcggaggtgggagaatgcttggcatatatctgtccatgctgaacagcgcagcggatcaggaagcctttcaagccctgtatgaaaggaataagtacaaagtgttccatgcagcgcagggtattgtgaaaaacaaactgtgggcggaagatgtggtgcatgaagcattcttatatgtagcagatcattacgaagagctgagcgggaaatatactgagggcctggacggatatctgtaccgatgcgtgcagtgccgggcggtgaatttgctgcgccggaggggacgggaagaaagctatgaagcgtggatggagacttccggacgggacggcgcggcggcgccagagggcgatgtgggccgggtggttgccgccctgcagcagctgccgaaaacctatggcgcggtgctggagttggtttgcacgggatggagtacggcggagatcgcggagcatctgggactttccccgcgcacggtgcagcggcggctggaacgggcgcgggagatgatacgggaggagttgagcgagaatgacgcagccgacccgggaagaagcctttgacgcgctgctgcgggaagccgccgcctggcggctgcggcaggcgctggcggccctgccttcggaggaatgcctgcgggcggaatatgggccgctgcatcgtctggaccggcgcgtgcggcgctcggtgcgggcgctgcaaaaagcgcagcagcgccgtgttctgaatcgcacgtcccggcggaagatgcggcggatcctgctggccgccgccctgctggcggcgttggcggcgggaacgctggcggtctcggcggaactgcggctgttggtcaaggataccctggtggagtggatggagcgaaacatgagcatccgctatgaagtggaagggcatcccttgacagctctgccggagggatacgcgcctcattatatcccggaggggtttgtgtataatgaagaaatttcttttacagagcaaaaccaaattctgcttgattacgaaaatgaagcaggttatttcgttcaaattgccattagaattgcggaaaacggttctattgttgtaacagacagtgagcacattacttataaaaccattgatttcggagaggcagacgcctattttggtacttttgacgatggagacggctatgtgatgtattggtttgcagacggcatggaacatgagctttatatcaatgccattttgccggaatctgaggtgtttcagattgcggacaatatttattgaatatcgagtcaacacggcagagccggggcggcaggaaatccgtcccggctctgtttttttgcacaagaattgggtctgaaaattgtggagacattcaaagattgcaaaacgcagcatttttttcaaaaatgctgtcgtttttgggccgctcgattgtattagaagtagagggaatggttgaaagcaaaacagtcgatccctcaatttaatcagagagaggttataacgtatgaaaacacaaatgcacaccacccaccaccgtctgatagccctggccatggcaattgccatggcgctgaccctgtccgtcagcgcacttgcttctgcaaatgaaccctataatgtagatacgacaaaacttgcaggaagtttttcgtcgagtgcacagacttactcagccactgtgagcggtccaatgggaacgacaaaaaccaagatagaactgacgctgtatgaaaaaggtctcttgggctacaaagaagtggacagcgccagtgccagtgcgaacagccgcacctgcagcaaaacggtcagctacgctttcaaagatggcaaaagctataaactgaccgtgacgggcagcgcctatgtcgatggacaatgggacactgttaccaaaaattttaccgcttccttttaacttaacgccaaagtggggaaaagaggggaggcccatgaaaaaatgactcgtccgtatccacaaaatgattgtaatattaaaactggagggttattatgaaaatgtgtaaaaaggcgatgtctatggttttggcactggcgatggttgtaagcttaacggtgccagcgttggcgcaaagcgcaaatggagaaagcgggatgataacaaaagaaattgtcgcagataacggaagtagagttgtggtaaatgttccggcagaatatagagactttatgactgatgcaaggatacaggaatttggttcgattccagatctccaagaaggtgatgtgatcaatattgaaaatattggtggcgtgagtccaatttcagatgcggcattggatgaaaatataacaccgtggaacaaagtcccgatatatagacacgttacaacgaaaacaaaagataagggagaatatatcaaaaaagatgagtttattatttcggtagccaaaggaaaaacaacaacgatcaaacagacattcacactcagtttatctactatggtttctggaagttattacgataaggcagagcttggctttaaaaatgctatatcgcttacaatacaaaaagctgatacttatacagggcctacggacggcgaaggcggtaatagcaaagaatatcgggtgagattttatgcacagaattggaagtggaaacaggagaggtatcttatgccgcagaatcagttggaaggaacgaaaacaggaacggctgtagaagcaacgcgttttgcggagtattccattgtcagaactattacataagcagatcgattttaagaaggagcattttttatgagtcgaaaaaaatgggttcttgttattctacttagcgtgattatggttgcaaacatccacatgctgtggatacgctgtgtacctatcagcgatgttatggcggcatccattcctgcagtattttccgggggtgggttgctcatgattttaaacaaggaactgtgaccaatgtgcactgcgccagactgattccggcgcagtgccaatcctatgacaggcggccaatttttgctgcgtaaaacgatacacagtggaaaaaatgcgcagcaacctgcaaggctcctccgcacaaattttatcttttctactaacggcgctttattggaataaaatggaaacatgtttgcgatagacgaaaggagatcgccatgtgcaaaccaacaacaatcattgtgaagggatgcttttttctgctcgaacttcgcgggtaaaaggtacaagtatgcagggaaataatcaacacgatatgataaagtggagcaaatgaaaaagttgaaaaaatctgcaactgttcaaattattggtggtattgttttgctggtattgcttgtagtgaagcagattgtgccgatgggggcgccgatcccgttacatatttctgtggctataatttttgtatcaattgttagtatctataccggaatatataaaatgaaacggtagtgcagagaagattccccgtgccggagccatcccggcacggggaaaccccgttgttccattaaaacggggagtgaatcatgccacgaacaaagcaataaacaagcgaatcacggccgggctgaattgcacaaaaaatgaaaacaggaggtatgtttatgaaaggtacagtggattatggaaaagcgactctgctggcgctgggggcgggcgccgtgttctttgtgttgggcggcggccttttttatgttatgtcggggctgttttccggtatccttgcctttattctggtgtatgcgcttttgtgcctgtgcggtgaattgcattgcattcgttgtgggatggaagagatctacggagaattgaaacgtatcaatgattttaagcaagctgagcaggacggggcagaagaaagcgaagaataaaggaaagcggcggcgaaaggcagcagccccggcgggagcattgctcccgccggggctgttttatgcctccggcacagcgattgcgccaaagggagcgggccgggggcctcattttttcgcccttcttgtgccttgtgaaagttttggatttggtatatactattatattgaaattgtatcgaattccggcggagcgcaccgagagggggcgctgccgctgtttccagaggaaggaagaaacgaacgtgaaacaatcttacggcaacgaaagcatcgccgcgctgaagggcgccgaccgggtgcgcaagcgccccggtgtgatcttcggctccgacgggctggacggctgcgagcacgcggtgtttgaaattttgtccaacgccattgacgaagcgcgggaaggctacggccgcctgatcaccgtcacccgctatgccgaccactccatcgaggtggaggatcagggccgcggctgcccggtggactggaaccccaaggaggaaaagtttaactgggagctggtgttctgtgagctgtacgccggcggaaaatacaacaccaacggcggcgacaactacgaatactccctgggactgaacggcctgggctcctgcgccacccagtacgcatcccgcaccatggatgtgacggtctggcgcgacgggcaggagtattcccttcatttcgagcggggcgagaacgtggggggactgagcaaaaagcccttgagccgcaagcgcaccggcacccgcatccgctggctgccggatctggacgtgtttaccgacatcgctgtgccggcggaatactttatggacgtgatgaagcgtcaggcagtggtgaacgccgggattacgttccgcttccgcgatcagcggggcgcttcgtttgaaacggtggattatctttatgaaaacggcattcaggactatgtggcagaactctccggtgaagggagcctgacggcgcccatcttctgggaagccgagcgccgggggcgcgaccgggaggacaagccggaatacaaagtgaagctttcctgcgcgctgtgtttttccaacaaaactgccgtgacggaatattaccacaactcctcctggctggaacacggcggaagccccgaaaaggcggccaagtccgcctttgtctccgccatcgacaagtatctgcgcgaccaggggaagtatcaaaagagcgagagcaaaatcaactggaacgatgtgcaggattgtctggtgatggtgtccagttcgttttccacgctgaccagctatgaaaaccagacgaaaaaggccattaccaacaaatttatccaggaggccatgacggagttcctgcgctcgaatctggaaatttattttattgaaaatccatttgacgctgaaaaaatcgctgagcaggtgctgatcaataagcgttcccgggaaagtgcggaaaaagcgcggctcaatatcaaaaagaagctttcggggacgatcgatatcgccaaccgcgtgcagaaatttgtggactgccgcaccaaggacgtttcccgccgggagatttacattgtggagggcgacagtgctctgggcagcgtcaagctgagccgggatgcggagtttcaggggattatgcctgtacgcggcaagatcctcaactgcctgaaagcagactatggaaagattttcaaaagtgagattatcaccgacctgatgaaagtgctgggctgcggcgtggaggtggatatgaaaaaggttaaagacctcaatgcctttgacctgaataacctgcgctggaacaagatcattctctgctccgatgccgacgtagacggtttccagatccgcaccctgattttgacgatgatttatcggctggcgcccacgctgatccaggaggggtatgtctatatcgctgagacgcccctgtttgaaatcaacagcaaagggaagacctggtttgcctattccgaagaagaaaaggcggctgtgcttcgggaactgggagaggtgaaatacacggtcaaccgttccaaaggtctgggcgaaaacgatccggatatgatgtggctgaccaccatgaaccccgaaacccgccggctgatccgcgtcatgcccaccgacgccgaggcggccgcgcagatgtttgatctgatgctgggcgacaatctccagggacggaaagactatattgccgaaaacggctataaattcctcgatcagattgatgtgtcgtgacagttgtccgctgcggcggaaagaaaggagcaggatattgtggaaattttaacctcgcaggcagtgctgacgatttttgggatcctcgcagtctatttcggtgtgaaactggtggcagtggctttcaggctgtggacgccccgtcaccgcagcctgacgctggacgaggcgcagctcaaaggctggcgccgggcctgtgcgctggaaagcgcagggctggcctgcctgtggctgggccttttgttggggctgacgctctcgccctatggctacgccctggcggtggccggcgcggcggtgtttgcggcctgcaaagcttatctgatcaaaaaatacccctatatcgacccggataccgtaaaaaagagcggtaaaaagagaaagaaataaggattccggcaaaaacggactattataaggacggaaataaggattatgccaaagaagaagcaatcatcagaggaaaaagccaaaatggtgaaccccaatgtgttggggctgcatgcggcagtggtggagcagccaatcaccgaaacgctggaaacgaattatatgccttatgccatgagtgtgattgtgtcccgcgcgatcccggagatcgacggcttcaaaccttctcaccgcaagcttttgtataccatgtataaaatgggcctgctcaacggcggccggaccaaaagcgccaatattgtgggtcagaccatgcgcctgaatccccacggtgatgcggcgatctatgacactatggtgcgcctgtccaccggctacggcgcgctgctgcacccctttgtggacggcaagggaaacttcggaaaagcctattcccgtgacatggcgtatgctgcgccccgttacaccgaggcaaagctttccgccatctgtgccgaattgttccgcgacctcgatcaggatgcagtggactttgtggacaactacgacaacaccatgaaagagccgtcgctgctgcctaccacttttccaaatattctggtgtcggccaaccagggcattgccgtgggcatggccagccagctgtgcggtttcaatctgggggaggtctgcgacactgctatcgcctacctgaagcacccggactgcaatctggcggatacgctgctggggccggattttcccggcggcggcgaaatgatctgcgaccatgcggcgctggaaaccatttaccgcaccggccgcggcagcgtaaaggtgcgggcgaaataccgttacgataaggcgaacaatctgattgagatttacgagatcccttataccaccaccaccgaggcgatccttgacaaggtggcggagctgatcaaggcgggtaaggccaaggaaatcgctgatatgcgcgacgagacggatttgaacggcctgaaactgaccatcgatctcaagcgcggcaccgatccggacaagctgatgcagcgcctgttccgccagacgactctgcaggacagcatgagctgcaactttaatgtgctcatttctggaatgcccagagtcatgggtgtgcgggaactgctgcaggaatggtgcgcctggcgcacagaatgcgtgcgccgccgggtgtattatattatgcaccggaagatggacaaactgcatctgctcaagggactcaaaaagatcctgctggatattgacaaggctgtgaagatcatccgcgagacggacagcgacgcagaggtggtgcccaatctgatgatcggtttcggtatcgacagtacccaggccgagtttgtggcggagatcaaactgcgcaatatcaataaggaatacatcctcaagcgcgtagaggaagtggattccctggaggcggagatcgcggacctgcaggatacgctggacaaaccggcgcgtatccgaaacatcattatcgatgagctgactgccgtgcgcaaaaagtacgccgtgccccggcgcaccagtattctttacagccacgaggtggaggaattcgacgaagaagaggaaacgccggattatcccgttaccgtgtttttgtcgcgggaagggtatttcaaaaaaattacgccccagtctttgcgtatgagcggcgaacagaaatataaagagggcgacgggctggcccagacatttgagacgagcaaccgggctgaggtgatgtttttcaccgacaagtgccaggtgtacaagagccgcctgtctgagtttgacgacagcaaggccagcgttttgggcgattatctgcccagcaagctggggtttgacgaaggcgaaagcgtgcgcttcctggtgctgcccggcgattacagcggccatattttctttttcttcgaaaacggaaaagcagcccgggtggcattatcggcctatcagacggcgtcgaaccgccgccgcctgactggagcttacagcgacagatcccctgtggtgcagtttatggtgctgacagaggaccgggagatcgctttatactctacggaaccgcgggcgctgattgtgaatactgcactgatggttccgaaaaccacccggacgacacaaggggtcaatgtgctgaccatgaagccgaaataccgcctggatcacgtgtgcctggtggaggagagcgggatccggaacctggcccgctaccgcggccgcaatattccggcggccggtgcgctggtgaaagaagaggacagcggcgaggagcagctgacgctgatttgaatgcgggcccgtccgggggttttacatgtttatacagtgaggaggattcatcaatggatcggaagcatccggtatgccgctttttttacgaaacagcggtcatttttttcagttgtgctatttttgcgctgggatttgattggtgcgtagcgccgaatcagttttccatcggcggcatgacgggtattgcacagattatcaatgcgctcattcctgtgctgcccgtgggtatgctgaccattgcgctcaatgtgccgttgttttttcttggctggatctacctggggaagcgggcgctgctgacgtcgctgatcgcgatggtgctcagttccctgatgctggacggtttggcggctgtgtatacatttcgcccgatggagccgattctggccagtatctacggcggcgtgatgctgggtgtatccatgggtctgctgatgctggtgaacacgaccacgggcggtacggaactgggggcgcggctgctgaaattcccgtttccgcatctgcctatcggaaaactgtgcctgatcattgatgttctggtggtcagtgtatatgcagcggtatttcacagtgtgctcaatgccatgtatggcattattgcactgtacatctcttccgtcgtgatggactatatcatttacggcagccgtacggcacaggtaacatatattatcagtgagcatcaggaagccatcaccgccaagcttttggagatggatcggggcgtgacattgttggacggcgaaggcgcgtacaacgggaataagcgcaaggtgattctgtgcgccatgaagcgcagccagattgtgccggtcaagttgatggtgcgcgaaatcgatccggacgcttttgttatcgtctgcaaggccaatgaagtgctgggcgagggatttggtgagtatacaaaggacagtatctgaaactgcccgaggcacaaacaaaaaggagtgtatttcttttgagcttttatcgggatttacagctggacacggccgttttgaaagagcggatccgatccggcgcagcctcccggcaacaggtgtattacggcacggtgctgacggcaaaagcggtgctgacgctgctgttctgtacggggtttatcgtgctgtactcggtgctgtttggcgcggagaacagtgcggcgggggttgcggtgctgctgtgcgttttggcgttccagaacgcggattttggcgtgtcactgggcgactcgctgaagctgctggtattttattttgctgtgattgcctttttgccggccgcggcgcatttgtttgggccagcggtgggactggcgatgaatttggcgggtattttttcgctgtatctggtgggctgtgcccgggtggaattgtttaaccattccactctggttctgggctatctgctgctgtatggctacgaagtttccggggaattgtatcttgcccggctgatggcgctggcggtgggatgcgtactgacctgcctgatcttttaccataagcatcgccggatggaaaatgcaggcagcattgccgaccttctgcgtggatttacactgaaagacgcacaggcacagtggaagcttcagtctgcgctggccatttccatcgcggtttttgtgggagagcttctggcgctgccgaggcccatgtgggcaggtattgcggcgatgtctgtattggtgccttatgcccagcagatccgggcgcgggcgcatcaaagagtcgtgggaaccgtagtcggtatcggcctgttttttgcgctctgttttttgctgccggaacacctgtacgctatcattggaactctgggcggcctgtgccttggtttttgtacaaaatatggggaaaaggtccccttcaatacgtgcggagggctgtgtgctgcggtagggacctatgggtttggcgctgctctggcgctgcggtttgtgcagaatctgtttggcgtgttgtgcgcggttgcagtcagtcttgcggttggaaggttgtgccggaagctgtgcccggcgcatcggtaaaaagatcgggggagatcggttttggagaaaaggcatgcggcggcgctgctgttggctgttctgttgtcttttccgggctgcagtgcggtgctggagcgcagttatgatgtggtggagccgcacaacagccagtactgggaggacggcacatcctctgccctgcgggcagaggattatcaaagtctggtcaacgggctgctgatgctggtgtccaatcagacggatgcgggactggtgcggctgtatggttacggcgatcaggcctccgccatgcgcgccatggatcaggcctgcgctgaggtgacaatgcaggacccgttgggagcatatcttgtggattatgtcacctacgactgtgtagaaagcgccggctgctatgagatcacggtgaaaatcgcgtatcagaagacgccggctcagctgcgcgcgctggttaatgccactaccgccggcgcactgcaggaactgctggaaacagcgctgcaggaagaaaaaacggagctggcggtgaaaatcggctatatggaccgcagcgccgaagaggtgagcgcgcaggtagcgcagatcatggaggaaaaagggatggcggcagaggactggtcggttcgctattaccccgatgagggcgaggtgggggatgcgcgcattgtggagatcacctggcagccgccgtcgccgccgctgcctggggcgctgcccgaaccgcaggatcttccggcggacgctttttcctgagaaccaaacgccggctgcaaccttacggccggcgtttgattcttcatatggtttcagctggaaagatctgcttcgctccatgcgtcgtcggaaggcaaccggttcagtgcccgatggcgctccgtccataccggcggaggcggacataccgcgttcacacaacccgccgcccacaggagcgccggaagcggctttcacggctggggggaggtgcgcggcagaaggcaaaagaaaaaagtgaaaaagggcttgacaatttcggcaaggtttgttaaaatacccattgttccgcgggcgtagctcatctggtagagcgccaccttgccaaggtggaggtagcgagttcga

SEQ ID NO: 2053 - DNA, 11905 bp, Unknown
  16S sequences of unknown bacteria
ctgttactaataggtcgagggcttaaccaagatggtttaggataggttttaaaaaagatggatttagtatttgactgtatgcagttttgaaggtataataacttcagtattcctcgatagctcaatggtagagcacacggctgttaaccgtggtgttgtaggttcgagccctactcggggagcttttcaatatggcgacatggccaagtggtaaggcaaaggtctgcaacacctatatcaccagttcgaatctggttgtcgcctctctaaaacccttgattttcaagggtttttttgttgtcttaatgtatgtaaatgtatgtagatattttttgcagaaaataaagtttttgtacaaccttttttgtaattgctgcgtcttatagataacaagaaaaaatgaacttgcatgtataattagcgcatgctaaactaaagacagtttaaaagtgtgatacggatacgattttttatgtacataaggggaggaaagaatgatggatgtaatcattgaacagctgaaaaatctggcggaagattttgatcagaatgagaagagattctacagagaactctctgagagtaaggtatcaatcgaccttctgcatgcagggcttaccagaatggagaggagcctgaatatctggaaacagaaactgaatgatatgaatgcccatgcttcagaattcggaagcctcattggaaatcagaaccagctgtgtggggatgcagaacagcgctatgaagcagcaaagcagaaagccgcagaaaaagaagctgcccgggatgctatggagagcaaagcaaccagcatgtacggtgagttggttgaacgtgtagggacggtacgcagtgaatatagcaatttcctgagcaacaacgggaaactgcgtggtaagaaaaaacagaacgaattaaaagtaattgttggtaaactggaagcacttcagtctgacagcaatgctcttctgaatgagttccgtaaagtcaatgagaaatatctgccctcagagaaattcagagagacagcagataagtgccgggagactcataagacgatttacagtagttacgcagaagcaaagagcttatgtgatggtatggtcgcttctcatactgtaaacagtaagggtataagaaagagattggcaagggttttagtgcttgtcgtaattttgggaggactgtatacggtagtcgttcagggaccgtcgaaagaatataaagaagtggtcactgccgcgcaggaaggtgacacagacaagctcttagagtatctggaggatcatcagtccaccagtttcaagcagctcagagcagactgtgcgggtgaacttgcagacaaggcctatagtgaaagcgtgacatccattacggtaggagagattaccggatctggaatgaaccggtcaacaccgattgagatgactattgataatggaatgatcggagcaactgtcagagcggatatggtatacagtttccatggtgtttcctttgagaatgtagaaagtgatattcagtggatcgatatcatcgaccagtggataacggatcaggacttcagcagaaacagcaagatatgcagtgttacctgggaagcttatgatcctgataccggagagctggaaggaacctataagatcgatcagatgcttggtggaggggaatctcctgcaaaaggtaccctggatctggaaaatggtacaatgaaattccgttttacagagccgatcacagctcataatagcgtatacgaacaggagacatttaattgccatattgatccgttgtatgctacttttgtagatgaagatggatatgtatggtgcccggcatcaaaagacgaagaagaataagaacaggaaaagggagatctgaagagtcaggtctccttttttacgtataaaactttccagaaccggggatagtgaaaacaaaaagacaaggagatacaaagaatgtcggatatgttttgctatcagtgccagcagacggctggaaacaaaggatgtgtgaaggtcggcgtgtgtggaaagcagccggatacggccagacttcaggatgaattggtgattgcactgattcggctggcggaagcggtgcaggaaaagggagtgcggaccagagagacagaccggttattgatcgatggcttatttaccactctgaccaatgtgaattttgataatcaggcgattcagggagtgatcgatcaggcagtagaggaacgtaagaaactggagatgaaggagattccggtggtggatctctttgtgggggagacagatcgggtgtctcttcgttccacattgctgttcggcatgaaaggtatggctgcatatgcgcatcacgcagacagactgggacacagagatgaagagatcaatcagtggttttataaaggcttatgcgaaatcaatcgggaacattcggtgaatgaatggctggaactgatcctggaatttggccgggttaatctgaagtgtatggaacttctggataaagccaatacggagagcttcggaacaccggtgccgacaaaggttcacacggatattaagaagggaccgtttatcgtggtctctggtcatgatttggaagacttgaaggaactgttggagcagacaaagggaaaaggcatcaatgtttatacacatggagagatgctgccggcccatggttacccggagctgtcaaaatatgagcatctggcgggaaattttggaaccgcatggcagaatcagcagaaggaatttgtggacattccggcgccggtactgtttaccaccaactgtctgatgccgcagcgacccagttatcaggatcggatctacaccacatcagtggtaggttatgaagggctggtgcatattcaggaaggcgccgacggaaagaaagatttctcgccgctgatccgacaggcgctggaacttggtggttatgagcatgaccggagtatgagcggtattaacggcggtcatattatgaccacgggatttgctcatggaacagtgctggcaaatgcccagaaggtgatcagtgccatccgtcagggaaagatcaaacacatttttctggtgggaggctgtgacggagcacagccgggacggaactattatacggaatttgtaaagcagacacctatggatacgctggttcttaccttggcctgtggcaagtttcggttcaatgatctggatctgggcgaaatcgaaggtcttccaaggatcatggatatgggacagtgtaatgatgcgtacagtgcgatcaaggtggcagttgcgctggcggaagcatttgactgtgaggtcaatgacctgccgctgacgttggtactgacctggtatgaacagaaggcggtgtgtattttgctgaccttactggcactggggatcaagaatatttatctgggtcctacattcccggcatttttatcagaaggagttacaaaggtgctgagagatgcgtataatctgcagcccatcacagctccggagcaggatctggacgcgatcctgggaagaggttaaaactatggattgctctgcctgtttatttttagtataatagacagataaaaggagcagcgtatgattcgagtatttaccatgaaagcagtcgggaaggatttcctggctgcttcgtggagtccatatctgacagaagaaagaaagaagctggcggaccgtaagaaaggggaacgggaacgacagctttttcttggagcagaagtattattaaacttaagtctgcagcaggtagatgcccggattccgattccggcgaaatataagagaaatgaacacgggaagccttatttggaggatcgtcaggatatctatgtgaattggtcccattccggagattatgtgatctgtgcggtggcagatcgggaagtgggtattgatctgcagtatgcagggaaagagccgaaggaatcgctggtgagaaagctgctgcagccggacgaacttcatttttatgagaatgtaccggagttggagcggcagagactgttttatgaatactgggcagtcaaggagagcttcctgaaggcgctggggacgggatttgctacgcctctggacagattttacgtggaattccgtaaaggttctgatgtaagtgatgctgtgaaaaaaaatgcgatgaaagttccatatattatacagaacataaatcataaacagtacctatgccgattactttctgtaaaggatgaagggtacacagcggcattatgcatggaaagtctggataaatctctccaggaaggagagttattttccactttgaaagtggaagagatagaagaataaacaggaggatcgtatcatgcagcaggaattggaaaccttaaaaaaatggatcgacaacagtgataacattgtatttttcggtggcgcaggcgtgtccacggagagtgggattccggatttccggagtgtggacggtctctataaccagcagtatgattatccgccggagacgatcttaagccacacatttttcagaagaaatacggaagagttttatcgattctaccgggccaagatgctggcattggatgcaaagcccaatgcagcacacaagaagctggcccaatgggaacaggaaggcaagttaaaggcagttgtgactcagaatattgacggtcttcatcaggcggcgggcagcaagatggtctatgaacttcatggcagcgtacatcggaattactgccagaaatgcggcgcattttatgatgccagatatatgctggagagcaaggggatcccgaagtgtgaaaaatgcggaggtatcatcaaaccggacgtggtattatatgaggaaggtcttgacgatgcgactatgagaggggcgatcagagccatcaatcatgcagatgtgttgattattggaggaacctctctgacggtctatccggctgcaggactgatcgactattataatggaaataaactggtattgatcaataaatcagtgacacctatggacagcagagcagatcttctggtacaaggtcctatcggtgaaatattcagccagttataagaaagaggaaaatatatggaatatcagattggtgatattattaaactgaaaaaaccccatccatgtggaagtcaggaatgggagatcctgcgtgttggtgcagactttcgactgaaatgcatggggtgtggacatcaggtcatggtgtcccggaagctggtggaaaagaataccagaggaatccgcaaagcctgaagtttgttattattcagagctacattcgtatttgcaaatacattcgcaaaatctgcattttctgcttgattttcagcaggaaatatggtaaagtcttttattgtgatatattatagctctgtaatcagagaaattccttgcgcatagcaatatgaccgtgcgccagagaccagaaggaggtaaaagcatgaacaaatatgaattaacacttgttgtgaatgcaaaaatcgaagatgacgagagagcagcagccgtagagaaagcgaaagagattatcactcgctttggcggtactgttacagaagtggaagacgctggcaagaagagacttgcttacgagatccagaagatgaaagaaggattctactacttcgttcagttcgatgcaccggctacttgcccggcagaagttgagaaacgtgttcgtatcgtagacaacgtcatccgttatttgtgtgttcgcaaagacgcataagaacagcatataagaggtgattgttaatgaataaagtaattttgatgggtcgactgacccgtgacccggatgtacgctactccaatggagagcaggctaccgcagttgccagatttacccttgcagtagatcgcagagttgcaagaagagatggcgagcagaccgcagattttatcggatgtgtagcatttggaagaactgctgagtttgttgagaaatatttccgtcagggaatgcgtatggtaatcagtggccgcatccagaccggaagctacaccaatcgcgatggacagaaagtgtataccacagatgtggttgcagaagaagtcgagtttgcagagagcaaagctaccagcgatgcacttcgcaataacagcggaatgggtggtggatatcagccgcaggcaccgtctgcgccgagtccctcaggagcagccggagatggttttatgaacattccggatggaattgacgaggaattaccgttcaattaacaatcgaagaagatatcagaatcgtgaaaaggaggaaccatcatggcttacaccaaaaatgaaaaaggcgatgccccgaagatgagaagaggcggccgcagaagaaagaaagtctgcgtattctgtggaaaagaaaataatgagatcgattacaaggatgtaaataaattaaagagatatgtttctgagagaggaaagattcttccgagaagaatcaccggaaactgtgcaaagcatcagagagctcttaccgtagctatcaagagagcaagacatatcgctcttatgccttacactgcagaataagaacaagctttttgggcaccgcatttataatgtggtgtcctttttattatctgtaaaatctcactgcctgttttattacttgtccatacagccggataatggtataatgagcgatagtgaggagaacatatatcatgggaaaactcgggaaaataaaaggaaagcttcggctttatatcaaatggccgttatatctgacgcttctgctgctggtggccgggttgggtgtttatctgatctcaccgcaggcagggctgcttatggtaatcgtgatcatcatttatgcagcgattgcaggaggtctgtatatatataacaagccatcgatctatacagatatggtgtcctttgcgacccagtatggacagatccagaagaatctgctgaaggagctggcgattccctatgtccttttgagtgaggatggacggatcgtgtggagcaaccgggagttcaacaggatcacaggaaagatcgggaaatttaataaagcgatcaatacggtatttccggaactgaaccagggactgcttcctacagaagaagagccagtcgtttctgtgaatctgaagtacggagaagaagattaccgggtggagatgaaacggatccagatggatgagtgtctgccaaatgctgaagagctcatcgagccggaagctgtggaaggctgcctgatcgctctgtatctgtttgataccacggagatcaaccgtcggatcagagagaatgaagaccagcgtatggtagttggtctggtttacattgataattatgatgaagcactggaaaatgtggaagaagtcagaagctctcttctggtggcactgatcgagagaaagatcaacaagtatttcggggcttatgacggcattgtgcgtaagctggaaaaagacagattttttgtagtcatgcaggaaaaagcactgacacagatccgtgagactcgttttgatctgctgcaggatattaagaccgttaatattggaaatgagatggctatcacattaagtattggtattggttccggcggcggttcctatacggattgtatggaatatgccagaagtgccatggatctggctcttgcaagaggcggagatcaggctgttgtgaagacgaaagatcagatcacttattacggtggtaagacccagcagatggaaaagaatacgcgtgtaaaggcgcgtgtcaaagcacaggcattccgagagctggtggagaccaaggataaagtggtcgttatggggcataagatgccagatgcggatgcatttggttctgcagttgccatttatcgagctgcgaagaccttgaataagaaagcctatattgtcgtcaatgaggcaacgtctgccatgcgcccaatgatggaagcatttgcggaggccaacaatcatgagcagggaatcgtgattggcagcagtcaggcaaaagaaatcgtagaccgcaatacggtggttgttgtggtcgataccaacaagccaagttataccgagtgtgaagagattcttgccatgacaccgacggtcgttgtatttgatcatcaccgcagaggcaatgaggtgatccagcatgcggcgctttcctatgtggagaccaatgcctcatcttcctgcgagatggttgcggagatccttcagtattttgcggataatgtaagactgaagggcggagaagccgattgcatctatgcaggtattatgatcgatacagacaactttatgagaaaaacgggtgtgcgtacatttgaagcggcagcgtttctgcgccgatgtggtgccgatgtgaccagagtccacaagatgttccgtacggacatggcagaatataaggcgagagcggaggcagtccgccatgcagaggtatataagggatttgcattaactgtgtgcccgtccaaagggctggcaagtccgacgatcgtcggtgcgcaggcggccaatgagcttttgaatattgtgggagttcgcgcatctattgtgttgacggaatataatggcaggatatatgtaagtgcaagatctattgatgatgtgaatgtacaggtcatcatggagaagatgggtggcggaggtcatctgaatatggctggagtgcagctggaatgtacactggaggaagcgatgcagcaggtgcgtgatactctggattgtatgttcgagaaaggagaactggaataatgaaagtaattttattggaagatgtaaagtccttaggtaaaaagggacagttagtagatgtaagtgatggatatgcaagaaatttcattctggcaaagaagctgggactggaggctacatccaagaatatgaatgatctgaagctgcaaaaggctcatgaagataagctggcagcagagcgtctggcagaagcaaaggcatttgcagaggatctgaagaaagtagaagtaacattatccatcaagaccggagagggcggaaagctgtttggttccatctcttccaaagagatcgcacaggcagcaaaagagcagctcaacctggatattgataagaaaaaactggtattgccgaatccaatcaaagctgtcggaacgacgctggtaccgatcaaactgcatccacaggtgaccggagaactgaaagttgtagtcagagaagcataggagaacagatatcatggaggaagcgctgatcaaacgagtcatgccgcatgacgaggaggcggaaagctcggttatcggagccatgctgatcgacaatgaagcaatcatggttgcctccgagctgatcacgggggaggacttctatcagaagcagatgggagtcgtctatgataccatggtggagctctataatgcgggaaaaccggtggagccggtaatcctgcataccagcctgagagaaaaaggagtgccagaggaagcctgtggtacagatcgtatcctgcaatggatgactcaggtgccaacatctgcaaatattaaatattatgcagagatcgttgcggaaaaatccgtggccagacggttgatccgactgaacgaagagattgccaatacctgttatgcaggttctgaaaagctggaagatacactggccaatgcggaaaagagggtctttgatctggcacagagaggcggaggcggtgagtttgtgccgatccgacaggttgttatcaatgtcatgaaaaagatcgatgctgcatcccgtgcacgtggtcgggtaacaggtcttgagacaggatttatggatctggattataagacttctggtttgcagccatcagatcttattctgatcgcagcccgtccttccatgggtaagacggcatttgttctgaatctggcacagcatatggctttcaagaaggatgttccggtggcaatcttcagccttgagatgtcaaaagaacagctggttaaccgtatgctttctctggagtcccatgtagatgcccagaagatccgtaccggaaggcttaacgatgaagaatggatgaacctggtagaaggttctgctaatattgcaaattccaagttatttattgatgatacgccgggtattactctgtcagccatgcgttctaaatgcagaaagctgaagatggagcatgatatacagatcgttatcatcgattatttacagttgatgagcggtaattccggtaataatgcatcacgtcagcaggagatctctgacatttccagaggactgaaggctttggccagggaattgaatgtaccggtgatcgcattatctcagctcagccgtgcggtggagcagagaccggatcacagaccgatgctgtcagaccttcgtgagtctggagcgattgagcaggatgcggacgttgtaatgtttttgtatcgtgaaggatattataacagagatctttcagaagcagagcagcgagtggccgaagtgatcattgcaaaacagagaaacggtcctatcggaaccgtgaatctgctctggattccggaactgacgaagtttacagacatggatcgagaaccggtttagaaaggattcataattatttgataaatatttcacttgtataatgtgctcttttatattagaatatgtagaagagcctgatacaaggtattcaaaatcatacaaggaggaaaattatcatggcatatgttattactgatgattgcgtagagtgcggaagctgcgcagctgtctgtccggctgatgctatctctgagggagatggaaaatacgtgatcgacgctgatgcatgtcttgagtgcggaacctgcgaagcagagtgcccgaacgaggctattcacgctgaataattcaaacaatcaagcagacccggaacctgttaccacaggcttccgggtctgttttgtcatgctggatcagtctggctgttgttgatgatgtgtaccaaaaaaccagggtcgcctggatcctgactgtttttcttcttttatctttggggcctttttttcttttggctttttttccttctttttgaagaaattcttctgtgctttctgctgagttgcgcgaagctgcgcatcaagatttttataatgtgtttcttctcgttcctcttgaagacggaacagataatccatctccttaacaacctgagtggagacctggtggctcaactcttttcccatttccagctggttggcttttaatgcctgagaaacgacttttccaaggatcatctgaaattgctccatcttatcactgatgggtggttccggtgcgggaacgatcgcgggtggtgtatgcccctgctcaatctccggcaacagtaccttgatagctttaagctgatatccttgctctttcagatccttaatgcggtgaaacatttggatgttatcttctgtatagtagcgatgacccatttcgttgcggctgatcggcagttccagctcgtcctcccagtaacggagcacatgagcttctacattcaccagtctggcagcatctgagatcatgtaacgcttggtatccatatacatccctccaccttatgaaattgtagacagatttattatagcatatccccttgattttgcaagggaatcgccgtataatgaagccatccacgttaattgataaggaggtttagaaacaatgcagaagatttctaaagatatgattatctcagatctggtacagatcgatcagaatatcattccgatcctcatgagagaaggaatgcattgcatcggttgtccgtccgcacaggcagagactctggaagaggctgcactggttcatggacttgatccggatgttcttgttgcaagactgaacaatttcctgggagcagaataagaccagtataaaaaggctgttcgctacttcatttaagaagtatgcggacagccttttttgtggcagaatctgcactgcagattcagaaaaac

SEQ ID NO: 2054 - DNA, 2717 bp, Unknown
  16S sequences of unknown bacteria
cgcggcgtctttctttccatattctttcttcgccggagaagaaagaatatggcccccggagggcgctggcctggctgcgtggaaaatattaagacgcagggccttccagattcaccaaaaacccccaaccccgcacggcagtgcgaatagcagcagcgccgcgcccccatgcggagcgcggcgctgttactgcgttacgagagcgtcagatccccatccttcacccagccgagcttccggcagacgccgttgagcagcgggcagaggaccgccggcagcacaaagcagatgagcaccagcccgatccaatccatcgcgccgggcacgatggccgccgcgcccttggccagggcctgttcgctgggggacagccagcccgtccagacgccgatctggccgacgaggccgcaggtccccatgccggaggagatgggcgcgccgttcatctccaggtggaacacgcacgttgcaatgggcccggtgatggcggaggtcagcgtcggcgcgatccagatgcgggggtttttgacgatgttgcccatctgcagcatcgacgtccccagcccctgggagacgaggccgccccagcggttctcccggaaggacatgacggcgaagccgaccatctgcgcgcagcacccggcaaccgccgcgccccccgccaggcccaccagccccagggatgcgcagatggccgctgaagaaatcggcagcgtcagcgccacgccgacaatgacggagacgaggacgcccatcaggaacggctgcagctccgtcgcccacatgacgaggtcgccgatcttcatcgccgccgcccccagggccggggcccaccaggccgacagcgccacgcccacgccgatggtgaccagcggcgtcacaaggatgtcgatcttcgtctccttcgagacggccttgcccagctccgccgcgagaatcgcgacgaacagcaccgccagcggcccgcccgcgccgcccagggcgttggacgcgaagcccaccgggatgagggagaagaggaccatcggcgggcagtgcagcgcatagccaatggccgccgccatcgccggcccggacatcgccgacgccagacccccaacggtgtactccgtgccgccgatggtcgcgacggccttcgtcagaaacccgatgtggaactgggtcccgacggtgttgatgatcgtcccgatcagcagcgagcagaacagcccctgcgccatggcgctcagcgcgtcaatgccatagcgcttggcggaaatttcaatgtccttccgcttcaaaaacgcccgtaccttgcccataaaaataagccccctgtctctttccccgtgtcagaacgcgtcgcagcatgtcatacgatgcgataacaggtcagaacgcgtcacaaaaaagtagcatttacaggtgtcatgacacctgtaaatgctactatagcgcaaaggggggcgaatgtcaacgcctattttcctgcccggtgaagaggacgcccagcgccgccagcgcccgttgcgccgcagcgtaggcctcggggccggggcaggcgagggtgtgcagatggatgccctcggtcagggcgctcaggggctgggcgtcagagccggcgcagcgggccaaaaacgcgtccacatccgcgcggcttgccagctgcagcggccccgtcagctgcccatagatcgggtgctcgacgatgacgtcgacgacggtgcacccggcgtccacaatggcgtagagctccgccgccatctgcgcgctgtcatgccggcaggcgacgcgcccgatgagcgccgccgcggcccggcggcaggtatagccccggggtgtggcgcagatatccgccccctcggcccgcagcagggccacgtccccgacaatgacctgccggctgacgccgaaccgcgccgccagctgcgtcgcactgaccgcgcccttcgtgccccgcaaaacctccaaaatttccgctctccgttccgctgcctgcatccccagcacctcacttgcccaaaattctattttctaataacctttccaattcgcaaggattcgtctaaaagacagaatcttcttttcagacgcccttccggatttcctctttttttacgttacatgatttttcgcgccaatgcaagcaaattcgaatttctcccccaattttcgagcatttccacaaaatctcttccatttccccgccgccgcgccgtcatttccgcaaagctgaagggggactcgataccccttgctgcgcaccgcaccgcaagcgctgcgcagcaccaaaggcttcctagtgtaaagcgagctggcgcggcgcgagcgctgacttgggtgagacgccaaacgcgcagcgtttggcgaataagcgagagtcaaaatcttaagcgagagtcaaaatcttaagcgagagtcaaaatctttgattttgcccctcgagcttacacagcgtgctgattttgcccctcgagcttacacagcgtgctgattttgcccctcgagcttatacagcgtagtcgaacccatgcagcgtagagggattgatgcaacgcaaaaaaagtttgcaaagcagtactcgactcctccaggctttaaaagcaaacttgaaaattgctgcacgctaatgtctgccagatcaattagttagcgccctccgggggcccgattctttcttctatagcgaagaaagaatcggggaagaaagacgccacttagggcagggggcggtcccc

SEQ ID NO: 2055 - DNA, 3294 bp, Unknown
  16S sequences of unknown bacteria
tcaatatcgccgagaaacgccagcgtcatgtgcatatcccggtccggcacggcgcgcccctccgcggcgttgtcgagcagacgctcacgcgccgaaacgagatgtgataccgaacgctcatcaaagcgaagggcgatgaacgcgcgtatcaagccgtttttcatatcgctctgaacccgcggacagacagctcgcgccagagatcgtcgtatctcgtgaaaaactcgtcggacctcttccacgagggcttgacggctggtccgagatcgtagtcgaaaacttttccgtcgaaacgatagctcagacccctcctgccggacgccgtcgccggggcggtcatcgtcatcgaggacatcttatcgaatctgcatctgacattgtcgatcacaaggtggtgttcggttatctcgagttttgagaatatccgcgaggtgacggccgcgccggacacgaccctcaccgcgatgacaatcatggcggcgagcgcgatgacacccgcgagcagaattgtcacatatcccggaatgtatatctcgtcgccgaccgcggtcctgagcgccccgagcgcgatataccccgcgagaaaagcgagaacagcgaagaacagcgtccagaggacgaacaacgcgttcgaccgctcgatacgctcgcttattgaccgcttcggataatagaacacaatcttgtggaaatcctctccgtggtcatgctttgagggcacgggagcggcgccgacttccggaagcttctcgtcgaaggacgggacgattatctcgggcatcgaacggtagtccgcgtcggatatcttcccgatttccgggagcttgttgtaatcagcggggatatcctttgaaaggtcggtaatggtcggcgtcggagctggttctgactttacaggttccgctttcacaggttccgctttcacaagttctgcctttgccggttcggtcttcaccgcctccgcctttgcttccgtcggcttcggcgtcaccggcactccggtcacgacctgcttcggcttcggcgccgcgtttccgacgtagttcttcgagtacggattgcgcttcgaggcttcggcggcggtctcggcggcgcgcttcatgttagcggcgggcgtgctgtcctttgcgggctgtgcctgggatgagcggcggttcagaaaatacgcgctagacgccgactttatgtacatggcggcgtcggttatcgtcgccttatcgaacgaggtgcactttatcgtctcggttttcccgctcttcctgtgctcggcgatgagcgacataccgtcggatgatggtgaaatatagtaatcagcgaaagtatacctgaccggctccttgccgctcttccggtatatcacgccgtcggaattcacgtctatcacaacggtcgagagaaactcccacacgccgcagccgatcaccgcgagccatacgacgacgccgaacccctcaaatcctcccgcgaacaccgagaagaacccggcgatgaatatacaaacaatcagacgaattccgaaagagcgcagatgctgtctcgcgccgcagacaaaacttcttgttttcactttgataactatacctttcgcattatcttacagttttgaggcggttttgaaagacggcttgcctgtctttcaaaattcacgacactgtgtcgcggaagcttcaaaactgattagtctgaaaatttattttcagactaatctcctgttccgcgcagtcacgtgattagattatcttatcatatatagtataccacattttcgcggaaaaatcaagtggtcatatcgaaaaagcggcgccatgcaccgcttttccggtaaattttttgtgaaagctcagagaatcaatccgcaaagcgaatcgcatactcacagaagctcggaaatacccttcccgaaccgcttctcccacttctcgtcaaacctcgcgagatcctgactcgttccgggatgcgacgccagcatagcgagaaggtcagccgtcaccgtcaccgcgccgaccccgccgcggataaccttatccacctgctccgccgtcctgaagcttgccgccagaacgacagtctccatctcatgctcacgcagctccttcgcgatatcaatagcgaccgatgcgccgtcaagcgaaagattatcaatatgcgtaatataaggcgcgacataataagcccccgccttagccgcgagtatcgcctgcgaagaagtataaattgccgtcgccgtaatgcagaccccctcacgagaaagaacccgcatagccttaagcccctccggagtcgtcggtatctttatagacaacttcccgccaagcagctcgcaaaccttatgcgcgtcactcacaataccgtcagccgtagccgccgtagtctgcacaaaaagcgtataaccgcgggtcagctttctcagactcacaagcccgtccctaagcgaaactccctcaggcaaatccctcgaaagtatccccggattagtcgtcactccgtcaagcggataataatcaagcgcggtgcggattacagcctcatccgcgcaatcaagaaaatattccatcattttttcctttctactaactgtttgcttgcagggaggggaagaccacctttgaaaaggcggtcttcccctccctgcaccctccctatcccaccaaactttataaggggctcaggaggaagacacttcttgtattataacatattcgttaaggggttgtcaatcatagatatgcgcaaactttcttgtgtttcacgggatttttttgccgcgcgtcagttaaactgtgtcaaaagggccgaaaaccgatataatgcgtaatgtgccgtgtaaatatacggtgtacaaaaaacttcggaggtaaacattatggacaacgaacagaatatcggctatctcatagtgaacgtctcaaccgcgcgcggcgcgatacctctttccggcgcgtccgtcacggtattcgacaactccgcggagggcaacccgctcgtcacctcggtctcgaccgatatgagcggcaagacgacgagaatagccctcccgacccctgacagatccgaaagcaagtcgcctggcacaaagaagcctttcgccacctacatggtccaggtgagccacgagggctactacacggtgacaaacaacggcgtcccggtcttcgagggcgtgacctcgatccagccggtcgaaatgatcccgctcgccgacaaggactccgaaaacgtctacccgcgcggcagcctcgagatagacgaaaatgagcctcagaatctctgattgtataaagctttagaaaagga

SEQ ID NO: 2056 - DNA, 7063 bp, Unknown
  16S sequences of unknown bacteria
cctatattttagccttttatcgcaaaaatccgattagttcagagtatcctttagtcttttcatgatatccgtgcagacagcattaccgtacttctcaagccgctcaaaatccattgcggagacgtatattccctcgattttgaaatgagcttccgctgctccggcaagaagggacacagcctcgttttcggcggattcaagtagtgaagaatacagtttcatccttccccgctctgctttcattatgtcgcggtctatgaatctcatcaggttaatgccccgcgtctcgtcagttttctcgcctaccgttaccgagatgccgtgctcagcgatgaatattcccgatatttcccctgacagcggtattctggtgatgatgattttctgcccgcatttcacgagtttatccgcaagacggcgcatgaaaatctgagcggtgttcatgatgttctcgacagtatacgacagctccccgaagcgtgagagtgaatcggtacggtacattcccttcatcgtgacggcgtgggagtaatattccgcgatgacgcttccctcttccttggttttcggcaggcgggagagcagtcttgtgatgaacgcgtcagccttatcgaagaggtacatccttgacgcgagagataccgatgctctgttcacaagtcccgccgcgccgagaagtctatatgccgaagaatacgcttccgtttttctctcgcacagtgcggtgatttcctcccgttttgcttcaagcgcggatatgtcccagaaaggagttacgtcaataagctcggacgccgctccagggtatgacatttctctgacgtggggggaggttccgtcaagcaccgctattctgccgtccagctttatgcagtcgagagagtccgcgtcagatccgcacaggtaatactcaacgccgaatccgtttttctccgcttttttcgcgatatttcgcatgagagtgctctttccgcttcccgagccgcctttgattatgtagaccctctcgcattccttttcatttgcaatggtatcgtatgagctgacaaagccgccgtcagtgttagctcccgcgaaaaatatgtgcctgcctttcatttttataggtgaatatccgtcataaaccgtaaacataagctgccctccgctgaaatttattagtctataccagtttatgccgtgttttcccctctgtgacagcaaaaatccgcctcatgagctgtcacaaagcggatttgtattgcgttttgaataattacttaatcttgactgtccagccgagcttgtcctctatcttaccccactgaatacccgtgagagtatcgtagagcttctttgcgacaggtccgatttcgttgttgttgatgacgtagctcttgccgttgtcgtaaagctcgcctacgggagaaattacagccgcagttcccgtaccgaatgcctcgttaaggtgtccgttgtcatgcgcttctagaacctcgtctatggaaaccttgcgctcttcaaccggcataccccagctcttgaggagttcaatgcacgaacgtcttgttacaccggggagaatattgccgtcggtgaggtcgggagttacaaccacgccgtctattacgaagaatatgttcatcgcgcctacttcgtcaatgtactttctgtgtacgccgtcgagccagagcacctgagcgtatcccatctcgtccgctttcttctgaccgatgagagaagccgcgtagtttccgcctgcctttgcaatgcccgtgccgccctttacacagcgaacgtattctctctcgaccataatcttaacggggttgattccggcagcatagtatgagcctacgggagagaggattatgcagaagatgtaagtctttgacggatgtactccgaggtgcgggtctgtagcgatgatgaacggacggatgtagagcgatgtaccgtattcgtagggaacccagtccttgtcgacttcaactattgtctcgatagcctgaagcgcgtcgtcggggtcgatagtgggaacgcagagtctcttgcaggtgttgttcattctctcaacattgcactgcggtctgaacagctgaacatttccgtcggaggttctgtaagccttgagtccttcaaaaagctcctgcgcgtagtggaacaccattgtcgagggatcaagcggtataggtccgtagggtacgattctcgcgtcgtgccagcccttgtcctcggaatagttcatgaggaacatatgatccgtgaaatacttgccgaatccgagtgcgctgtagtccggcttaactttcggtgttttaactttttctatctttatatcaagcatgatgttttcctccgtttgagtatactttatttttatattatacatcaccctctgacaataatcaagtgttaacttattataaggcataaattctgcattattacacggcggaaagcgaagtttatcattccgacagttgattttttatattttatactgtataattatgtacgatttaattatttttcggagatttgggatttcatggatttaaacaaggaatattttataagctttcttcgcggagaggggaaaaaagcggtaatattcgagccgtttgtctcacgcacgcacaccgaaaccctgatatggcggcgcggggatgagctttgggacacgccggagcactacatagacacgcttgtttccctctcggagagaacaatgtcggatgtgattttcgcggatatgcgcctgttcgactttggcggaaaaaggagactgcttgaatatatctcgcacaaggatttttcaccgcggggattcggaataataacggattcttcggacgacattgcctttgcggaagagagcggagctgacgttatcgcggcatacggagatataaaatcgaaagctctcccgacgatacgcatggacggggacattgagaacgcgattcttctcggatatgacggatggtatgcgccggactcggcaaaagaatacctcttaaaatacggggacaagatacgtgtgctcggcggacttggtgtgaagtgggtcgagggctcgtctcctatggagatttacaccgaagtcggcgagatacacaaacaatacggctcgtcatgggcttgcggctccggcggggagatatcggcggaaaaatatcttgagcttatctcactcctcggagcattcggaaggattaggtagcctctgatttaaggttattattcagagtaacctaggtgatatcgcggaaatatttaaattattattaattcgacaggaaaaatcttgcatataccgcggatttattatataattataaggataaaatttcagataaaattcaagggagaaaaaaatgtactattatcttgaagctgccgctacagatgctgctgccgcttccggcaaggtaaacgccataaccactcttgttatgctcgctgccatgatagcggttttctatttcttcatgtaccgccctcagaagaagcaggaaaaagaatccactgatatgagaaacaatcttaaagtcggagacgaggttacaaccatcggcggcgttatcggcaagatagtttccatcaaggacgaaaccgttaccatcgaaacaagcaacgaacgcaacaaaatcagaatcctccgctccgctgtacgcaatgtagacgttcacgccgaggacgctgactgataaccgaaaacaaagcggctgctctatgtgggcggtcgttttttctttgctcacagaggttatttttcctctcggcacgaaatataatgcagtgaaaagacaagcgaaaggagattccggttcggttaataaaaaatctgattccggatatatcttaaatgaaaaagccaacgcatgaaagaggatttctcgtgtcatgtcttcttgctcagtccgtatggctagtggtgtccgctgttctgctcctgattttctgcgcgattgccgtttcagccgaagacccggcaagacttataactccgctgtctctctgcgcgctgtatctcggagcgtcttcggcgggaatagcggctgtcaagctctcgggcgacggtattctgtcgggactggtttccggtgtgatatctgcaatgctcacactgtccctctcgtatgttcccttccccgcgtcgtccgtcgagctgcctatgaaagctgttttcatgctgctcatccttccggcaggtgtgataggctcgctcatcggcaaaaagcgaaacagcgccgccaaaagcctgaaaaagatgcaccgttagttattgataccgcgttgatattatgctataatcaagctgtatatcgtatgcggaggtaaagcggttatggcaggtgaaaagagcattcattcgggacacaggcagagaatgcgcgagcggttttcggttagaggatttctcgggtatcagccgcacgaggtgctcgagcagtttctgtatgacgtaattccgcgcggagacacaaacgagactgctcatctgctcctgcaaaagttcggctccctcgacggagttttcaccgcgccacgcgaagagcttctcactgtcaaaggaatcggcgagaaaagtgcggactatatcctctcgctctatcccgaaacaggcgcggaaatgcttgagcagtacaaatccgcggacaatatgagcatatacgaccttgtcatactgtacgactggttcataaaggtttgcagagacgagaggatttatgtgacgctgctcgacaaaaatcaaaagctgctcgaattcgctccgctggagactgaaggcacggtgaacgaagcaatatccacagcggaaaaatatccgacggcgagagtaatgtacctcacgggaagaagcggcgcggtaacgaaggacatggttgacgaaatcaaggcaaaattcgcaaacttcacggcagtagacggactttgtctcaccgacgacgtaggatttgtttccgtgagcaatcccgaaagcgttctcaggctgtacaaaaagccgacaaagaaatcgctgagtctgaaaaagctgataaaactataacgcacggcatgaaataaataccattcataatattcacacatcgggttcataatattagcgtagagcacagaagtcgacgcaacagcgacggtgaaaacgctctgcaagaataaatattttgaatggagtacaaaaatggctaacaacaacaatagcaacaagatcgtagttcccgaagcaaaggctgctatggagcagttcaagatgcaggcagcaagcgaagtcggcgtaaaccttcagaagggttacaacggcaacctcacatcccgtgaagccggctccgttggcggtcagatggttaagaagatctgtcccgaactgaaagcgaaatacacaagagaaaaccgcgcctcctacgtgagagtggtggaggtggggtacatagtgagcattgtgttgtaggtgtgggaaaatttatgaattcactttataaaaaacagaatgatagcaatggtttgtttcactagcatatgcaaaacgaactgataaagcaacgatatttgagcaagagcttgagataaaaataagagcaaccaaaaattccagacacagaccaacggatgatagttgtaaactccatatgaactgagagacggattcttaataattgaattgaggtgaaatttatatataagagaaaaatctgcctgagaaattcagacagatttttgggttagagacttacctttgaaatcacctaaaagaatggtctataactaacctacaagtataataccataaaatggataagattgcaataggttttgaaaaattaattgagtttaattattattttttgtcagttcccgaggaaggtgtttttaactcacgcatagttttgtttataactcgaatttctggattgattttgagcagttctgcgagaaagtcttcgtcatacatacattttgccattacgaggtgaggaaaccatttttgaaactctccgctgtgatagtatcttgatgtcatatacttattgacttttcgcactaggataatcatgctcattctttccttggtgttttcatcctgataataaatataaccatgtgttcttctgtaatccgttgcgtcgattatgaatataccctcgactttagacatattgaccattaatgttatcaaataattttgataaaaaacaaacttccttttggttatatacataccgctataattcaaataacaaaacgtcagaagacttaaccccattaatatggctatgactaaaaaggtcgattcactcaatataggtatatcataaatataacttaatggtaaaatgaagaatgggacagccgcgcatatccataatgcaattgagttatgagagctgggtattaaaaagcaaaacaaagtaccattcttttttctgaccattttgggtgttttgttcagcccaatactatcctcttttgctctcattttcaacttccttgccaataattgaattagttacctctgtcaaaaaagtaaatatcgaattcaaaaaatcatcatcaacatctatcgcactgtcggaactatataatgaaaacacagaaaatattgattctgttaactctcctattttcatgtctagaagccatgaagatgctgcatcaaacaaaattgtttcgaatctatcaacggtcagatcattatttaaataagacttaagcgtttcaccgccaactgatattacaagagctagtaatggattttttaattcagaaacaaatccagatccgaacgcaatcgctatgtccaccacgtagtctgtcgtattttcggcatctgaagtcattgctgctataataccgtttattgcgccgtggatagcggctttgataagcttcgccatctcgccgtcttcatccgcatacatcaccggattgccgacggcatagacatacaaattcccgctttgcacaacagcgataatctgtggagcatacgagtacgtcttcagcccaagcttgtcttcacgctcgtttatcttctgcggattgtctccgtagatcatgttcgacgtgttccagtggg

SEQ ID NO: 2057 - DNA, 1563 bp, Unknown
  16S sequences of unknown bacteria
tgataccggcttttgtggggatcaggctcttgcccttgcgttccacaaatccggcagccaccagcttttcgatgatggccgccctggtcgcaggcgtgccaagaccttttcgctccgcctcgtcggggatatcatcctttcctgcgttctccatagcggacaggagggtatcttcggtataggtcttcggcggctgggtgaaatgctcggtaacagcaatttccgcaccgtcaaaagtttgcccttcggtgaagtccgggagcgtatcgccgtccccatccgcaggcttttccttcaagaaggcacggaaaatgcggtcgatttcccgccagccttcggcaaggacgcgcttgccctttgcggtgaaggaatggccgcagcagtcaaatgtggccgtgaccgtctcatacatatacggctccgccgatgcacacagcagcttgcagcagaccaaaaggaacaaattgcgctcgcccagggtcagagccttgatatccgctttctcaacctccatagtcgggatgatagcatggtggtcagatacatccttgtcggagatcatggcctccaccagcgggaagaagttgccgcagccatcaaagggcggcagctttgctaccaggtggatcacgcaggatgccgtttctgccatatcggaagtcagataccggctgtccgtgcggggataggtcagcagcttcttttcataaaggctctgggcgtagtcgagagtctgcttcgccgtgtatccaaacagacggttcgcctcacgctgcaaggtggtgagatcatagagcttcggcggctgctctttcttctgctcatgggtaacagaggtacaggtgacggccgcacccttgcacgccgccgctgcctgttccgcctccgccggatcggtgaacttctccgacaccgcctcggctccattcagcgtcaggcgcagcagatgatatttctctttgtggaacagcgtgatcttcgtgtcacgctccgccagcattgccagcgtaggcgtctgcacacgccccacattcagggtgcggtggtagaggacggagaaaaggcgggtggcgttgattcccaccagccaatccgctttctgcctgcaaagggcagactgatagagactgtcacactccgcgccagggcgcaggtcactcatgccctcacggatcgccatatcctccatagaggaaatccagaggcgttccaccggctttttgcacccggtcatttcatacaccagccggaaaatcagttccccttcgcgccccgcgtcacaggcgtttaccaccgtatccacatctgagcggttcatcagggtacggagattttcaaaagcgtcctccttgcccggcgccaacacatagcggaaaggctccggcaggatggggaggtcgtcatagcgccacttcttgaaacgctcgtcatagccgccagcatccatcggggataccaggtgtcccacgcaccaggatacaagaaggccattgccctcataaaagccgtcggccctggatgaagcacccagggccgacgcgatagattttgccacactcggtt

SEQ ID NO: 2058 - DNA, 14878 bp, Unknown
  16S sequences of unknown bacteria
attggtctttcaccgcctacctctcctttgtattgaccgaatacagcctttaatcttatagtcgtccaactccgcttctttgcgtatttcgattaatacgatttccttatacgtttttctggcggcgtcatctgactttttatcgctctcctcgtttgagggcttcgtatctttctttataacgctctgctctttcatgctcctgctccgcctctctgcttatgtggtgtatgtatatggcactgatgattgttattactatcccataggcaagccagaagcttactgtttctactgctgtcattgtggatcctcctttccctctatcaactccgctatgtcgatattcaattttttgcacacttttcttaattcgcttaaacgaaaatgtgaaggacttctcagtctttcatataatgttgatacgctcaattgcgcagaaacggctaactcggttgtcgatattccgtttaactcctgtttgtagataatcattgctctgatttgtttatcaagctcattatctttgttgatacctaatttacttttcggcatttcttctcaccccgccttgccctcttttcttgttcgtaaaattttttgtgatatactcctgtttaaggagttgataaattatggtatttcaacctaacgaagactataataaaatggtaatgctttatattcgggacaatcttacatatcgttcaagcggaaaaccgattattataaaacccagacatatttggtcttgcaacaaaaactgcgactatctattaatctgccttacagttgaatatctctgcataaagggattgctcataagacagcgcaacgatgtatctcctaaagctacaaatataatcggtatttctgaaataggttttgaatacattgatctgattgaaaactcatctatctgggataaagtaaagactggtttttctgtagacaaattcttgtccttcattaataccggcttgtctatagctgaaataattacaaagctatcactttagcgatttctatctgttccccattcggttttatccaatcaaacagcctatcaaccgctgtatccaaatctgtaactctgtttgtttcaggattgacaacatcccattctctatcaaccttgataaatttatctgtgccaaacagtatccattttttatctctcactacatatctaaatcccgctgcatacataccttgcagtattgttttttcttgctgtgtcatctttccacctcctaactaaccttatccgatataagctcgtccaccgttacaccgattttgtgatataatgattttaaggagttgatagttatggatagtaccacaaatcaaataatcgcaactggaattatctctttactcagcggcattttagcttcttatataaccattgtttctaatcggttaagcgataataaaaaattattagccgaatatatcgcagaggttatttctttatattctgaatttgctttaaagaaagatattgaaataacaagcagactaatcgccgcaatagaaaaagcaatgttgttttcaaacaaagagacagagcttcttttgcttgaactccataactaaatcttgaatagtcctataaacccccagaagtgtggagagctgatgaagctaattcatgattcagctaagaagcaacttaatgattaataccgcaataacgatgtcgcatatcctacgcactgaatcaaataccctaattgctacttctttttttaattctttcatctttccacctcctactcgtttatctcctgtcgggttcttcgtttactcctaactaaccttatccgatataagctcgtctaccgttacaccaagaaagtcagcgacttttttaatgctatctagtgtcggtgagcaagatttccactttgatataacaccgttgcttaaacctgtcttttcttcgagaagccttatacttatttttctctttgcgcattcttcttttattttgtcatatagcataaattcacctcctgttttttatttagatttttttcggaaaactcattgactaaatttagattatattctaaaatatacttgtctaataaaattttaatagtaatctatatttaggatttttcctaacctttcctcctcattgtataggaattattctaaattgtcaatacttattttaggaatttttctaattcaaaggggaaatttatatgtttaatggagtagagtatgtaagggagttgtgtaaggcaaaaaaaataccaatttccaaacttgaaaaggactgcggtttttctaacggctatcttaatcctaagaaggtaactaaaataccttatgaccgtgcgttaatcatatctaaatatctaaacgtaaatgtaaacgcattattaaatggacctggcaacaaaaataacgaacctcagattcctaaaggggcgattcctgtagatgtatctgattttgtaaaaatccctataatcggcagtgtgcgttgtggagagccgatgtttgccgaaagtaatatagagggttatcaattgacttcctccgatgacttacttgaaggatatgactatttctatctcagagccaaaggcgatagtatgattaatgcaggaataagcgaaggtgatttactacttattagaaaacaaagcgatgtagacagcggagacatagctatagttaatgtaaacggcgatgaagaaactttaaaaagagtaataaaaaaagacggcgctattatattgcaaccggaaaatccgtcttatgagacaaaaatatttatgggcagagaattaaacgatatatacattcaaggaagattaatgcaggtagttaagaggtattaacatatatatcaacgccaagttatcatacgaagagcagcaacgtgctatataccatgagttgacacatattaggaggaatgatttttattccgaggcatcaatagagtaaattgaggatatgtagatttataaagaaaagatgattaaactgtgaaatacagaaaaattattattaaaaatacactcattttattaataattctatttactttcttttgcgtttcaacaatgtttctggaagaacatgccgaaaacaaagtatttgctacccaacagctattatacgaaagacaattatctgaatataaaaaagatttagctgactataaaaagacatatgacaaagaatatgcctctgaaaaaaactctataatacaaaaacaaaacaacggaggctatggttactatacagtttcaatgtatgttgactgtgaatacaaccattctgttggcaacgattgggagtatgtaacttatataaataatgattatgtaaaagacggaagcattataaaatgcccgacaaatgcggaatctgaaatatatgttgaatgtattgagcatgatagtatcccagatataagcacttatacatattattgcactatagatgaagattcatcattttgtatacatatttataatacagaaaatcgtggaagatataccggaaatactgcgaaacatacattttattattcatttgacagatacataaatgaaaattcgatattagctcgcatatcaaaaaaacttccagatgagcctactgagcctaaagaaccaaaacgtgaagatataaagctttcatctatacaggttttggagcaagaacctttcatctttattggatttttagctattttaatattgtgtatatttagattccgtatagaaattatagcaaaaaaagaacttgaaaaagaaaatttagaaaaaatacgcttggaagagcagaaaaaagctgaattcctctctttatatggtagtaaaagcacagaagaattactaagtatgtcgggagcacccaatggagttacaatagacgatgatggtcttcctgctaaatacattgatggcgtaaatatttatgaagtatatacatcgtataatggcagtaaatatcataaaaagacttgtaggtatgcagttaaaggaaaacctcataatttagtttatgtaagtaaaaaaatattaccttgttcattatgtcacccgatagaagatgaccttgcctggtataaaaaatataaagaaatacttgcattaaagaaaaaatatgaagagagctgagaataaaatgtttgataataaatttcaagaaaataagaatgtgcctaaaaagacgcatccccataaaagtgtcatatttttgtttatagttcttgctatactactcgttatatctgtcagcgtaattatttcacaaagaagatacaccaaccagctaaaaagcaatgttgagtattataaagaacgcttaaaagaaaaagatgatactatttctaatcttaaaaatgatgtccgctcaatgaaaaatgaacttaatttttatgaaaacaatgctgtaattgttacaattaacggtcaaaaataccacaaacatacctgtcagtatatagtggggaaaaattattatatttataatatagcagctgctgagcattacggttatgaaccgtgtgatatatgttttaataataatgaggacgatcatattaaaactaaatttgaagaagatctcgacaggatcaaagaaaaagtttcatcttaatctaaaatgagttctatactaggaggttctacaaatgaaaagaagaattttaacgcttgttttatcttgtagtttgatattcggtgcagttcctgcttatgcacaggaaatcaaagactcaacttctgctgtatatacatattcaatgccattcgatactaagttaaaaacagtagacggtcagctgtacataagcgccagagatgcagccaccttactcggtgccggcatttcttgggatagctcaacaaagacagctgtaatttttgaaacagaccatacacttgtctttaaagtaggcgaagcaggatactataacaattctgttcaaatgtattcttcaaacaagcctgttattattgacgaaacgtgttatatatctcttgcagattgtcttaaaggtgccggcagaagatatgaatatttatctgatggttcaataaatgtgttgtgtccgttaaaaacatacaacagcggcatgatgacaagtgatgaatatgcacaacagtatttgaataaaccatcaacaaatcagtattataaaccgtatgttccctactctactaacggtacatattcgccaaatgcaaactattataataaatttgattatgattataacaaatacgaagaatatgcaaacgaactgtacgaaaaagcagaacaagcaaaaaaagaagctgccgaacttcaacagtatgatcctgcttatgaagaagctgccagagatgcttatatcaaatataaaatggattctttaaatgcaagcacatacggaccttatgcgggagtatatgaagaagctgctcgacaggagtatgaagctgcccttgcaaaattaggtatatataactaacccccataagcctaatggggaaaaataaaaatcccctgtgcgccaacacaggggaaagaaaggttatgcggtatatgaatacctacgaacaatttaagtatatcatacgaccgcttttatttctatataaaaataaataaaggaggtctttttttatggctactgcaaagaaactccccagcggacagtggcgtacattagcttatagccacacagaaacaattgacggaaaacaaaagcggatttacgaaagctttaccgctcctacaaaaaaagaagccgaatatatggctgctgaatttatgttaaataaaaagcgtattcatattggcaatcttacatttattgaagctgccgaaaactatattgccgataaagaaaatatcctttcaccgtcaacaataagaggatacaagtatattatcaaaaaagaaaccgaagatataaaccaaatccctattaaaaaaattgacgaaaagttattacaacgctttataaacaataattcggttaaatactcttcaaagagcataagcaaccaaatcggatttatttcggctgttttaaaaaaatataagatagttctcgactttgactctttaagtcgcaagcctaaacaaaaacgagaaattcttattccgtcagaaaacgaagtattaagcttactgcgcatttcaaaaggaacaacaatggaagtccctttaatacttgccgccttatgcggtttgcgtcaaagcgaaattgcaggctgtacatgggataaattaaacggaaatattttaaaaatccgtggcgctgtagttatggatgtagacaataattatgtacataagcaggaaaataaatccgtttccggcacaagagatattatattggttgattacgcagcaaaaaggttaactgagataaaaaacggaagaacaaccgggtctatgtcggaaatgacaccatcaggcgttctaaagggattaaaacgcttatgccgcgagcttggcataaatgaatactccatgcactctctcaggcattatcatgcgtctacaatgttatcgcttaatatccctgataaatatgcgatggaaatactgggtcaaaacagtcctcacatgctgaaaaccgtatatcagcatacgttttccagtgaatttgtaaaagtaaactctataataaacgaacactataataatattatgcaacacgaaatgcaacacaataaaaaataaaccccgaattttcggggtttttatgacggaggcggtgggattcgaacccacggtaccgttgccggtacacctgatttcgagtcagggccgttataaccacttcgatacacctccgcagatactttgctattatagcatacagatgatataatagcaaatgttttttagatattttctcccattttctctgctttatttaaaaattccgtattctgtacatctcctttattccatactccatctgcaataagcgttcctcggtctttccatttcaaatgatttgcaataagtttatatgtagatgtaattccgtcaaattcttttatttcctgagtagctccgcatactatcagcgcacactccttgcccgaaatatcttttccggctgtaccgaaagaatagattttgtcaataacattctttatttgagatgtaaatgaaaaccaatacataggcgttacaaaaacaattacatcacacttctctatttcaggcgcaatcgtattaaatccgttggaaaccgcacacgccccgtcattagtaaaacatttgtcgcatgccttgcacggtcctatattcatacgccctgcgtcaaatcttacaacattattatcagcggccaccgctccgtcaataaaggcgtcggcaagtctgtcgctgttcccgtcaactctcgggcttcctgtaataaccaatacatttttaccagccattttttacctctcctccgcttaacaataaaattaaaacctgtttaatattataacagttaattcatttaatgtaaagcaagccgtaatttactgtattatcaacattataaattatacggtcaaataaaaaaggccgaaaaatccgagaacgtatataccatattcaatccgttccgtttttatcggtctgtatattaaaagaaggataacttaaccggctttgacgccgcttagtctattacttactgactgtagcgacgtcatgcctctgtataatatttaaaccaaacgaatataaattcgtcggattgttgtaattactcctttgccgttccggggtcgtttatattgccgagtacagccgttacatcaacggcagtatctccgtttcttattattcctattttaacttcgtcaccgacattgctttctccgacaagagctacaagggtatccatatccattacatttgtatcgttatatgatactattacatctccttcctcaattcctgcctgctccgcacatcctccgctgattacggatgttacaagaacacctacgggaagtctgtaaagttctgaaagctgagtcgtgatgtcctgacccgtaatgcccagataaggtttttcaaccgatcctgtctctcttatttcctggagtataggcaccgctatacttgacggtattgcatatcctactccctctgcactgcttccgtctgttgttgtaaatgtttttgcggtattaattccgattaccgctcccgaatagtcaacaagagctccgccgctgtttccggggtttatagccgcgtcagtctggataacctcaagttctttaccttctacgtttacagttttattctcggcgcttatcataccgcctgttgttgtttttccttctccaagggaatttccgattgctataacggattctcccaaattaacttcttccgatgtgtcaaatgtagctattgtaacattttctatgccctgtgcttccaaatcggctttttctacggaaagcactgcaaggtcggttgtttcgtcatatccgactaccgtagccggtattatttcatcggcgtcatcgaaagcaattgctatattttgtgcgccgtctataacatgttcatttgtagcgacatatacaagagaactgtcttccgagaaaataactccgcttcccgctccttgagctttatagggaacggtatagaatccatagtttgccattccttccgattcagtcgtaatacttacaacagcgctatatacagaagctattgcgtcgcttgcagaacttgatttaattgaagatactgccgcagctgtagttgtcagtacaccgtcgtacgtattgcctttgtttccgctgaccgctcttgaaaaaccatatccggccccgataccggtacctattcccaggctgcatacaaggcatattgctattgcttttccgaacttgttattcttttttgtctttacctttatctcataataaggggattttccgtttccaccgtttgcagctccattcgttttttcatcttttatatcttcttttttgtcatctgaattgtcgtctttactgaaagcaacttcatccgaaggtttttcagccgcatttaccggcacattcaatgtttcccttgcggtaccctcaaaaggcttatcatatacgttctcatatttttcagtatcatgtgaaggatcatctgcatttatgtatccttttgaatccacagttctttcctcgttattttcctttccatctgtattgttaggattagcattatcattttgatgttcctcataccatcccatatttattcctccttaatatctaatgtcgttttgcgacttttttattatcttttctatgttttgaattataataatcatttttgaacaccgtgtgaacaaataataaaaaatacgttaataaaaaattttgaaataatgaatgtttaatcgctataaaaacccataatcaaaactttttgatatgccgccctcttcctacaatcgtttttctttggtataatctcattattaataaataaagcaaaggagactttccatgacaaaaattataatcgccacaacaaatgaaggcaagatgaaagagtttcgttctctgttggcacataaagatgtagaaatcatgtcaatgaaagaagccggaatcgatattgatatagaagaaaacggcaagacgtttgaagaaaatgcagctataaaagcaaaaaccgtatgtgatttctgcggctgtatatgtctttccgatgacagcggtcttgttatagactttctgaacggagaacccggtatatattcggcacgataccttggccatgacaccccatacagcgaaaaaaataaaataataatcgagcgtcttaacggcgttcccaaagaagaacgctccgcacgttttgtatgcgctgtagccgccgcttttcccgacgggagggtaatgactgtcaaagatactatggaaggttatatagcggaatcggcagccggaaacggaggtttcggatatgaccctattttcttcttcccacctgcgggaaaaacaagcgctgaaatgacgccggaagaaaaaaacgccgtaagtcatagaggaaaagccctaagaaaaatggtttctcttcttgaaaaggagttttaaatgaaaatacttgttttttccgacagtcataacaatacaggtattatgaacgatattgtaaaaaaatacaactccgaaatcgactgcataatacatctgggagactgtacggacgatacaaccgaattcagtactatatgtcaatgcatacctgtatttcaggtaagaggcaacaatgattatgacagtctttatccgcatacacgcactattacaataggcggcaaaagaatatttatgactcatggacaccgtcataaggtttattttaatactgacggcatatattatacggctgctcaggaacaggctgatatagctcttttcggccatactcatataccttaccttgaaaacgaaggcggtatcttagtaatgaacccgggcagtatatcccttccgagaagctcctgcggcaggacttttgcattcattacaatagaaaacggtaacataaccgcttctataatgatatacgactttgacaaaacggaaaagttaagaagtatttccatataaaattttgaataacctattacataagatcccccttaccgtctcgtattcaaagacaaattcgggggattatttttgtatataaattttaatgtcgtccgttttaatactctctgcatttatttgttgtaatttaacaaataacatactcatacttcccatatagctttgccattatgtagcgtatgtataaaatctaagttaaatataactattttttgtttaaagtatttaaaaatgtatgcctttatgataaaatcagcttgtagttaatattttccaccgctgaacagataacaaatcctgttgcggtataatttattaaaggaggattatacatgaaaaagaaattaatttctcttatcacggcagctgttatggctctcggaatttctgttccggctatggctgccgacgcaaaacccatggagggcaaacttgttgtagtgcataccaacgatatgcatggctattacgaaactaccgaaacgtctatcggtattgccggagtagcaggacttaaaaattattatgaagcacagggtgcagacgttcttcttcttgacgcgggagacttttctcagggaagtactctcgtaagctattataaaggcaaaaatgccgcagaatatatggcggcggcaggatacgacgcagtatcaatgggaaatcatgagttcgattactcttttgacgcacttcttgacaatatgaaagtccttacagacgcaggagtaaaggtaatcgacgctaacgtaatcaataaagaaacagtaaaatcatactttgacgcaaacgccgttttcgagtttgacggaattaaagtaggcgtattcggtcttgatacatctgaaacgcttacaaaggcaagtccaagcaatgtaaaagccgtaaacttccttgataaagaagaaatgttcaaagaagctcaggctcaggttgacaaacttaaatcagcgggatgcgactatataatcgcgcttacacatctcggtgtcgatgaagaaagcgtaggcagacgttcaacagaccttgctgccgctgtaaaaggaatagaccttattgtagacggtcatagccatacagtaatcgacggaggagaaaaagtcggcgatacggtaatcgtaagcacaggttcttatcttgcaaatgtaggtactgtagttatagataaagaagcaaaaacagaagaagcgaaacttatatcggcagcagattatgccgcaggtacagcacagtatgacgaaacagttaaagctcttgtagcagaagacgttgcagaagtagcggaagcatactcaaaagtatttgcaaaaacagaagtacatcttgaaggtacaaaacagatcgttcgttcacaggaaacaaacctcggcgattttactgccgacgcttatctctatacagcacagaaatatgcagacgagcacgaactcggcgttaatgttgactgcgctatatcaaacggcggcggtatccgtgtttcggtagaacccggcgacatctcaatggacactcttgtaactatattcccgttcggtaacaacgtatgccttgttactattacaggcgaacagcttcttgaagttcttgaggcttcaacattctgtactcccgaaactatcggaggtttccctcaggtagcaggtatagaatataaacttgatgtaagcgttccttatgaaaacggagaaccgtatcccgattcaacatattacgctcccgcaaaacccggcagcagagttacaattaaatccgtaaacggtaaagcttttgatcctaaggctgaatatacggtagctgtaaacaacttccaggcagaaggcggagatacatattatcagcttacaaagaactcctacttctgtgatactgaaattcttgactgcgacgcacttatcgaatatgttaattccctcggcggagttatcggagagcagtacaaagagcctcagggtcgtatcgaaatcgtaggaacagctcccgaagtaaaacccgaagaagtaaaacctgaagaagaaaaacccacagttgagcctactcccgaagttcttcccgacggaaatatttatactgttatcgacggcgatactctttggaaaatagcaaaatcacagcttggcgacggaaagctttggacaggtatatatgaagacaacaaagctgaaatcaaaaatcctgatttaatttatgcaggacaggaacttgttgtaaataaataatttttatacacaaaaaggctcatttaaaatgagcctttttattattccgttttttgtcaacaatctctttagaatttttacgaagccttttttaccatgtccataactgaagtcagcggtctgaaaagtactaatgtcaaaataaaattacttatgcagtgtataatatcaaacggtattcccgctatccaccatgccaacgccgttttcagtccgccggtaaaaacatataccaatgagcacatccctccgaaagcaagtccgaaaacagctgaaataatcgaccaaaaaattgtttctctgtgctttgcaaataaaagaaccataattgcaagtaaaggccatacatatatgtacattacagtccataaattaaatccccatactgcacagtccaaaattatgaaaataaatattgaaaaaaatacttttttcccaaaatacaatgtataaacaattataagcagagttacgatttccacattcggcaaaaatgacagtgccgcttttcctgctataagcacagcgctcattatgcctatttgggtaacatccttagccgatatttttgtcattttatttcctcataaactatctcaaaaacatctccgtcattaacaggctgtctgtctatactgtagttacagtattcaccatttacataaaacgcccaataagcgttgatattatcggcttttattccgtttacggtatcaacatacaagccgtactccccttcttcaccgctgtattcaaaatccttttgttcaagttcgtccataacctgttttaaatattgcgcttccgtatttataaaatactgcttctcataaccttcatcatcagtaactgcaatatccacagatttgctgccaagtgtaacatccggttttcccaccagatatataactaacattacaactattgccgcagctacagtcactatgccatataaatattttttactcttcataataatcatccccgttaatttattacgttaaaccgtagttttaatacagactccccaatcgaactttttactgtatatccgcttttacaaaaacatctaacattatacatcataaacaaaaactatggaatagtattttaatatataaagggaatagccgccctgttatattcatacttatacataaagacatatttcggagtaattatgaaattcagagccatatatttaaaaaacataaagaataccgttgccattgcatgtttatgcgctttaatagcaacagtaggaataatagaggacaaacgaacaataaatacaatgctgcctgttgaaaataaagtagtcattatcgacgcggggcatgggggattcgaccccggaaaaacaggaaaaaacggagataatgaaaaaaatataaatctaaaaatatcatcatatttacagcagtatttagagcaaagcggagcagttgtaattgttacaagaaacactgacagcgcacttggcgattccaaacgggaagatatgtcagaacgtcgccgtataagtaacgaaagcgacggcgatatacttataagtatacaccaaaacgcatttacaagcggtcagccatcaggggcacaggttttctatttcaaaacaagcgatgagggcaaacgtctggcagaacacatacaacaatcgcttatagatactctcgataaaaacaacaaaagacaggctaaagccaattcggactactatgtccttaaaactaccgaaattccgtcagctattgtggaatgtggatttttgagcaatgcagaagaagaggcaaaactgaataccgatgaatatcaacagcagacggcatgggcaatatataaaggcatagtaaactattttaatgaagtataaaagtctgcatttgtatttttgacttactcaaactataagtatcctccttttattaaaataacaaaatgaggatacttatggatattgaccgcttgataaactggaattgagatttcatatattccaagggatttaataactgttatattttattatca

SEQ ID NO: 2059 - DNA, 18370 bp, Unknown
  16S sequences of unknown bacteria
ttgcgggtcaataagtcatgctttttcatgcaagcatgaaacgcatgaccttttgacccttgtgtcatcatcttacaagttcgtatagcccatcagatactgatcgacttcctttgccgcctcgcggccctcacggatcgcccatacgactagtgactgcccacggtgcatatctcccgcagtaaataccttcggaacactcgttgcgtatccgccaggcttcgtcgccacattggtgcggccatccagatccaccttaaatgcatctgtcacatatttctgagagccgaggaagcctgctgcgatcagcaccagatccgcctttaccgtctcctcgcttccctcgatcggcaccatcatcatccggccggtcttctcatcccgcttgccttccagcttttgcagcacaaccttgcagagctcgccttttttattcatgacaaactctttcacggtcgtcgtatacagccggggatcatgtccgaacacggcaatcgcttcctgctggccgtagtctgttttgcagactctcggccactgtggccatggattgcccggcgccctcgtatccggcgccttcggcatcatctccagctgcgtcacagaagctgcgcccaggcggatcgacgtgccgacacagtcatttccggtatcgcctccaccgatgacgatgacgtgcttcccttttgcggaaatatattttttatctgcaaaatccgaatcgagcagactctttgtcgtcgccttcagaaaatcgactgcaaaataaatgccctttgcctcacgtcccggtgccttgatgtctctcggattcgatgccccacaggcgagcaccacagcatcatattccttcagcagatcatccgccctgacattctcgccgatattggcattcgttacaaactcaatgccctcctcctgcatcagtgcctgcctgcggtcgatgaccttcttatccagcttcatgttcggaattccgtaccgcagcagccctccgatccggtcattccgctcaaataccgtcaccttatgtccacgcttattcagctgcagcgctgtcgcaagaccggatggaccgctgccgacgactgcgacctttttcccggtacgcacctccggcgggcatgcttttacgagaccggttgcataggcattttcaatgattgcacgctcattcgccttcgtcgtcaccggatcaccattcagattgcacgtgcaggctgcctcgcatagagccgggcagacacgggatgtaaattccgggaagcaatgcgtcttcgtcagtctccggtatgcctcctcccagttaccgtggtataccagatcgttgcactccggcaccagattgttcagcgggcagccggaggccatgcctccgatcatcatgcccgcctggcagaacggtacaccgcacgccatgcaccgtgcgccctgcaggcgctgcttttccagagaaagcggaatatggaattcattaaaattctgaattcgttccttcggtgcgatttccaggtcgttttctcttttgtagtctaaaaatccagttggttttcccatctctcacacctcctacttttcgttctcactcatgctggcataaaatgcctcaatctgagcctgttcactgctcaggcctttctcttccatctgtacaatcgccatctgcattttcttaaattcatgcggaatgatctttttaaacttcggcaggtactcactgaaattatccaggatttccttgcccttttctgaattggtatattttacatggtcattgataatgtccttcagctccagtacatcgtacttcgaggtcagcttttcaatcgccaccatgttcttgttgaccttcgtgtaaagatccgaatcttcatccaggacatatgcgataccgccgctcataccggctgcaaaattcttgccgacccggccgaggatgactgcgcgtccgccggtcatatactcacagccatggtcgccgacaccctctacgaccgcaactgctccggaattacgaacgcagaaccgctcgcctgcgacgccgttgatataggcgctgccgctcgttgccccgtaaagcgcgacatttccgataataatattttcatcatgttcgaatttcacgccctgcggcggatatacgatcagctttcctccggaaagaccctttccgaagtagtcgttgctgtctccgaccagctccaaggtcagccccttcgggataaatgcgccgaagctctgtccacccgcaccgtgacatttcacagtataggtatcctcttccagtccttctggatactttcttgtgatctctgagccaaaaatcgtaccaaatgcacggtctgtattcttgacatcaatctcaatgctccgctttgcgcctgtttcaagtgccgacccaagcttcgcgaccagcaccctcatatccggtgtcttctgcaggccgaaatcatagaccttctgcggatcaaaggtcaccttttctcctttgtgtgcatatgggttgtccagaatattgctcagatccagcgaatagccatgctcattctcgcaaacctcttttttcttcagcagatcacttcttcctaccatctcatctaacgtacggaatccgagtcttgccatatattcccgcagatcctgcgcaataaaccgcatgaagtttacgacgtattccggtttgccacggaaccgctttctcagctccggattctgggtcgccacaccgaccggacatgtatccagattgcagacacgcatcataacgcagcccattgtcacaagcggtccggttgcgaagccaaactcttccgcgccgagcaacgctgcaatcgccacgtcgcggccgctcatcagcttaccgtctgtctcgatccggaccttattgcgcaatccgttcataatcagcgtctgatgagtctctgccagtccgagctcccacggaagccccgcattgtggatggagcttctcggagccgctccggtacctccgtcataaccggaaatcaggatgacctgtgccccggcctttgcaacacctgccgctacggttccgacacctgcttctgaaaccagctttacagaaatatctgcctgacggtttgcatttttcagatcgtaaatcagctgcgccagatcctcaattgaataaatatcgtgatgtggcggcggggagatcaggctcactcccggtgtggaaagtctcgtacgggcaatccacggatagaccttcttgcccggcagatgtccgccctcacccggcttcgcgccctgtgccatcttgatctggatctcttttgcgctgaccagatagcgggaggtcacaccaaatctgccggaggccacctgcttgatcgcggagcagcggttctttccatccggtccgatcgtcagacgatccagactctcaccgccctcaccggtgtttgacttaccatgcagcatattcatggcgatcgccagtgtctcatgtgcctcctgtgaaattgatccgtaggacatcgcaccggtcttaaagcggtgcacgatggaatcaacactctcgacctcgtcaatcggcacaccctgctccggataattaaagtccataatgcttcggatgtaaccggtctcctcctggtttaccatatcggtatactgcttaaacatctgataatttccggtctttgtcgactcctgcagcagatggatcgtctgcggattgtagcggtgatgctccccggcacttctcatcttatgccagccctggctgtctaatgtcagatcctctttcagcccaagcgggtcaaacgcctttgtatggcgggtatcaacatcattttcgatatcctttaaggaaataccgcctacgcggctgaccgtattcgtaaagtacttatcaatgacttcactgctgatgccgatcgcctcaaagatctgagatccctgataagactgaatcgtagaaatacccatcttggatgcgatttttacaataccgtcaatgatcgccttattgtaatcgctgactgccgcatagtaatccttttccagcatgccgctgtcaatcagctgatggatcgtatccagtgccagatatggattcacggcactcgcgccatatccgagcagtgtcgcaaagtgatgaacctcacgcggttcgccggactccagaatcagagccagagaggtacggcgcttcgtgcgcaccagatactgatgtaccgcagagaccgccagcagtgacgggatcggcatacggatttcatcgacgccgcggtcggtcaggatcagaatgtttgccccatcccggtatgcacggtcgacctcgagatacaggtgatcgatcgccttttccagtccggtatttttatagaaggtaatcggtacctctgctaccttgaagccttctaccttcatatttttgatcttcagcatgtccgtgtttgtcagaatcggattatcaatgcgcagcacctgacagttctccggcttctcttcgagcaggttgccctcgacgcctgcataaatggtcttagaggtaacgatttcctcacggatcgcatcgattggcggatttgtaacctgtgcaaacagctgcttgaagtagttaaacagtggctgatgacgcttggaaagtacggccagcggggtgtcgattcccattgcgctcgtgccttctcctccatttgctgccatatttaaaatagaagtccggtaatcctcgtagctgtatccaaaagccttcatcaaacgcatccgcatctcatcaccgtaggactctacacgcttattcggaatcttgagatccttcaggcttacgagatactgatccagccattcaccgtatggctgacgggatgcgtaacggttcttcagctcctcatcatcgatcacacggccttccaccgtgtcgacaagaagcattttgcccggatgcagccgctcttttaaaacaatcttcgtcggatcgatatccagcacaccgacttcggaagaaaggatcatatagccgtcatccgtgatgtagtacctggacgggcgaagcccattccggtcaagcaccgctcccataatgtcgccatccgagaacaggatcgacgccggtccgtcccacggctccatcatagtcgcataatactgataaaaatcatgctttttctgagacattacacggttgttcgtccatggctccggaatcataatcatgactgccagcggcagatccatgccgttcatcgtcaaaaactccagcgtattatccagcatcgcagaatcagaccctttggcatttatgaccggaagcaccttgtgcatatctgattccatatattcagaagccatgcgctcttcccgggccgccatcttgtccgcattgccccggatcgtattaatttctccgttgtgcacgatgtagcggtacggatgtgcacgctcccagctcgggttcgtatttgtgctgaaacgggagtgtacgatcgcgatcgctgagtcataatccggatcctgcagatccttaaagaaggtccgcagctgccctaccagaaacattcccttatatataattgtccggcttgaacaggaaacaacgtaagtcgtatcattcgactgttcgaatgtccggcgcacaacatacagccggcggtcaaacggaagtcctttttccacatccttcggccgttctacaaatgcctgctcaatgcacggcatcttttccagtgccttatgtccgagcacacccggtacggtcggcacctggcgccagccaaggaagttcattccttccttgcgtacgatactctcaaacattttcttggcctgattccgtttgaggacatcctgcgggaagaaaaacataccaactccgtaatctctttcttcacctaaaaagatgccaagttccaaacaggtcttgtggaagaatctatgcgaaatctgcagcatgattccaactccatcacctgtttttccctcggcatctttgccagctctgtgttccaaattttcaactatactcagtgcgttctccactgtctggtgtgtcttgatccccttgatatttacgactgctccgattccgcagttatcatgttcaaactccggccggtacaatccaggttccttacagacaggacgcgacatttctctcgtatccatctcatttcctcctgtattgagttttcggttgaggacactatacacccatttttttcatttgtaaataacaaattttcttttaattgtcagataatttgtcatttcttattttaaagcatttttgtcagttttttatttgatttttcgagcgtttaaaccgattttgaaacaatttatatgtatcctggctacgaaagaagattcaatacgactgctgtcaggttcgctcccatatgaaaggccagagggcaggcaaaccagccgctgcgctcatacagccaggccagaatcagtgcaagcggaaatgcaaataccatctgaatcacatttccgtgaaacaatgcaaataaaagtgcagagaaaaaaatcgctgcccccgttggaattcgtttccggattctcgtatagatcaacccacgaaacatcaactcctcagccagcggcacaagcatccccagtccgagcagctgtaccatcgcctgtccggcaaacagctgctcctgcaccgcattagaaaaatgttcctgaattcgaagctgctgcaggattccgctccagagcaaattcaggacaccgccggatatggcgcacaaaaccaatataccgatcaaatatgcggtctgtcttatgcctttccctcttttcccgtttttttctgtcctatttgttttcgctgctgccgtaccctgcatgttttgagatcgccgttcttcatgctgcgctccgtcaaaacgacagatactcttatttgagtgcatgcccttcgccgcatcgctccggtacatccagatcagaaccggcagaaccagaagtgcggtcacagaagtgcacaccgccgaatccgccgccgcgcctccgattgcccctcccgctgctgtcacaataaccgaaacagccatatgcagcagcaccggtgttatcaatgacaatataaattccatatgcagcctccttatgcctttttaatacttttctgacagactgtttttctctgctttaaggacaaaacaagctgcagcaatcttttttcgcggcagcctgttttcattctctttaattctttacctttacaaatctgactttttctatattcccgtaagcatcatcctgtttgatcacttcggaatgacatccatctgcattgcatctatatgccatgcatcctcataatatgccattgtaagctttgcggtcgcatcgccggactgttcctgcgtcgtcgtctgctgcgcataagttccgtcttcaagcatttcatcggtatctgtcgtgacatcctcgcgcactacatagtgataagagaacgtcatctccgtcgtaatcgcaccgttcttctcttcggtaaagaccggattgccaaactgtgccgcgaaatttgaaatcgccacatttttaaaatcagctccatccaccaggaagctttccgtctgctttttaatcagtgaatttgcctgcttctggcactctgcaagcagtttatccggatcattcgtctgatttttcaccgcagatacatagacagccttcagaagctttacaccaagctctgtacatgcgctctttgcatcctctttcagaggcattttatctgtataatctgcacttcctgtagtcgcgtccagcgtcgtatttacggattccagcgccggatgacggatcacaaggctgatttttccaggaatcagcgtcggtatctgataacggtcgcaggaagccggaacatcttctgtgacaagccacgacgcatccgcctgatccgcatccagatacacctctgatccgtcaggaacggtcagcagaaaattttttaccatacaatgctcggaaagcaccttccagcgatcaaacagacccatgatttgcgctgattgcttctttaccgtaaagcgttccgaagcctgttcctcacctgctgcattctgaaaggttacatcatagtctacatattcattgccattattatcccggcgtttttccgcttccttcatctgataggaggcatacagactatactttttagcctccagtgcaccttcatattctgcctttgtcagttcctgtgcctctgactgatccaggctgctgtacgccttatcgacgctgttgtcaatcagcagtgcaagataatgatccattgcatagtcagccgtgctctggcgacttgcctgatagcacgcggcacctcctcctgaaataccaatcacaagcagcaggagcagtaattttatcagaactcttttgaataccttcatgttctctcctcctagtttccggcaagcgccgcttcataattgagaattaccttcagattcgccgcttcgtaatcgttcaggtaatcgaacatgtttgcatcaaaatcatccggatcataagtcggaacataccacgacttctggctgaaataatcccgaagatcctgtgaccggaatattcttccgtgcaatgcaaagatctcatttcggatcagacgaagctgtcctgcactgtaattatacagctcgctctcgtcaatataccggctgctgatcccccacagaattacgtcatccggcgtcgcagccgatccctggccatttccgtttccaccgctctgactgctgtttccggaattgctgccggaaccggagtttccgcttccactgttgccggagccggagcttccgctgttgccggagccgccattataggaatagcttccatttcccggatcggtaatttctatcgcctgtcctccggagctgctcccatttccagcaccattttcatagctgccgtcatcccatgaggtatctccgccgttgctattggatgaatcattttcacctgagccgcctgagctattgtccatgcttccggtatcccagtctgtgtcttcctggccgcttcctgtatccgtcgatgaaatcacattgccattttcatccgtctgtggtgtgatcgcactgccattctcatctgtctgtggtgtaatcacattgccgtccgcgtccgtctgcagctgttccgtctctttctctgactgctttggtgactcggtttctacgcctttgacgaccgttccatctgccgtcacggtaaacggatccgtctcatatgtatgcttttctgtcatctccggtgcaagctgtctttctgaatcgttctctgttgccgcttcttctgatggcagcttcagggtcacctgatctgacattacaacatctgcagcaaaaaaagatacaccggctgcaactacgcagccgatgataaatccgctgtttctcttcagcatatttttcctcttcattccttatccttcaccccttcaaggggcatgataacacagttgtcagaaaaagtccacgcataactcacgttttcctttttcttacaggcaggatacagaccagtgccgtactcagaaacaacagtccgccaaacaccagaaacagctttcctctccgttgccgttcctgctgccgaatcttcgtcacggcagatatttctccctttttttgtccgttttccttcttctcatccgggatctgtcctgcttttgcaacatactgctccccggacattcccgccgccgacagctgtaatgctgtgtgcagcctgatcgtcccgggggccagaatcgcactctgctgcttctgctcctcctcttcctgcgcgcttttccgctgtttctgatacgggactgtctttgcccctttcgtgttgacataaaccgcaagctccggagtccagcattcatttccggcaaaatcacataccttcgcctgaagtgtctgccattcctctgattctgataaccggatcttcaccggaagctcggacgtattcaccgtgtctgtctgataatacagctcactgtccttataaattttcaaagtgcgcactccgacattgtcctgcggccagaaacagactgtctgcactgccgtctgacagagctctccgcctttcactccggtaatcagacactccggcgccgtccagtccagcgcaaatgtcacccgttttccctgcatccctgtatcactctgattgttcgcccgatcctccgaagagagcagtaattcataaatcccctccttttggaagctggaagccgggattcgatactgatactgcttccacgaagatgcatcgcctgtcatcgtcacttcataatccgttccacggatcagctgccgcacctctccgttttcccggcaaaatatctttgatgcgcctacataatcaatattcgtctccagaaatacaatgtctgtcggatgacggaaataatattgcttcagtttcttctttgtatccaaagccaagtcaaagaccgatccaaagcgattcacagaaaattccgctgtcttttgcgtccggttgcctgacagatcgcttgcctccaccgtcagggtatacgtatcgtcgtagctctgttcctttggaaaatcaaaatattcgaccagacagccctgttctgactcctcactctttttcagtgcaggcgcttttccaccgtttgacccgtgtatctgtatcttcagagaccctggccggtaataggcatcttcacaggaaatctgaatcggtagactcccggaattggcagactgatcacttaccccgctgatcgtgatttccggtgccgtacggtctacacagattggcgcgctctctgaaaatttcagatttcccacctgatcctctgtccgaacataaaccttccagactccctcttcagaaattgctacctgctgaccgtctgtacattccttccagatatcctgctgccccgccgccttactaccgggtctgccgacactgctgcgaatacagtaagccgcttttttcagtccgctctttccatccggttcaatagccacctgcagattcgccgcctgtgctgcatacagaacgccattttgttcctctccgcttccggaaatcacagctgccggtgcctctgcatctacataatagttttccttctgcaaagcagatacccgtgcagtctgcccattcggttccatctgtttcaattgaaacatcagtgtcccatcctcttgcaccgacgataccctacctccttttccgtaatccatggtcccaagtgcctgaacatagacattgctccccgcacgtacccacagccgatctctgtcatcccggaaccacgcattttcatcaccgcgtatctcatattcccgcccccgctgtacctgaagcggctgagattccgtttccggctgtcgtggttctgtctgcggcggatctgtttccgtttctttcggtatctctgtttcggtttcctctgtctcttccgttatctctgtttcggtttcctctgtctcttccggtatttctgtttcggtttcctctgccacttccggcatctctgtttcggtttcctctgccacttccggcgcttctgtttcgttatcttcgctctcttctatttccgcttcggagccttccgtttcgaactcctctgccgtttccgattcggttgtcggcgcttctgtttcgttgtcttcgctctcttctgtttccgcttcggagacttccgtttcgaattcctctgccgcttccggtatctctgtttcggtttcctctgccacttccggtatttctgtttcggtttcctctgccacttccggcgcttctgtttcgttatcttcgctctcttctgtttctgcttccgagacttccctttcgaactcctctgccgcttccggctcggttgtcggtgcttctgcttcgaatcgtccatttacccccagctctgtctcctgcaattgcccttctgtgctctcctctgattcccttctgttttcttctacagctgacagatcctgcatcgtctcactttcgctttctatatttgattctaatccttgatctgtttcttccacaccagtattttctgtccgctgttcactttctgtctcactttccggctccgatgtagcacccccttcttctgtgcccgctgcagtctctgctgcatagctgtaatccgttctggggatcgctgctgtgcccccggaaattatcaaaatgcctccggctccgagcatcccactaatcagcagcccattccatccttgcttccatttcatccaccactcctccttccgcctgctttccatgataggtccgttcgacagatgcacacgccgccttgcattgtctctgtaattcttccttctgttcttttgaaagcacctgttcttctgacagattttgaatctcttcgatgatttcggacagctccgcttttgtcatgccatcctgctgcaaacgggatgccgccataatcatacaggccagcagctccttcgccgcctgcacacgaatccctgcatctgtactttgaaactgtatttccgtccataaggcagacaaatcccgaaacagcgttccataatcagctccttctcccagcggattttctttcccaatacgctcataatatccggaaattctctgataaatccttgccgcctgcagccagtccggcactttctccatctcttgcgtactttgtaccgcttcctgaaaccagttggacgcagctgtttttccaccgctgttttcataaaaataccagtacaacaggccgatttgataggccagccttccatatgtgttccgatcctgtgcaagcgcctcctttactgtctgctcaccgccagaagccggtgcatacaatagctcctgcagaagcctttcctcttcctgatccatacggcagtcctgcagcatccgattcacaaaatgcgtatatagctcctccttctcaggataaagctctgctgcattccgataacaattcccggcctgcgcaatgcctccccgctctgcctgctccagtaaaagtgcatattcctgcgctcttcgatctgccgatgtcccctgttcccgtttcaatgttccaacacaaaatagcccaaataccagcacaaggatcagcactccgagcagatctctcatccgcctttttccggcacactttttctgaaattcccgtattgccaatgtcagctgtgcaccatccgcataccgctctgacggttcctttttcatacagttttcaaccagcgtatatgccgcttttttccagctgtccttccgtatactctgttctgctgcggtccgcattgcttcaggtcctccgcccgcaattgtgccggataacagatagtacagcacagctccggctccgtatacatctgtccttgcatccagatagcttcccttctgatactgctccggcgccgcaaaaccaggtgtcccgcagcattgctccggtcgaatccccggctgtccctgcaacgctgccccaaaatcaatcaacacaagccgcccgtttcttttcagcagcagattcgtcggctttatatccaggtgcaaaatcggcattcgacgcccatgcaaatatccaagtacctctgatagctgtccggcaatcgaaaaaaattccatctctgaaatcccacctccaaaaagctcctgcagacattgccctttcacataagtcataatcagccagatacagtccttctcaggcagcacatcgatcacttccggaagtgaagggtgtctcagccgcttcatcatcttcaattcatgcaggcgatcggcatccgttcccttccagagtctcttcgccgccctcaattgctccgtcacctggtgccgtaccagatagacctttccctcgccaccactgccaagttccctgagaatacagtactcctgttcaaaccttccataagaagcgggaagcttcataatcgtctcttctcctcccttcttctttttctctcattatactctttatattaatatttgcaacatattatttattaattatttctttatattctataatacatcacacaattaatgttgtatcccgcaattaacagtaaagcggacatccgcaatcaatccacagagataccatttcctgcgtaacaaaaaagcaggagcaatctgatcctctcaaactgctcctgcttatcggatgttttacccggcggtattcccatcgaaactatttcttctccgttccaagattcgcataaacctgtgcggacagctcctgaatacggctgatcgccgtaccgttatcctgcaaatcttcactcaatacgcaaagaatatatgcatgatctccatgctctacaactgcaatatcattttccacatactgtccgtaatcaccggccagttctccggtcttatttgctgtaatcgcatccgaatccgaaataccagccggaattttcccggtacgggtctgattctttaaatattccagcattttcccggatgcctctgcattcacgcatgtcccctgccaaatcgaagccagcagattgcgacagtcgttcgcagaagtccagttgtccccggtggccggtgcttccagaaactttcgtccgaatgaagtccgcgtataaccgttctcctgacaaaattcattgacaaccgccataccggccgtcgcatctccgtttccgagccgctccagcagcgtgttggctgctgtattatcactgactgtaatcatatcggtgataagctgctttaattccccgtcatagctctcttcaaaagaaatatgacggtcctcggatgccggatagcacacgcggtcatagatcgtcgccattaaaaacaccttcatgacactcgcggaggccatcttcacgtctccgttcaaatcgccctcagcgccggtcttcagatccagcacactgaccgcccactgctccttctgtgcttctgccggataaatgaaaccctcgccgattatctccagcagcgtgttcattttctccgccgcctccccggacaccaccttctttttcatatcctttttttcaaaatacagatcgatcccgtcggcaatcccttcagccatcagcggctgtaccgaggcatctgacatccgaagatcatcagactgatttgtcataaagcccatttccagaatcatcaccggaagcttactccagttgattccggtcatattgtcataatattgaatcccaagggaggtaaatgatgccttttcacaatatgcactcaaaatacattctgccagcgtataggaatcttctgccagctcaggaatatatggattattcgaagaaggcaccatcgccaatgccccctgaacgcccgcatcatccgaaccgtttgcatggatccgcacgtaaatgtcgccgcctttttcataggccatctgcgcacgctccgcattgctgatcgctgtatcattatcctctcttgtaagaatcacgcgatagcctcttttctccagctcatcccgcagcagcagagagatctccagattcagctcatattctgccttgccactgaagctgccctgcgtcccggtcgtcgcttttgctttcatctcagaagagccaggcccatttggttccttttcgctcatatcaacccaattcccctgatgtcccggatcaatcgcaacgaccagctgctccgattctggttccgtctctgattctgtctctgtctcttttgtaaccagcagatcctgtccggattctgattccgtctcttctttgacagccgtctctgattccagctctgtctctgttttaccggtctgcgcctgttctgactctgtctctgccgcagtcaacagttccgtcacagcctccgtctgttttttcctttgttcttccttttgcctggactcattcttctgtgtcaatccgaccagcacgccaagcccaatcaataaaatcagaacaatgcctgccagtattccggtaatcggaagctctcttttccggcctcccgaacgttttttctccatctaacgcctccttttcacatcttatctgtttccgctgctcctgtttttattcccgctgctcctgttcagtatacacgcttcatctgccaagggcaagccccgccgctatcgattctttctgtgaccggcgaaaagcaaatatatctgccacaggatggaagcacccacagaaataagcaagaataaaaaacagccgaccggtaatctttggaaaatcacctgtcggctgcttctatagttgacacaaagcgggcattcgtaatcctcttcgtgttcgctttacaaatgctctagaagaaatcctctccctgcagggcatctacaccctcttctccggtccgcactttaatgacattctgaacattgtaaacaaatatctttccatctccaatatgtccggtatacagcgccttcttggccgtcgcaatcaccttctccggcgctaccttgctcacaacgacatccacctgaatcttcggaagcagattcatatccatctgtacgccacggtaaaattccgcctttcctttctgaataccacagccaagcacattcgtcaccgtcattccggtcacgccaatgccattcagggcatccttcaggtcatcaaacttgctctgcttcgccacgatcgtaatctttgtcagatgcgtatcactcgcaatcggtgcagtctcagatctcacctgcaccggtactgcatcatccaccggaacagcttttttcggaagctctgtcggaattgcagttgttccgcttccactgaagttgttgatgctggaggtaagtgcaaagtccgcataagccgacgcaagtccgtgctcgtgaatatccagtccttcgatctcctccactgccgaagtccgaagtccgatcgtatgctttaatacattgaagataatcgtcatcgtcactgcaacccaagcaataaccactaccacgccaaggatctgcagtccgaagaaatgaatacctccgccataaaacacaccaagcttctcgccattaccaaaatcataatatgcaaacaatcctgtcagaatcgttccaagacagccacagataccatgtacgccaacggccccgaccggatcgtcgaccttcagcttctgatctacaaactcaataccaaatacaaccgcaaagcccgcgatcacaccaatgagtgccgctcctaccggtgtaacagtatcacagccggccgtaattgctaccagtccagccagagatccattcaatgtcatggaaacatccggcttcttataacgtacccatgtgataatgagaacggtcacggtcgccatcgctgctgccagattcgtcgtatagaaaatccgtgccgcatttgtcgcgccatccccggacaatgcaacggtcgagcatccgttaaatccaaaccagcagaaccagagaataaatacaccaagtgctgcaagtgtcatgctgtgaccaagaatcgcattcggtttgccatttttatcatattttccaatacgcggtccaaggatcgccgcacctacaaacgctgcaacgccgcctaccatatgtaccgccgtagaccccgcaaaatcatgaaatcccaactgtgccagccatccgccgccccatatccagtgtccggaaatcggatatacaaacagactgatcagcgcactataaatgcagtaagacgaaaattttgtacgctctgccattgcgcctgatacaatcgtcgcggaagtcgcacagaaaaccgtctgaaaaatcatcgtcgtataatccgtgctcttcatgctgaacagatccagcccgccaatcagagctcctgtcccgccaaacatgataccaaacccgataaaccagtatatcggtgtaccgatgcagaaatccatgaggttcttcatgacaatatttccggcattttttgcacgggtcagacccgtttcaaccatcgcaaatccggcctgcatgaaaaacacgagagccgctcccacaagcgtccagccaatgtccacattcgttgccaaagcccttaattcttccataacgtttcctccttcttggtaacagaaaaggcgccgcggtatgaactaccacagcgccttcgcttgatggaggtagtgtacacctctgtccaaaacctgtcaacgtcttttccataaaaaacaaaaatttggatgcatcacagaaatttagcaaaatctaaacgttattttctcatttttgcacaatctgtttcgctgtaatctgctcacgcagctcccgggcattcgacacgattcgttcactcaccgctccgtgctcgatcagaaattctctggagcgaaatccccagcagaccggaatcacatccatccctgcattcgcagccgtctccagatcgacatccgagtctccgacatacaccgcatgctg

SEQ ID NO: 2060 - DNA, 32759 bp, Unknown
  16S sequences of unknown bacteria
aaactttttcggcatacccgaggtgtttttcggggtcggacggcgccaaaatcataatgaaatcgcttttttcgcagacttcttcgatagaacggcattcttccgcgccgaaacgcgcgcaccactcggatgaacttagtcccccttttggaggaacttccttttccgcaaaggcgaaagctactttaaaatccgtgccgtgtttacggttgtactcttctatccacgccggataattgtttgcgtgccactcgtcgagataataatctataaatcctatttttttcatagttgaatttctttccccgaagcggcggaagcgtaaagagcctccataatcttagccgtttccaaagcgtaaattacgttgcccttattctttttcatgtcgcgtatggactgaataaaagccttgtcttcttcaagatatcttttgttttgctggcattcgggcgtaacggactccaaagtagcgctgtctgtgaaagtaaagtttcccgcataagtcaggcgaacgccgcccttgtcgcccagaaagtcgacccacatttcgtccttgtccacgttttgcgcccatgcgcccgtaaacgtaatgccggctttgtccgtccttatcagtccgctgataaagtcctctacgtcgcaggtgccgttttcgacgtcggaagtatcttcagcccacatgtttttatatttatatgccttcatgtccttcgccgtaccgttataggcgcagcagcttgcgcttaaagctttagcgccgcccagaacataaagaataaggtcaataaaatgtacgccccagtcaataagggctccgccgcccgactgcgctttcgtggtgaaaggtccgcctagacctggaatgcttctgaagtttctgaacgagcaagccacgtggtaaatgttgcccagttttccctcggctacgtaacgggcaagcagttccaccctggaatcgtaacggttgcacaatccgatgttgagtattttaccttttttgtcggcaatttccgccatttccttgctttttgcgtaatccacggtgatgggtttttcgcagaatacgtgtttacccgcattaagcgcgtccaccgtaaccgtataatgcgcgaagttgggcgtaagcaccattacggcgtccacttcttcgtcgttgagcgcaattttgtaatcggtaatcgcattttcggctttgggaaaatccttcaaagccttttccgctttttcttttacgatatcgcatacgtattttaaacgcacgtcctccatttcgttaagcgcgggcaaatgagcgccgtttgcaattctgccgcatcctacgacggcaaccgtaatctttttcattttttctccttttccttaaaaaatatttttgttttgattccgttcctcgtcattctgctccgtccgactcgcaacggctttacagataatattataaatgcgtaaaggatagtttttcaatgttattccatggcgatttttttaactttttatggcatagggtcttaaaatacagctataatttaatttttgatgcaaatatttgaccttaagcccgacaagtggtacaatgaacgcaatgaagaaatatcatttggacaactttttcatagattcgcccaaaatttacggtaacgtatcgttgtatcagataggcgcgctgcattgcaatgccgataccgtgataaacactcaccgtcagggcaattacttcgagcttaccgtcataacggacggcaagggctttatcagcgcggacggaaaggctgcagccgtgaaaaaaaacgacatattcgtttcctaccctttcgaaactcacaaaattcagcccgaccccgacgacccgatattctttcattatctggcgttttcggtttccgaccccgaaacgggcggaatgcttcagcggatcgcgcacgattacccctctgcctccgaaagagtactgcaaagcgagcctctttccgccgcccttgccgcagcaataaacgaattttcttccgacatggttttaagccgcgaataccgcacggctctgcttaccgaaataacggtactgctcatccgcggattttccgcgcgtaatactcgttaccgtaagcccggcagaaacgaagaattcgtctaccagataatgaattatatcaacacgcacattctttcgatgcgttcgctttttgagctgtgcgacgctttcggatacgaatactcgcggatttcaaaaattttttcctccgtcacgggaaaaactttggaaagctatttccgcgctcgccgttttcaaaccgccctttctcttctcaacgaaaaccttaaagtcggagaagtcgcgtatatgcttaactattcatccgtgtactcgttttccaaagcgtttaagcaatacttcggcttcagccctaaacaaagtaaatctgcaaattcccgttcggaagcccgacagcgtcccatgtaattcagccgaaaaaaacgcattaaaacaaagcttactttcgggacagatatggcagcaaagcttatctgccctcggataaaaatgcgtttaaggcacagcggtaaagcaaaacgcgaaaaatgtataaataaaaacaccgtttacgcattcagcgcattcggtgtttttttatttaactcgatacaagctgtgtgcttaactgttttacgcttgttttttccgcgcaaacggactgtttttgccgtcagcgcggaaaaagcgttaaggagtaaaaaagccgtatgttcgtcaagccgtgaaagcggcgatagtgtccgcgtccgttgtgcaatcgaaatcgaatattgccgcgccgccgttcttgaccactcttaaacccatggtatatgttgcgccgtcggtaaagaagccgtatgtttctgtactcagcttttcgtaaagtgcggtattggaagtttcgctgataataaccgccgtttcgcctacggttatccttatctctgccgcgtttataagcactttaagcgttgccgattcgtaaccttttggatacgcgccgcctgacagtcctgtgtcgtccacaacatcccacggctcgccgagaatacgcagtttaatagcgccgtcctcgccttctttcgccacgttctcggtaagggaaacataaagctgacttgtgcccgcagaagacttaaaaataagtcctgtcgaagcccatgcgtcgtatgtcgtgtcaaggttggcaacgcttacggtacccattatcggggagccggacttagccgcaaaatattttgaaacgttgttggcttccgcaggcggagtcaaagtatccgccaccgcgtcgtaagtccagtcgccggcgtcgaccttggcgtttctgaacgctgcttccaccgtctgagcactgccctcggcagggactgttacggttgcgcgcttactcataaactgcggatgcgagaacgtgagattgtattctcccacgcccaaaggaagagcaaagctgccgtcttctttcaccgcgccgttaaacgaaagcgcgctgccgtcgacggtaataacggtatcgccgagtttcacggaagcatctgccgcgaatatgttctgctttttaacgctgcccgacacggtaaactgcgcggagatttcttcggcatcggtcgagtaactccactgcgaaaagacggctaccgtaccgtcgcaagtgcctagaccgaatctgtatgcctcacccgcggtaaggtattccgaaagcgaagttgcgggagtaccccaatggttgaccgtcagcgcgatatcgaagcttgcaacgggagcgtcgttaatcatcacatagaaagttccgttataaagcgtaagggttatctttgcggttttaacgctgccgccgcggtcgacaaacgggtcggcaagcgacgtaagctcggcatatccgttctgagtgttaagatacagatcgtatccttttgtatttttgcggacaagcacacgcacgggatactgtttgccgtcgtcgcgcacagatattcccgccgccttccaatcctcagtgatttcgtcgacgtacacgctgaccgtgaatgacgaggcggaggcgaaatatctgtccgaagtgggttcgttgacgttgctgagtttttgtgtggtttcgtcaaacgcccagtttgtcatatcggtaaccgccgccaaagcaaaagcgatattgaccgggtttgaagacgacgtatccgcgccattgacggtaacgggcatatatgcgggattttccgcacgcacggaataaacgccttcgggaaggaaaaccgagaattttccgtccgcacttaccgcgttttcgataaccgtttctttttctccgtcgctgaaagtaagcacggttgtagttaagtcgccgttgacataagataatccgcttaccgtgccgcttatttcataggcaagatcaatcgcaacggttacatacttttcttccgccctgaaagaggcgtaaattctgccgtccttttcctcagaaacaagcgctttaccgtttgctttgaatattaccttctgtccgcttcccgacggcatcgatacggtgacggtatcgcccagatttaccgccccgtcggtaatttcgtttccgtccttttcaagcgtaacgccttcgggaacagtcaccgtagcggcaaggtaactacttaaagcagacttcgaataatcgtagctccaatcgacgaaggtattgcttctttccgcgaacagtccaagtttaacattgcccgcggttcccacgcaatccttgaccgtaatgccgttcatgacggtattttcgtcgatggagaacgcaagttcgccgttgaagaacacgaaataaattccgccgttgtacactagcgtcatgtcaagcgaaaggtcgttattttccccgaaaggcttttgccgaatatcgctgtcctcttcaaaattgtattgagaatatgcgtaaggcacgccgttcttttcttcgtgcagcagcataaagtcgaaaaccgagcctatgtctccgtttcttcttatggcaaacttcatgtaatgatcgctgtccgtacccacgataaaaccgactgccggccactgcgaggaaagcatatccctgacttccgctttaagtacgaacgaatcgccgtaagctgtttctgcgcccgtcagccagcctccgtagaactgaggattgttttcgctcttgtatacggatgtgcgctcgctgtaaacaaaggtaccgccgaaaagcccctcgcctaaaagcggacggtcaagcaccgccgtcattccgacggcaactccgtctgcaatcgtaaagcttacctcagttgcggcgaaagcgtcgcagatcgcggtcatggtgtattcgccgtcgcccagttccgcggtaaaagagccgtcggcagaggcgttgccgctgtaaaccgcgccgaccgagtcgtaaaccgtaacggtaacgatggagaaatcggttatggcattcgcgtagcgttcgtccataactacgttacccgagtgaattttgagatttttgacataagaaattttcaaaagactgtttttcaacgcaggatagcaacttgcaacggtaacgccgtccgccgtgtttaacgcaacaggttcttcgtcgagcgtaacggacgcgacgctgtaaggcgccgtagtattaacggtaacggtcataagggcgttacgcgttaccacataagtgtcgccaacaggcttgccgccttctatcgtcacctcgccggcagtcgcatccgaaatcacggtcaccgaagaaacgggagtcagcgtatcgatttcgcttaccttttcggtgtagaagtaatcggtgaattctccgttgacgcccacgtttataagtcccgtcttcaaaggtaagtcgaagaacgttttattggttatgaagccgttgctttcgccgtaagaacacatcagaatgccgttcatgtaaaggttgagcacgccgtccttatatgctgcgcttaacgtaaccttgttttccgtgtcaaacgcaacgggataataaccctcaaccgcataagtcgcgtttacactgtgcctgataaacaaagccttatactctcctgctccgttatcatgccacaccacccatgcgtatctgccgttgtcgttggagaacacaagtccggcgttgggccaatcttctataagcagattgggttttactacatccgtttgcgcaacgaaagcgtcgccttcgcccataaagtaaacgtttgactcgcccgcgccgctgctgtaacccgtaagtttaccctgagaatccacggtataacggtcggaagaacccaaagtttcgtccacggcggaaagagtgaacgtcacctccgaaagagaccctccatcgccgacggtgaattcaatcggcttgcttgaaaatttggggttaaccgcgcgcagactgtaggaatcatagggaagcgataccgtaaagtttcctgacgaatcgacggcgcccgtaaactcgagcgtatagttgtcgctgacgaaataaagagtcgtggcggtaaaatcgcattgcgcgtcgccgaatttttcgtcaagtttcactttgtcgataacggaaacggtatcttcgatgtaaacggtttttacactgccgctcatcgaagccgtaaacgaacattctccgccgacatcaagcacgaaagccttgccgccgaaagacgcaacgataaccttttcgctttcgttgactactttaaaggtcttgccgtaaagaatttcattttccgcacccgttcctttaatcgtaacgtaatcagagcttccgtcgtcggaagtcaaagaaaccgtttcgtaaaggtaatcttttataatttcctgcgccgcatctcccgtagtgattgaataatcggaaaattcaagtttacattcctgtgactggcagacagtaaacgcgtaagcaaccatttgcgcaagacgcctgtcttccagccttatcagctctttatattcgccgccgtcattatagtacacggcaaccaccgatccgcttttcagatatcggaaagaaagaacctccggattttcgtttgcgcgcaagctgtaacttacgggcacacttaaattataagcggcgttttggttgttccagccgccgtaaggacttatcctgagcccttcgttcagcacgaacaggtcgaaacactctttgccgtcggtgaacgatattcccatgcaaggctgctcttcataaggcgcgacggtaatcaaggtgcggttggaaatcgtaaaatcgataaccgcgctgtctgaaacgacgtccgtgaaatagacgagagaattgttactgtccttttgcgccactatgacggaatcgtcctcgcgcgacatatcccaatttaaggcagatgaattgtactgaactccgtcaatcgtaacgctgccgccaaccacgttgcgttcgagcaccaggtcgggcatctgaacgcttgcctcttcgcccgtgacaacgatatcgatgacgttctttctgtacccggacgcgctgacggtaagagtgtattcgccgtcggaagtaaacgtacggccgcctatttcgtaaacgccggctgccggcagcacaaagttataggagccgttggaagtggttttgcccttgtaataaatacggctgtccgaagaagtaagcaacaaatccgcgtccgttacgcttttgccgtcgatatttttgaccttacccgtaacccttgccgtgtaatcgccgaagcgagtgaattcggcgtctatcgtaacgtccgaatcaatgtcggtcaggaccagcgaaccgtttaccatatttgaaacggcgtaatcgtaaatatcctcgtcgttcaaggtaagggcggtaagtacgtaacccgaagcgggctgaatatccagggtaagcgactgcccgtgaataagcgcgccctgctgcgacgtgaccgcgccgcccgaaacggttccgggcaccgtcaccttataggcatactgcgcgattaaggcgtcaagctcattctcccgtcccgtataatcctcgccggaatactctatgaattcggcaaccgcggacagcgtataaagacccgggcacgtctcgcccgcaagaaaatccacacgtttgcaaagcaccagcttgccgtctattatgaaataataatttgctccgtccttaatacacgtcaacgtgacgtaatcctcagccgggtcgaaatccgcgggtcggtcgaaatacccctcgtaattatcgtcccagccggtgtatttggaaatggtatggtatccgattgcagaagcgccgcccaaaagattactgccgtttatgtagaacgcgacaaactctttttcgtccgtcatgttgcagacgcccaatgagggatgagaatcgattactccgctggcatgctcggcaccgcctcttagcttcattttcacggtaaacgcgtacttatcggaatacacgtcgctgaagaatatcgcctgctcgtcggggccgtcggacacgatcgcgccgcccgtaacttcgggaagaatccagccgtccgactttgcgtagccgttgcccgcgttgccgagtattgcgtcttccgcgtcggcgtttatgtaaccggttccgtcaaaacgcgcacccgaagtgggacggtactcgttgcgttcgaggttctcttggtaagtcaaattgtaattccagcctacgtcggggtattcgaacatcggacgaagccatgcgttctcaccggcgtcggatgcggacttgacgtatcgataagaaggaactatcctgacgtattcgggcaatccctcctccgtatcgatattaagcgcgtcccagctgacgaacagctcgctggtcatctcgcttgcacgcccgctcattatgtcgtcgtttacaactgacgccgcgtcaaagcgggtctggttacgagacgctttgtcgaacgcatctacgtagaaattgaaagaacgcattgcgtgcgcgtcgcggactgaaggactttttatgttgaaccagaacgccgaattgacgggattggacgtcgtggaggaaaaattaaaacgcgcgttccacgtcaggctgtcgtccttgacaattgcgcctatatacagacctttttcgctaaacgaagtagtatatctcatctccacgccgttctgtacgtgagtaagatacttctttccctgccagcggctttcgtcaagcgcgccgtcgattttcatgtcggaatcgatttcgtcggtgaactctttaacgtatttccagtcgtattgcgtttcaagatcgtattttttgccgccgcacgcgataagcacagaggaaaccaacaaaacgcataaaagcgcgataagacaaatgaattttcttttcactttcattccctccttattcgcccaggatcacgacatcggaaatcttgatttccttgtttgcgtcgcttatctttgacgaaactacgattttaacttcgcttaccgtgatatcgtcgaaggaaacaacggacgcaccgccctgtcgcatgaacttgttttccgcgtcgtaataatccctactgaaaggtatgttttcgataaaacattcgtcgacgtattcgctgagattataccatgagggcttttcactgagcttaaaggaaattccctccagccccgaaaacgcgtaatcgtaatcgaagctgttgtaaacaagcacagcgttaatctttttaggcacgtcgaacttaaaagttatagtcgttttgccttttgacgtaaattcacgttccgaataatactgatgagtgacaaacaagccgtcatttaaataatgaagcgtatcgttgtaagcgtttgtcgcgctgacggtcgcctcgggcgcgacgtttttcctgcctgtaacgccgtaaggcttgggctgaacgcttttagtgggaccgttgccgtaaagcagttttccgtaaacggcgtcctccaccagatatacgcggtcaaagccgtaaattctgccgtcggaagcggaagtcgcgccgctgaacgggtcggcatgcacccagtaaatacagaaaagttctccgcccatttccacgaaagcgcaatgccccgtacccgtcatatagtcgttggtatcgtttttgcccattattaccgacggataccacggaagctttctgaacggaccgagaggactttcgcttatcgcctgtttggtatcgtaagtaggcgaagcaaaaccttgcggcgaatagataaggtaatatctgccgtccgcataatacatatgcggtccctcgttgatgtccccctcgtcaccccaaaaggttgcgtcttcggcgccgtcgtgtccgactccgctttccgtaccgaaataacccgtcttgacataagcgtcctcgtcataacgggcggcgccgcccacatactccacggactcgtaattacaagccgccagcattgtaagcgtgtcataatcgggcgtaatcatatccttcattttgacgccccacatacagttatggtcgtggcccgtgcttatgtgccgcacgaaatatagatacaaatccccgttttcgtcgaagaacggcgaaaagtctatgacggaaaatacgtaatccagcccgaactgagccgttacgttaatctgaggagtgcggcttgtaataacctgaccgttaagattagctttcgtcgcgtcgccgtaatatctttcggaagtggcaagcctgaaaggtcccacagggtcgtccgccataagtaccgcgccgtaaaaacggtcgtacatgttgtcgctttggacattgaaccagggctcttcatcgcttttaaaaggagcaaacgcattaaaatacatatagtacttgccgtctttttcgttgtagacaacctcgggcgcccagacgtgttggataatccattcgtcgctttcgatacgcacgccgaaaccgtcgctgaccgcgccgcacagttcccagtcgttgaggtcacggcttcttaaaaccgtcacagccgagcgcgagccgtcgggctccagctgcacgggcacaccgtcgtttcccgacatatacatataaaaccagccgccgtactccgaatcgcgctcatccggcacccatatgacgtccgcgtcgccgccgaacacgttgagatcgttgcggtaaaaatatttactgtcgaaccggtcgctttcgtcgcttaacacaaaagcacccagtttaaatccgcttaaatcgcctgcgcaagccgtaaaagacaaagcaaacgccaacgtcagcagcaatgaaaaaaacacttttatttttttcatttccgtaatcttcctcccttctctttttttctgctttttttctgattttctgctccgaacaaaccgcaatttattcgcggtttcatagatccgtaatgtcttgcctgtaaattctcttgcgtatgaacgcatacgaacggaaatcatcccttcaggcccgaagaaacggcaatgccctttaagataaacttctgagaaataagatacaaaataataagcggaagcatcgcaaccacacagcccgccattcttaaaggccagttctgcgtataaacgtccgcgaaaaatgccagtgctatctgcagagtgtacatacttgcgtcctgcaaataaataagcggtcccatgtaatcgttgtatgcaccgataaaagttattataaactgcgcgataagcgcaggcgcggcgattcccagcataattttaagaaaaatgccgaagttgctgagtccgtcgatttttgccgctcccattaggtcgtcgggaatacccagaaaatactgtcttaaaaagaacaccacgccgattgagccgaacattctgggaatcataagcggaaaaggcgtgttaacccatccgatgttgtcgaaaatgaggaaagaggcaatggtggacatacagttgggaatcatcatcgtcgccagcaaaaccgaaaacatgaagtttttggcacggaatctcagtttcgcgaaagcgaaagcggacagcgcggacataaacaaacccacgataagtccgggaagataaatccaaagtgtgttccacagccccctgatgacgcttgttccgcccatttttctgaacagtacgctttcataagcctttaaagtaaatcccatttgcggccaccaggcaaaagcggcgttgtttgcctctatctcgctttccagtgaagttataataaggatgtaaaaaggcaccagcacgaaaagaagcaccaataaaagcatgaaatgagagcctataaacagttttttctttttgcgttcgctcgcttttactgcggcatatgcgttgttgtaagaactttccatttgcgccccccttcaatcgtagttcacccattttttgctgaggcggaagttgatgcgcgtaataattatgatggcaatcgcaacaatccagctcagcgcggagcccattcccaatccgtcggtcgcggtattggtaaacgccatacggtacagataatacgtaagcgtaaccgccctgtaacccggacccacgccgttggtggtaataacctgcattatcgccatttcctgcatcgcggcgataaggttcatgataagcatataaaaaagcgtgggagtaatgccgggaaaagttattttccagaaaaccgtgatttcccttgccccgtctatccgcgcagcctctttaagcgaactgtccacgtttgcaagagcagcctgcatcagcactatattggtgccgcccatccacagactaaggaacaatacggagggcataaaccactctttggaagtcataaagcccactttaggcagtcctattccgcttaaaaacgtgtttatcactccgtaattggcctcgtaaatccaggtccacataagcgttacgcccaccgtggagcaaaccgacggaagaaaaagcacggttcgggcaaacccgcgcgccttaagcggtttggtaagcaaattggcgatgaacagcgccgacaccatgttgacgggcacgcttaagcaataatacaaggtatttaccaccgatgtgtagaacatttccgacgtcagtattgccttgtagttatcaaatcccgcaaacttcatgcgcgtgatgtcgtatgacttcagctcggtaaaactgacgacaagcgacagcagcatgggaaacagtccgaacaggatataccctataaaaggcgaaatcgccataagggttccctcgatatcttctcttcttttcagttttttcccggctgccgaagcgacgttgtttttaaaaagcttcgtgtttacaaattccggattttctctatcctgcatatctgataatcctttttttccgctttatctgtgcattcaagcctgcaagtcaaaaactttccgcgtatcctcacgaacaattccgcacgttccgcgctgttcttgcttcagaaacgactgaccggacaaccgggtgttttgctgcggaatcacccttttttcaagccatattattacttatcaataaagcttaagtctttcgttggtgtcgtttacggcgtctgcgcgccatgcgtcatatgtcatcttgccgttacgcacttcggagttaagcggaaccgcccagacatttatccactcgtaatccgccatataccaccagtcgcccgcgccttggaattccagcgcttcggaaaaagcttttacgtttgcgggtgcgtatccgggaaaaactacacgggatatcaattccttctggttggggaaatgtccgttttcggcgcgtatggtctgaccggctttacttgccatccatttaataaactttgccgctgactctttgttctgcgaattttcgcggctgaccatggccttggagttggactgccccgcggtctttcccactactacggtttcgtcgcagtcgggatcaagaggatcgacgtattctttgtaaacggcaagcggagcgatatcccacttgaatccgcgttcttcggcctgctcgctgacggtagccatataggatgagtaatccaccagcatcgccattttgcccgaataaaaataattcattctcgtgcgggtggaaaaggtaaggggattgggcgaaatcgcaagtccgccctcgccttctatatctgcggttttttccgcccccaacttaagataacgggtaaacgcctctctcgtggagggaagcgcggtaagcgtcccgttttcggccgcctccgtcacgctctgacgaatgcctattttttgaccgttatatgtatagccgccttcgttgtcgggcgtcatgatttcgcctgcgggaatatcgagtttgtcgagatgctcaagcgtttcgcccttagtataagttttaccggtataagcgcccgtatagctttcgcccgttaccataaagttgggcgtgtaatccagaagcgaaaagttccagtcgccgttacccgataaatcggtaaggcagtcgccgcccaccgaccagccgtaattgaaccaccactcggtaaaatacccgaaatcggtgccgaattccgccgccgcacttgtattgtaagagggagtgaacagcatcgcaaggtcctcgatttcgtcccagttcatcgcaatgcagttgttgaatacaagcacttcgttttcgtcggggtacgtccagcccacgtccacggtatatggatatatgctgcggtaataacccttgttcgggaccgtaactcctttaagctcgggatgctcggcttcgtaatcagcgcgcgttttgccgcggttgtccgcgacttttccgtcattccacgcgtccagattctcttcgtccacgctaattacgatgattccggctttttcaaacatactttcgttgtagtaaagcgcagagggcttggtatccagcggcaaaccgtaaagcggatcgtcggaattggaagtgttgttttcgcggtcgtagcgcagtctgtccaccgtagtggcgtacacatcgcttacgtcgatgtcgttaactgcgtcaaggtattgcgtcatatccgtcagaaaacccatattgacccactttttaaagttgtcctcaatgcacagaaagacgtcgggtccgcttttcgaggtggaaacggtctgaataagagattcgtaatttcccggcggcttggtggaaatgtccacctttattccgttttccttgccgtaagtttcgttaaactcttcggtcatgattgtgtaaacttccagctccgactcgtcgccgtaaacccagaactttacgttgctgtttccgactcctccgcaaccgaaaagggtcacgctgaaaagaatagccgcgaatataacgcaaataaactttttcattgctctttctccttatcccgttttatagttttatctctgtggatatgatttaatcttgaccttttgttcttgacttagcgcggaacgctttttacgcgcttaccgtttctaatccgcattgggcagcggacgaagaaacttccgacttattgaaaactttgctcatgaactttttcaccacaaacctttcgtccacgccgtttacaaccgtaacggtgcgcgcatcgggtcttttgtatgaggcgccattgcatcccgcgccgtccgtgagattaagcgttattccttccgcaagtccgctctcaactacagccgcctttatacggcacgtcgaagcgaaagatgagtcgagagcatacataagagcaagcggatcgtgtaaaagcggtatgtaatcgttcctctccgaccagcttcttaccatatccgcaagcgcgccggtcagccctccgcattcaagtcccagaatataatcgtaattttttttacctatgcacacgcgcgaagttatttcccacggtacatactcgacgttaagtccgctttccagcactatccgcgccgcagtcgggtcgcaggcaatgttccattcgtcgtgcgcaaaagtaaaacatcctcccataacgactattctgcccgccttttgcatcttttcgggataacgcattatcgccatggcaacgttggtctgcgctcctatggcaagcaagacaagctcattgccgtacttttcggcacactccgcgataaacttcaccgcggcaaggccaccgtcgtcctcttcttcggccgattcctctccgtaattcaatacgcccagcattcttaccccctcagacaaaggcttggaagcccctgcaaagacgggaatatcgtttcttccctccagctcaagcagccttctgacaatatgcgcgcgttttgccgcttcacggtacacggttgtaatgcccgctatttcaatgtctgttttcattaaaaagcccaatgcgagcgcatcatcgatatcatcgcctatgtcggtgtccattaaaagtatcataatcccgtatttccttaatttttttgtacgacaataatatcacaacagccgccgtcagacaatagctaaattcaaacatcacccggtattaaaaaaatcgacttgcaaaaagccgatttttaaaaatatttctgtactttattcgattcagtccttgtattttatcagcacgtcgctgaattttatcttgttttgttgctggcggaactgtgcgggagtcatgttttccacctttttgaacgctacgctaaggtgcgcctgactttcaaacgcgcactgacttgcgatttccttgatggtcatatcagtatcggcaaggagttcctttaccttgttcatcctctcccgaagaataaattccttggcccccatgccgtaaagcttgcggaactgatgccggaaataatcgtaactgtatcctatcgtctcggcaaggctttttacgtctatgcaatgctgcgagttgagttttatataatctacggcgtatttcatgctttcttcaaacacgtttttctcgtcgttacggctcttttgcctgcaaataagcagcataatgcgttctataagcagcgccgccgcatatttgtagtaattgcgtttctgtgcgatttcacggtttatttcctcaaacaaagccagcaccgcccccgagtcgtcctgatatacgcccgtttccgccgtaatatactcgttttcgtattcaaacgcgaaaaacaaaacttgcgtctgcgtcgaatgcttctcagaatggggcacagtcggcggaatatatacgaaagtcccgggccgataatcgtaacttttaccgcctattaccgacttgccctcccctcgtatgtaatacacaagctcgcagcacggatgagtgtgttccggctccacgctgcacttgggatgcacgtgtcttattatgaatttcagctctgcattgcccatatttctattgtaaagcctttttatgaaaattgtcaagcaccatataaccgaattgtaaaaatattcccgcttataaacagtcagcggaaaattctgcttttttacttatttccgatatgcattttgcttaagccgtttaccggcgatttcataggttgcgccgccgaaaatataaaaaggtgagtaatagtttatctcaataaaaatttttaaatattaagaatgataaaatagatttagttctgcccgataaagaaaattaaagtattctctgtttttttaataatcggttttgccgaaaagataatcaagcgaaacatcgaaaaaattgctgataacaatcaacatatacattgacggctcctgcttatcggtttcccggcaatgaatcgtgtttccgcttacgtttaactcttttgcaaaatccttttgcgtcatgcctttcagacagcgcaattcccgcaatctttctccgaaaatcttcataacgataaaatacacgtttttcgtgattatacttgtttatagcataaaaatttaaaaggagaaataaaaaaatggaacccaattatgtggcaacaaaaagcgctttgggcgaacacggcggtaaaattgcgctttgcgttttgttttgttggcttatcgtacccgttattttcatgatttactttatagtcagcgctaaaaaattcaaaatcgagtttttcgacacgcgcgtcgtaatgcgtcggggcatatttaacacagaggaaaaacaagccctgcttaccaacatcccgggcgtaaacataaatcaatcgtttagcggcaaaatttttaattacggcgacgtgagcgtcgatttagtcggccgctgggatatcgacacgtctgccataaaaaggcctaaagcccttaaagcgtatattgaatcgcttatgaacaagcaatccccctcctccttaggacaaattgttgcaaactgaacgggaaaaaggcgacctgataaaaagttgccttcgggcgggactgaatgcaactgacaaagagttatcagataaaaagtttaaacaaactaccatcagccataagtataaaacaggaagactgatgcaaatcggataaaaaaacaggcgacggtttaagccgtagcctgctttttatcgataatcaagcggtaaccgaatttacggtctcccttcagatttttgtctgaaggcgtatcccacgggattggttcctcgcgtcctgatcgcaatcacagattgctcaccgctttggctgaaaacagcattttttatgctgttttctttacgcgtcgcgcctcgtccgttttgctgacgcaaaaccaagtacggacttcgctctcgggttcgtcctctggttcattacaaaacaaaaacacaacccttgttcaggttgtgcttttcttggagctgataccgggattcgaacccgggacctcgtccttaccaaggacgtgctctacctgctgagccatatcagcgaatgaagtttttgccgaattttgaggggtttcggcttaccccgttttccgccccgatattccttaccaaggacatgctctacctgctgagccatatcagcgaacaggattgcgcataaacacgcaactttcatacgcaaaagttattatatcctaaaacggaaaaataagcaaatgttttaacgagttttttaaaaaaaataaaaaagtatattgtttgaaaaaatctcttgtaatgcgaaaacccggcaaacatcagtttgtgccgggaattcgctatttaaggagtatgaaaagcaatttaaagtatttaggcgatatcgatttcgcggtaaagaagcgtacttatgctttcgtctttggtagtgaaagaataaacgttgatgcaacaatttttaccgggattgctttcggtaaaacctttcatgccgtagaatttttcgtgataacgccaccaaagaagcggaatgcgtactttgtcaagcaccaggaaatcgcaaagctcatcagcgttcccggggagataacggtaatcgggtacgggaatttcaaacataccgagaagtttatttaatccctcttcgaaagtatttattttttccatggcaaacaagccttccttatttattttttcaggacgcgtttataatttctgccgatattttcccaaagctgaagcgcgtcgggcgcggcgacggaagtgccgtaacccccgcgataagtccaggtcgcaagcctgtcgacacccatttcctcatacatatccacgaccttgtctatccgagaccagtcatcggggcgcttgttgtagcccataatccaacgctcggactgtttgccgtatttttttgccacctccacagtgcggcgtgtgatttcgcggaagaatttttcgggcaaatcccagctgatgatggtagtggaaaacacgtcgaaataaggacaggacgcgacaaggtcccagttgtcgtaaccgcgaagctcgcaaacataatatgtattgatggtagcatgtacgcagcaggtaatttcggctttgggattgatttccttgattgccttactggtttcggacagaatgaccatcgcctcgcgccagcggaactgtttaacgtcgtcgttcatgactttaggcatatcgtagccgtaataagctttgaacttttccctgcaaacggggcaacggcacgcccaatcgtcccctggtgagccggtaatggacgcataagatttgggaagcgcgtaatgcggctcgtcccagaagaagccgtctacttccgtttcgcgcgcaaggcgggtgcaaaggcgcataaagtaatccctgaatgcatttgtattgaaacaagccgcgttaagaggctcgtcggtgaaagccgacacctgccttgaatgaatgttgttctgtaaaaacaaacttacgttttcgccgccgaaatacttacctatcccccaggtatcggcaagtacccttaatccttcttcgtgagccgtgcgaactattgcgttaatattgggaaaccaaaagtccagatcgaactccgtcaacgcaagtataaccgtatcgcagccgtgttcgcgcatttcacgaaaatcttgttttgcgtgctcaacgtagtttattccgtaatagcttacggcagtgtgtttgattgccataaaaataattctccttgatttttaatcgatgattccgtaattttttaaaacattttccaattcttttgcgccgttacgatggtttgcaacgtcgggatgacctgtcgtggaattaaccgtcgtgtaaaaataggtcttcacgttgtccgaagagtattccgaaactacatccgttattgcggttttgcagcgcgaatcagtcgaacagaacccgtaagtacaaagtatcagcgcgtcgggattctgctcaataagtccgttcagcatttttttgtaagcctctttgaaaagagcagtctgttcagcgtccgcaaaagtgccgccccccacatcgtttgtgcctaagtttattatgattacgtccgcgccgacgaacacaggcgatgcaagcaaaatcaaagaaagaaaaaacgataccagtgttactttcgttttggttttcataactgcattttctccttttattaattttccgcttattaaacctaaaaatccagtctacccttgtagtataaactatgaaaattttattttcaatagtttaaaaaaaattaaagtataacatcatataaaatgttatactttattgttaaactatatctgactgcacaaaagcaaaaggataaatgctgttaaaaaaaataaacggaactaaacgattagctgcaataatctgtaaacgtttccttttttatatcaaaagcttctttagaaaacccgacggttattttttatatcaaaagcttctttagaaaacccgacggttattgtgtgatataaatcggacacaatgctttttcaaaaggcatcaagcaaatccgacaaacgaatcttatttataaaaaacactaaacgcgcgtgacggaaacgggtttgttggaaaaattaagcttacgcaccgtccacccttcaggcgcgcaaatactgtcctttaaagcggatttactgaaaattcccatcacggtaggtcccgccccgcttaaaaaaacgcacaaagcgcccgcctcgtgaagcgcggtttcggcttcgtcgtaaccctttataagcggtttgcggtaaggctgatgaagcttgtcgtcaagacagtgcagcttgtcctcgcgctttaaggcaaacgcggcgaacgtcagcaccgcgcgggaaagactgtacaccacgtcttcgcgcgggtaaaccgaaggaagggctttccttgacagctcggtataaagcggaaaatcgggggtaagcgcgacggcgcatatgctttcgtccacgtcggcgcgcaagtattccacgccctccccgcacatgactcccgccgtaatgcctcccagcaaagcaggcagaacgttatccgggtgaccgtcaaggcgcgcgcaaagatttaccgtttgcttttccgaaagcggaaagccaagaagcgcgtttgcggcggtaacccctgccgctatgcacgcggcgctgctgcccaatccgctggcgtgcggtatggaatcggactgaaccagtttaatatgccctaagcttttgccggtaagcgaaaacacttcgcgcatactgcggaaaataagattgctttcgtcgtgcggcacgttttcgcccgccactatttccagcggaaaatccgtttcgtcggaaacggtaaggacgttattaaggtccaatgaaagtcccatgcagtcgaaacccgcgcctatgttggcggcggtagcgtttaccgaaatacgatatttcataaataacaaactcccgacataattataccagaacgggcggaaaaatcaaccgtttcattaaatcgagaggcttattatggctaaaaattggttatctccgttaataaattgacagtttaaggaaaaaatgataacatagtgccatcaaaactgaaaacacggcggagatatggaaaacattattgaaatcgaagggcttgaaaaatcctacggcgacgtaaaagcggtagacgggattacgtttaacgtaaaatccggcagtctttttgcctttctgggcgttaacggcgcaggaaaatccacgacgataaacatactttgcagtattcttttaaaagacaagggcaaagttacggtacttggaaaggacatcgaccgccacgcggcggacataaagaaaattacgggaatagtctttcagtcgaccatgctggacgataagcttaccgtgcgcgaaaacctgagccttcgcgcctcgttttacggcataaggggcgcggatttcaaaaaaagacttgatactcttacttctcttatgaaccttgatgagattttgtcaagacctttttgtaaactttccggcggacagaaaagacgcgccgacatcgcaagggggcttattaacgcgcccaaggtgttgtttctggacgaacccactacgggtcttgaccccatgacgaggcaaaacgtatgggcgcttatcgacaaattgcgtcttgaagagggcatgaccgtttttcttaccacgcattacatggaggaagcggataaggcggacgacgttgtcatcatagacaaaggtaagattatcgcaaacggctcccccatagagctgaaatcacaatatgccttcgactgcgtgaaactttaccgcccgcaaaacctcgaaaccgacgaaatgattgaaaaaacggggttaaactttacctacggcggcggtgcatataatattaccgtagcgtccgccgcggacgccgcgaagtttatcgccgaacacaaggacgaaatggggaccttcgaggtgctgcgcggctccatggacgacgtttttttaagcgcaacgggaagaaaattcgacggaggggacgcattatgaccgcacgcaaaaaactcggggacgagctttatacgctttacagacttacaaaacggccattactgatatttctgaaagataccgcggcggtgttcttttcaattcttgcgccgcttatcatacttttgctgtacgtccttttcctgggcgacgtccagataaacagcataaaggcaagccttccgccggacttcagcgtggacgaatcgcttgtgcgcgcgttcgtggacagctggatgctgtcgggagtcatgagcgtttcctgcatcaccgtttcactgtctgcaaatacggtgatggttcaggacaaggaacgcggcttcaataaagaaattcttgcctctcccgtaagcaaaggtctggttaccataggatattttttatataaccttgtagttaccgtttttatctgcaccatagtttacgcgatttgtcttatataccttgcggcaagcggaggattttacctgacggcggcaaagtgtcttgaaacttacggaataacccttctttcctgcctttcctccaccctgataaccgttttcgtcgcgggctttttcaaaaccaattccgccttttccgcgtttgtgggaatcgtcagcgcagtaataggctttataatcggcgcctatatgcccacaagtatcttccccgacgcgattcagtccgttatatgctttttcccgggcagctattcggcggcgctattccgaaattctttaatgagcggcgcgtttgacaaattgggcgaaatactgcccgccgagttcaccaaaggccttgcggactctttttccatgaaacttgactttttcggccatgaaataggcgtaggcgtgatgtacgccgtgcttgccgcgtcggcggtgctgtttttgcttatcaatctgatagtaagccgttttaaaaaattctgaaagtaaatacttgcgtttaagcttgatttgtttttttaagccgctttttgcttttatatgcaaaagcggttttttcgtcagcataaaaaattgcccgtactctctttgaacggaaaatacgggcaaatgttttttttaataattttaattaaaacagtatgtattcaataatcttttatatatcaagttatcctctaaagcgaaaagaatgtcagtaattttcgcacttcatctcgaaaaacgcctgactgtggccgcaaacggggcatttttcgggcgccgactcgccgtaatgctcgtgtccgcactgaaggcaaatccacaaaacgggatgctttttatcgaatacggttccgtcctgcacgttttctataagcttacggtagcgttgctcgtgctgtttttcaatcttgcccacttcgcggaaaagacgcgcgatttccgtaaaaccttccgcctgtgcctcttcggcgtaacgcgcgtacatatccgtccattcgtacctttctccgtttgccgcgtcctcgaggttatcaggagtgtcgggcaacgcgccgccggaaagaattttaaaccagatttcggcgtgctcgttttcgttgccggaagtttcgtcaaaaatattgcctatctgctcatatccgtcctcgcgtgctttgtttgcataaaaaccgtattttacgcgcgccatgctttccgccgaaaacgccgccatcagattagcctcggtcttgctgttcttaaggtctttcataaaattactcccttattaaattaattctaaaacttatatatgcgtaaaaccgaagaatgattactgtttaaattcgcgcttacctttacagcccgctttaaaaaccgcaaagcaaagacgttgcggggcataacaaattactcctgcagctgtatgttgttagccgaaccgtcaaactaaagccgcaaaacaaaaccttgccccgacctttactttactccgcaatgactttcttctaccctaaccgcaaagccaaaactttgacttaatccgcgcgagaaaaaatttttgtaattctgttcctttccttattagcttaattccttataaaacaataaaaaaaacgcgcctgtccgcaaaaggaaaagcgcgtttattttttttagaaaatcgggtgatgaagtaaggccgagacggctttaacgaactaagccgtattcccgatgttttatttccgaaacgaaaattttttttaatacggtacggtttacaccaaagtttccactccgccgccgagaataagcgacgccgcgccgataagtcccgcgtcgttgcctaaagtggcgacaagaaggtcgaccgagggggatttgtcgccgccgtaagaaaagtcttttatgaaacgcttaagaggatttgtaaggtattcgccctgcgcgcatacgccgccgcccagaattatagcctgtgggcggaatatgttgataaaattgcaaagcccttctccgaggtattcgaggtaatcgtccactacttttttggcggagtaatcgccttttttggaacattcgaacgccgttttgccgtccactttttcgatgtcgccgccgacgtaatcccacattgcgctgtttttatccttgcgcattgcgaccttggtgtcgcggataagcgcggtcgcgctggcgtagctttcaagacagccccttcttccgcaggtgcaaagctctcctccgtgaacgatgacggtatgaccaagttccgtacccttggactcgttgccctcgaacagtttgttttcgatgacgacgccgccgcccacgcccgtgccgagagtaatgaatacggtgtcggaataatttttacccgcaccgaaaaccgtctcgcccaaagctgccacgtttgcgtcgttgctgattttagaaggaaggtctatgtactttttaagttctgccaaaagaggcacgtcgctccagcaaaggttgttcgagtagtccaccgtaccctttttgccgttgatggcaccgggacatcctatgcctatgcctgcgatatcgcgaaaatccacgccgcctttttccgcaaggtctttaagctgctgcgcgatttgttttactatgattttataatccagactgcggtccgtggcaatagacgatttgacgacgattttgccgttttcgtccacaattcccgctttaacgcccgtgccgccgatgtctacgccgaaagcatacataaaaattaactccttgtcatgaggttatttgactttttgtcacttttaaataataacacattacatataaaatttacaagcggaataacggcacatatcacaaaagcagcattcagattgatgctgtccgcgataaatcccgtcgccgtgggcagaatacttgcgcccatatctccgcaaatcgccaaaagcgcgaaaatccacgcgcccgcggaaggaaaccttttgcttgccacaacaagcgttcccggccaaagaagcgccgcagtcagaccgcaaagcacgcacgcggcaagcgcaacccacgccacgggcaccagtcccacaataagataaagaacaacgcaggaaaagctgccgaaaaccagtacgacgttcatgttaagcctgtcgcccattacgccgtacaccgtcctgccgacgcccatcatgaaagcgaaaagacacattcccgccatatctgcggtaaacttatcgaaccccagcgacagagtggcaaacgacgaaacgtattgattcattattatttccgtaccgcctgcggaaaaaatggcaagcatggcaataagcatataaggcgaaaacatggttttgcccttttgtttaagccctttttcgccctctctccgattgatgggacaaaccgagaacaacacgaacgacgaaatgggcaacaacgcccacaacagcacgataaagttccatttatccgcaccgacaaacagtatgtacaaggaagttacggcaatcaccagcacctgcccccaggcgtaaaacgaatgcatcagcgcaagcgtaccgcttttggacttgctgtcgggaatggcgtcggtaatgggcgttattatcacctccagcataccgcccgaaaaagagaacagcacggttgccgccagcataaccgcgtaaaccgcttcactgccgcttacaaagggcaacagcggaaacagcgcgaaaacgataagccccgccgacgaaagcgctacggcggtaagcacaagcgcgcggtaagagcatttgtctataaacacggtaaggacaacgtcggcgataagctgtgcgcagtaattgacgcccaccagcacgcccagctgccatatcccgaaaccgtaaagctgcatgaaagatacaaaaagcaaagcggtaatattagctatcaccgcctgatttactatcgccgtcacgcacgcggcgaaagtacttttatacgaaacgtgttttccggtcaaagtttcttccatagtataaatatataaaagtaatattatttttaaatttgccgcagtccttaaaccttataaaatcggtttcagtcgcgcttatgctcgatataaatcctgtcaatcgatttttccaacttttccttgtcttctccgtcgcgcgacatgagatattcgctgaacatttcggcggcgttgctttttacggtaacccttttgcggcggtttacctgcgtttttacgtcttcgatttccctttttacggcaaaagcgctttttcccttatcagtgtttgcgatgatttcgtccgtattaggttttttttgcgcgtttatgtcgtttgtttccgtttggtcaaagggttttccgcactcagcctcgggtaaatttatcggttcctctttgataatttcgtccgccgactgcgcgcgcgtatcgggcttaggtgaattaaacggctttaactcctcttccgcgattgcgtcgtcttgcgccttaaaaggttcatcttccggtaaaggcgcgggtttaatgtcgaataaattttttaagtagtcctcgctctttccgccatgcgtttcgcgactttcgtacacgtcctgcttttcgggttcagcctgtttctgactgaaagcttcgtcttcccctaaaacgccgtcatgcgtaacgtccttttcgtagtcggcaaaatccttgtccgcaaaaccgttatccgatatgacttcttcatcttgcttgctttcgacgtctttatccgaaaagtcatttgtctcgggattgttttcaaggtcgaaacctttttcctctgtatatccgtccgtttcgccgtaacctttttcttcggcatatccgtcctcgggcaaaggttcgttattcatggacgcgggaacataactgtactcgtcctcgggcaaaggctgaaagtcgtcctcgtcgaagttaagaccttctcttacggtaaagtagccgtctccgtccgcggatttgacgggtgcaagcaattcgtcgcgctttttccatttaaggggttgaagaataaccgcaaacagcgaaagcgcgaaagcggcgtaaacaagcgattccagcacaatataatcgaaaacaagcgacataaatccgccgataaacggaatgggcaaccccgtttcaccgtccaaggtaataataacgtcgttgttaaaaactaccgcatcaagcccgaatggcgttatccttttgataagaatcataagcgaaagcagaaaagaagcaagcagaattataaacgcgaatataaaaaacactacgcccaagaatcccgagcggtgttttcttacccttatcaaagcgataatgtccgacactaaaagcaaaaacgcaatgcccgcaaggacgcaaaacgcgataagctgtgttgttgccgaaaaatctatcatgccattattatattagtaagatgcgcaattgtcaatagtttattcagattctctttataagtcgcaccgccgtaacggtcatatcatcgcgaacttctccgtttgaacgacgttttgcctcgttaatcaccgcctcgcacaacgactgaacgttttgcgccgacgcgttgttgataaagttctgaaggtcgtcgcccgtaaaagcgtcgcttattccgtcggatacgaatacgacgcattgcccgtcggcggcaaggtcggtatatacgcacggattgatttgattaagcgcgccgagaggcaaagcgttaccctcgattttgacaacggtttcgccgtccttgacgaaggaggcgggcgaaccaagtttgatgatgttgcgctgtaacgagttaaggtcgcatacgagaatatcgaacgcggcaaagctgtcggaagagtcgtacgaaagaaatttatttacgtttttaaggataaaatcgttatcgaagcccgcgcgataaaagctttccacaagtcctatggcggtttcgcttatctttcccgcctcgctgccgctgcccatgccgtcgcaaagcgccatcatgaatttggtatcgcttatacgtataaaggaatgggtgtcgcccgttttttcgcggtatttggatgcgcttgccacggcaaatacggcgtcgtaatccgtcttttcgcgcaacgtgaccacactgtaacctgatttcgggcaaggcttgacgctttccgttctgaacgcgccgcacagtacttttcccgcggtatcggcaacagtttccttatcaagacattcgtttttgacgataagcacgattttattcagatcggacttggatataagcgcctcggcggcgtaaattccgcggtactcaagctcctcgattaaaaacgcctccttgtccgcgtcgtaactttccacggctttcaccttttcggcaaaagcgtctaagatatcgcgcactccgctcagctgagaaacaaaatcctcgcggtaacggttgtccttctgactttcgcgggtacgcttaaggtaaaaatcggcgtattcggcgcaaaccgaaagcaggcgggcggtttggggacagtcgtgttccaggaaaaaaggcgcgtcggaaaccgagggtctgcctttttcggtagccgccgtaacaagagtaaaaagcgcgtcttctttttcattagggcaaaggtcgcatttgtcgcactccgcgcatacgccctgcttaatacgcgcaagtatttcctcgggcgaaaagcccgccggctttatcgatgccgccgcggcatattgcatttcggcgaaaataccgcttactttcttaatttccgccgcgacttccgccctgccgctgtctatgagatgtctggtagcaagtttgtccttgggcgtgaaaaacatattcctgaccctgttcatcgccgaacgcggcaacaaagcgaataccgccccgcccaaagtcagcgaaagcaaatcaaacgccatcgaagtgtaatccacgttgaaataaagaaagaaaaccactgccgccataaccgcgcttaaaacggcaagaattcttaccgcgcccgtaaacatcacgaacaccgccgcgataaacgtgaacagcgcaaggtgagttacgtcaaaggaaaacaaggctccgcccgtccccacgcatacggcagccgccaaagccgcgcctttgccgacaaaaaaagccaccgcagtcacggcaaacattccgaaaacgtaaagcgtttttatgcggtaaaactcggttgcggcgaatcccgccgagagtacggcaagcactattcccatacatgccagctcggtatcgagcggtctgaaaaccgatttcctgaccaaaaacggcttgacggcgcatgtcgaaacatacatgaacagcaacgcaaacacaaggttcaggacagtataaagcacgaattgccccgcgcgaacggagaaaaatatgtaaccgccctggcttaaagcggaaacggcaagcacggcggctaaattcagctttttgccgagtttgtttgccgctatcgtagccgaggtcaccgttacggaagttatcgccgccgaaataagcgcgtcgaaaccggggtttatgataattgcggaagcaacgtaaagcggcaaaaggagcggcgccgaaagtcctgaaaacacaagcgccagataaaatcccgtggcaaacggacttatattacccgtccgcgcccgccacagcaccaaaagcatcacaaacacaaccgaatattttacgacggttttccataacggcgtttctttaaccgtgtctaagccggcaggaaccggttttacctttttcaatccttcggcctttgcgttcattaagaaatcccctcccgcaaaaaataaaaatccgacctttattatacagtcggatttaacgtgttattttggcggttaaacgcgaatttccgcgcacggagtcgaataatcttaaactttcggcttttttacgtccgtcaatatttgtttttgtattccacggacagctttacgggaccgtctaaagtcttacggtaaaactccagcctgtcggaatactcgtatatcaaaagcgtgctgtccatgcgggtgcggaatatcatgggcttttcttcggcgtgaatcctgaaagaattattgccgtaaaaactgtcgccgcggctttcatcgctaaaacgccgctcgtcctcctcgtgccgcaaaggtacgttatacggtaaaaatccgttagtgcttgccgcgtcgccgccgtcttttacttcggcggtataatatctgcctttatcggtgtttcggttatccgtatccgacggataatatctgtcgccgcctgcgccgttagccgtattcggcgtatagtatccgccgttggctgcagggcggttatcggtgttcggattataataattgttgccgactgcgccgttagccgtgtttgacggatagtatccgccgttggctgcagggcggttgaggtcggggttaacgttgtcggcggggaaaagcggtttatcctcgggtttaccgcccgtaaagtcggatttttgcgtgggttcggcaggctgaattctgacgtcggtgtcgtttgcaccctccacaaaagcgacttttttgtcttcggaaggcttagtgtccgaaataaaagccgtcgcgcgctttttttccgcggcgcgtttgtcaattctgcggaaaaacaaaaggacgtttacggctattgcaaagataaccgtagcgataaggcagaaaagataaatgctgagtacgtctttaaaacttgtgcccgtgacaagcactaccagcacgaaaagcaacgaaaaaaccgccggcacccaaagccccagcttaaacaggagccaggcaataagctttgccgcacccctacccaaaaagcttagaaaagaaacgagagctttcatccggcggttatccttttatcttttgtcgaagttacgaatgcttaagttacaaatttacggtaacttaaacagggattattttataatatccgtgcccatgtagggaacaagcgcttcgggcacgcgtacggagccgtctgcattctggaagttttcgagtatagcggcggtagtcctgcctacggcaagcccgctgccgtttagcgtgtgcagaaatcccgttttgccgtcgcgggttttgtacttgatgttcatgcggcgcgcctgatagtccacgaaattggagcaggaagaaatctcgacgtacctgccgtaagagggcatccagacttcgatatcgtaagtctttgcggaagagaaccctaagtcgcccgtgga

SEQ ID NO: 2061 - DNA, 32759 bp, Unknown
  16S sequences of unknown bacteria
aaattttttcaatttccttcttcatttctcttgacttttatttgcaggtcttattttttttctttgttttcgttccgatacgagaccgtttttcataaaacttttttcattttccgccgaagtttatttttcttcggacttctccgccgcgcattcagagttttccgccgcagaagcctgcttttcggcaagtcttttgacgaccatgtaatcggagccgatttcggaaatgacgactctttcgtccacgggaatgcgttcggcgtcgtccgtgacggcgtcgagctccgtataggcgccctgcgcggtgaggacgatttttcccctgcccgtgcgggaaggcgcgatggatacgtatacagtagcttcttttccgatcaatttttctttatcgagattgccgttgcactgtaactttgcgatgccgcgaagcgcgagggcgacgagaaccatggaaaagagtcccgacaccaacgagacgataatggcgagcgcgatatttttggaattgatctgtaaaatgagaagtcctacccaaccgccgatggcgaaaaaggccgtaagacctttgagcgtgaacagagaaacgccgagcccgccgtccggagtgtcaaaatccccgtcgccgccgaaatccccgtccacgtcggcgtcgccgccgaaggaaacgagcatcagaataatctgtacgacgagcagcaccgttccaataacggcgatatagaaaaatactttttcgggcgtcgtcaacgaattataccacattattgaaaatcctcctttttaggatattcttatcttgattgttacataccgacaaagagaaagaaaagagtcactttcccgaaacggggggattttcctcccgccgaacaggggggctttccttttatcgaaaaagacccatacattgtatgtttccacacagtgcatgagtctcattttttaaaagccatccgaacggatttgcccttccgtcaataagtcggatttcgttacgtatggttccgtaatgaaccgtgcgcaaattactccctcaacttgcagtatcgtcagtctgacaagttttctttgttcagtttaaatatattatatcacattttccgaaaaagtcaagcgttttttgtaaattttccgcacaattcgacctgccgaccttcggacgggaatttaaggcaacttttttcgtcctcgtccgcgattcattcttcgccgttatctttgtccttgctgttgccgaggtaggtaccgaaaaagtcggacgaaggctttttgtaggaggtacgaggcttatcgtaaggcttcttctcgcccgaaaaatccgttccgccctcatcgcgacgctgattatacggcctcttgtacccgtcgttgttatagtacggctttctgtactctccgtcctgattatagggtctcctgccgccgcggttatagggctttctatacccgtctccgtctcggccttcccgattattatacggctttctgtatccgttgttatacccgttattatatccgttgtatccgcgatgatagccgcgattgccgaagcctccgcgggaccgctcctcgcgcgcggaataggcgggggcgtcgggatctcgcaaattagacggaacgatgacgatatagcggtacggctccttgccctcgctctccgtcgtcacgtcctgtctgcccgaaagagccgcgtggataattctgcgctcgtaggggttcatgggttccagcttgattttttctgcatagcgaacggcctttcccgccagcttataggcgagattttgtaaagtagcctccctgttttcccgatagttctcgcagtctaccaccactctcttgtattcctcgcggcccgtattcgccacggcgcccgcaaccgtctgaatcgcgtccagcatttccccgtgtctgcctataatcgccttcgtattcgccgccgtcacttcgatttcgattttttcgccttcccttttcagctccgtgcaggcggtgatcttcaataattcgagcagtccctccaaaaattccaccgcccgttccccgtccgtccgtccgagagaatcccgatgaatattagaaacttctaaattcgtttctgcggcgtttttgtcgggggtcttactctctgtctgccccgacgccttttcttcgtctgaggcccgttccgcggccttaggagcgatttccacgcgagctttgacatagccgaataattttttctttccttcctccaaaatgcgaatatccgcttcctcccttgaaagccccaattcattcagaccggcttcgatcgcttcttccgcggtttttccggtaaattccttatattccatgatgtctatgacctcctgtcataaaatgctctgtttatccgatttattccgtcaatatatattatttttgtttctttttgtccgtctttgccttatttttttcggacttcgccctatccttttccgagacatacacgcggccggggaaacgcttgttatactgctcctgcatggccttttcttcctttttactcatggtcacttccacgattttgttgatgagaagcgtcatgattagggagagaatattgctcgtgaccatataaatggagaaggcggcgctgtacataaacgcaaagatggcaaacatgaccgtcatgatgacgagcatcatcttctgattgaacatgccctttccgtccacagaggagaactgcgtctgttccttctgcgagcgcatggatacgaactgctgtaaaaggatcgtgccaatcgaaaggacgatcaggataaagtatccgttcgcctgggatttttccgccgaaagtttcgccgtcactacgttgtagctgttttcgttgtatacgtcggtatagccgctgatggaggagaatttcacttttccgtcctccgtggagaatttttcgcgggagacggtggatttgaattcgctgtaactcaaaacggggtgcttataggaagcgtccgtcacccagatattcttgatccagccgaaactcattctgtcctttacgacggtattgtaggtttccttcacttcgtcctgcgcggcggacacgagggcgtccctgcacgcattttcccatgttatgggattttccgtctcctcggaagcggaaacaagctcgtccaccacgggtttccattcctcgtccgcgtacattttttccgcgtccacgtaataggtcttttccgaagtcttgatatagtcaaaatcgtccgcagcgtaattctcgttatacaccaccgtataataaatatatctgttttcgcccgcttcgtccttgataagaagaaatctctgtgtttctccgttctctccgtcgagcgtgaagtcggaaatgttttcctctttcagctccgcgcaataggggttgagataggcgttataggaatccgccatcgagttatagttctgaatgttcgcgtattgagaaaaggagttgaacgcgctgatagcgacgaagaatacgacgagggacaaaatggcgggaaggcaggaagaaaacatggaaatgccgttttccttatacatttccatcagcttctgattatacatcgccttgtcgttggcgtactgcttttgcagtttctccattttttccttgttttctttcatcttgatgttctgcttgcgcatagtcaccctctgataaatatcgaaggggagaacaatcattctcaaaatgatggaaaacacaataatgccgacgccgacgattcctatcccctcgatgaggatacgaatgagctgccccagccagttcagggaaatatcgtacgtccttccgagaaacggaatgacgggatcgcttgccaataaagtgagaaagttcattattttattctaaacctttttgatgtccgaatgaatgtccgtccggcccgaacgtttgccgcacagcgccttgcccgatatttttcaaagcatctcttcgacgcaacagaaatacattttcccgtcacagtagccagcgctttttgaaatacttttcgggggcggggtcgtaaccgcccttggaaaagggattgcagcgcagaatccgccacgcgccgagcaatatcccgacgatcgccccatgattgttgatgcattccagcgtatattgggaacaggtgggacgatacaggcaggtatgctttgaaatcctcctctgataaaagagaatcagccgcatgcacagcattttgagatacggcttaaagaccttctttttcagatattttccgtttgctctgataagtgcggaaaggccgatatttacagtttttccttctttatcatacatttcaagtgtcttttgaaggtgttcaggtcgtattcgtccctgactttcggcacgagcaccaccgaccaatttccagtcatctcttcccgttcggcgcggaacgcttcccgaaggagacgctttatcctgttgcgctttacgctcttgccgtggcgcttgcccacggaaattcccatgcgcgtttccttcgagggaaaataaatcatcgtgagcgagggggaaaatgcccgcctgcctttcgtaaacagcttctgaaaatccgcctgttttttaagtctcagataattcattctcctctccagcaaagagcttcacgaaaatacggataataacgaataagccgcatttacagaatctgtactgcggcctttcccgtccgggtgcttgtccttaataggaaagtttctttctgcccttgtttctgcgtcttttgagcacgttccgtcccgacttcgtggacattctctttctgaatccgtgcaccttgtttctctgtctctttttgggctgatacgttcttttcattttctttgtctcctgttttggatttgtttttttattttctactccgccggctgataaaccgccgcggctgttcgcggtctcgataaaaagagccgcaaacgactctctttacattatagcgcacttttccgcccgccgtcaagcgattatgcgcccgttcttacaggtaaaatcaaatatgcgtcctctttcgaccctttgttttcgagcgtgaagggcgaaatcgcattgttgaatgacaatttcaccgtctcttcgctgagcgctttcagcgcgtccagcacaaattttccgttcatcgcgattttcagctcttttcccgacatttccactttcacgctctccgccacgttcccgatctccgaattcgccgtgatgagaatgttcccgcccttgatgtccagaatgatgagattgttcttatctcccctgatgagaatcgacgcgcgttccacgctctcgatgagctccgcgcgggaaacatagacttccgtcgtgaacgcggaagggaaaatattgctcttgttgacgaattcccccgtatacaggcgggacgtgagcaccgtatcgttcaccgatacgaaaagcatattcttcgccacgtaaatttttaacgtctcttccccgttttcgagcattctcgaaatctccgtgagcgtgcgcgcgggacagaccagctttacgtttccttttcccgttttcgcctcgcattccgaaaccgccattctgtatccgtccagcgccgtcgcgtgcagcttacttccctccgtctccaaaagacagcccttcaaaatgggcctgctctcgtccgtcgcgcagcagaataccgtctttgcgatcaacgatttcagagacgattccttcacctcgaaataatcgtctcccgcttccgccttgatgagcggaaattcctccgccgaaagcacctgcaaaaaggattccgaatccccgtaacggatttccaatcccttctcccctgtggagatgactacgttcattcccgaaacctttcccatgaaatccgagaaaaatctgccgtttacgcaaatttctccctcttcgagaacgtccgccttgatctttttctcaatggaaatttctccgtcgtatgcgatcaacgtcaccgcatcgttctgcgcgctgattttgatacattcgagaacgggcgtcgtcgtcttggtcgagcaggctttgctcaccgtcatcgccgcgtccgaaagaatgagcccttcgctgataaatttcattgctttccactccttttcccgccgaggtacggcggctcgtcgttaatccttacgattcggattcattttaccatatctgtccgtttttggcaagcaaaaatctttttcatcggcaatttttaagaaaattttttccttccctccctcctcctccccgttgattttttatgatagaattgtattattagtattaatagtagtctcggtggaattgtggataagtcccgttttttcgcttggacaggcctgtttctcggtataaaagcattgtggataactcgcgccatttttgtggataacattgtgaatcgagtgtggacaagtggaaaacttttgttcgcgggaaagttgagtttataaaaataaaatattttatgaataaaaataatatttgaaaaagttatccacaaaagttattcacattgtggataaagttatcctcatgctgtggacaagcgggaaaaaagagagaaagcgtttttttgaaagaatggaggaaaatttttccgataacgcttgaattttgatttcaggtatgttataataaaaaacgaaatggatatagaaaagattttacaggcaaatcaagcgttgatttccggcgaaaaacgtgcaaaattcgagcaatttcgttctttattgctggaatataatcaaaaatacaacctgacgtccattacggacgagcgggatgttttttacaagcattttctggacagcagtgcgggaacgggacttttccaagagggcgcttccgtcgcggaggtcggttcgggggcgggatttccgtccgtggttttgaagctgctcagagaggatttatcctttactttattggaaagcgtggggaaaaagtgcgagtttttgcgcgtcgttgtggataacctcggcctgaaaagaatgaatattgtgaatattcgcgcggaggacgccgcgaaagaggaaaaatatcgggaaaagttcgatttcgccgtcgcgagagccgtggccagaatgaatactttgagcgaatattgccttccgctcgtcaggacgggcggggcgttcgtagcgtataagagcggggatacggaagaaatctccgaagcggaaagcgcctataaaattttaggggggaggaaaagggacgtatttgtctattcgttgcctgaaaattacggggaaaggagtttggcggtgatcgaaaaggtacggccgacgcccgcgaaatatcccagaggcaacggaaaagagagaaaaagtcccctgtaagaaaaaatgaaagaagaatcgagcgcgttttgcgcggaaaggtgcgaaaaagtctcgggattttcttcgtgtgcctttacggggcacagaagtctggggcgggattttgacagggaaaagctcaaaaggacgattcgggaaagaattctcgacggggtgaaggtgttctattgcggcatggcggtgggattcgacctcgccgccgcggaatgcgtcgtggaattaaagagcgaattcccttccgtcgtcctcgtcgcctgtatcccctgtatcggtcaggaaaagtttttcggggaaagggataaaaggaggtatgaaaggctcgtcggggccgccgacgtcaaagtcattctttccgataaatattattccggctgtatgctcagaagaaacgagtatatggaggaaaaagcggatattttgatctgctattgccgcaaatccacgggcggaaccgcgtttaccgtggaacttttcaaaagaaaaaacaaaaaaattttcagcgtctgaaacgcacgttttttcccttatctctcataagatgaaagagaataatttcctcgcgagataaaggagaaactatggcggaatatttcaaatgcagcgggttcgactgcaacggttatccctgctgctgtcagaaggtggaactcattcccggccccgtcggcccgcagggaccgagaggcccccgcggcgtacccggaactcccggcccgcagggaatacagggctttgcgggcgaacccggaccccgcggagaacggggtttacagggggaaaagggcgaaaaaggagataagggagatccgggagagatgcgcgcgcaggaatacctgtccgctctgcataccgacggaatttctctcaacgtggacgtgggaggaactcccgttcccctgaatgccgtcgcttccgacggattttccgcaaatcccgatttcacctcctttgccgtcggacagagcggcacttacttccttacatacggcgttaaaaccgttcagtccacgctcgtaaagacgcggattttgaaaaacggaacgctccttccgggaaccattcgttccacttccgtcgcggataccttcttttccgtctctttgatcgcaacgctcgacgcgggggacgaattggctctgcaattttatgatctgagcacggctctgtccttacaaggcggaacgggagcttacctcgtcgttatccgcatcggctgaacgaaaaaatccaaacataaagagggcaggggattcgatatgccgaatcccctgccccttttgttctttattttttttcgtccactgctcgccgtaaacggcggggcaggtatgagacgagaaacaatatcattcggaaagctcttccgtttcttccctttcgggttctttttcctgcgcttttttgaaacggatttcctccgcgggaaaatccttatagataagcccgccattgtggtcgtcgattttgactttgaccgtcattttcagcatattgaccgaaacgaccgtcccttttccgtcgggcgttcccacctccgcgccgagcttgggaacttttttatacgcttccgcatagtaatcgctctcgtagcttaaacagcacatgagcctgccgcagagcccgctgattttgccggggttcagagaaagaccctgcgttttcgccattttgatgctcaccttcttaaattccggcatgttccccgcgcagcagcacacccgcccgcagggcgcgattccgccgagatatttcgtttcgtcccgcgtgccgacctgacggagttcgattcggatatgaaatacggaagcgaggtctttgaccagctcgcgaaagtctacccgccccgaagaagtgaaataaaagacgattttcgtgccgtcgaacgtgtattcgcagtcgatgagcttcatgtccaattcgtgcttcgcgattttctctttgcagatgctcatcgcctgcggctttttcgcttcgcaggaagcgtaaaaatctttgtcgcgctgggtcgcgattctcacgatggatttcaggggcgggacgatttcactgtcctccacttcccgttcgggataggccacccaggcaaattccagaccccgcgccgtctcgaccaccacgggcatgttccgttcgtatacgtctcccggtcggggagaaaaataatacagctttccgccgtttttgaatttgattaccactacttttgtcatatatcttccttatgtgccttacgggacattttgccgcattctccgaagcggcacaaatattgcgcccttcaaaaaatcccgcaaggtcaacgattgttctgttctatgattttcgccatgcagatttccaaacattggggaaataccgcgttgaaacggatttgcttctccgcttcgctcaacgcctcctgcgccgtgatgagcgccgtcaatctataataatcacttatactttttaatctgcccagctccgatttcagcatgagataattttccgcgcggttctttcccgtcttatccgagggcgccacgccgtttatttttgaggtctttaagaggagcgcgtcgcggaaaatcagcctgagcaaggagacgagctcctttttatatttggtctctcccacccgctttacgatggaagggaggcggaaagggtccgtctccgccagctcgaaggcgtctaaaacgagctgtttataatatccgccctccaaaatattctgcgccgctcccacgcttccgcccgacgcggccgcgcagagccccgtttcgctctccttgccgggataaaggcgatttaagcaggccgtgacttccctttgcgtaaacgggggaatttccagcttttccgtccgcgaaagaatcgtcggaagcacggaaaacgatacggtcgctccgagaagaaaatatactccttcgggcggctcttccaaaagtttcagaagtttgttctgcgcctgcgtcgtcgcttcggcaaaatcgcccgcgacgaaaagttttttattcccttcgaccggcttcaacgcgctctcttcgaggatccgctccgcatcctccaccgaaaattttttccccgattcgggaaaaaacatacaatcggaaaagttttcttcgtctatcagtctggaaatccgttccgcgtccgctccttctccgtccgcaccgaaaaaaatctttgaaaattctttcagcgccgttttcagattcctcgcatcgtcgaagatgagaagataagcatggtttaatctgccttccgtccgttccgctttcagaagcgtacaggcatgagtcgattgcaataattgacgcattttctctttcctcgctttgatttttttcggactgtttcgataccattatatcacaaatcgcaaaaaactgcaagtacaaaaaataaaaaagagaaaaagtgcgctcttttttgaaagatttttgatataataaaggggcagggttgagatgaaacagaattatttcacaaaaatttcctttacagacaacatttttctttcagcgcggagaggatttcttcaaatacctcgttcggcgtttttcttccgtctaccgcccgtattctgtcgggatattcttttaagagttttttatatccttcatagactcgcatatgaaattccgtccccgcctgttccatgcggtcgttttcgtcggcgccgtgttttctcgaaaaggcttcttccggggaaaggtctataaaaatcgtgaggtcgggcagatagtttttgacggcgtacgagttgatgtccgcgataaaatcaaaacccaatccccgcgcataggcctgataggcgaaggaagaatcgatataccgatcgcaaatgacgatttttccttccttcaacgcgggctccacccgatcgtgaatgtgctgcacccgcgcggccgcatataaaagtgcctcgcattcgtccgtcatttctccgttccttccgtccaaaataatctcgcggatacattccgaaattttccctccgcccggctctctcgtgaaaatatgcggaattttgttcgcggaaagatagtccgcaaacattttcagctgcgtggattttccgcacccgtcacagccttcaaacgtgatgaattttcctcgaatataatttttcatataagtaatccttataccatgtggttatgaatatgcaaatattcagtcggtagttagtcgatcggcttatcggaattttcggcgaatacgcagatttttccgtcttgcaacccgaaagcgttatcggcggttttgaggagacggattttttccgctgcgattttttcgttcggaaacagcagcggcatgcacggcggaaacaatccgcacgcgcgagcgcaaatcctcccctccgctctttcgagttctatccactccgtctgaaaggacggggcggacaggcggggcggaggtacgggcgacgtcggggccgaaaatcccgcgggatttttacgtgaatcggagaggggaaaaaggcggaaacagtctttcaaatatttgcaaagaagggaaaagtctctgattttcgtggcgggggaaagatagaacatcaggatgtttccgtcgcagaattccgcgtagacgccctttttttccagatatttttcgacgaggaaagacgattctccgaaacgcacgcaaagttttgtccaatctccgccgaaatagattcgggaaggatttgaccgaataaatcgaagcacttccctttcgagtttcggattttcccgatattttaccgcgtattccaccgatgccatgatcggataggagggactcgtcgtccgaaaaatgtccaccgcctctttcaaatcttccgcctgtttcaaagtcctcgccgaaacgacggctccctgcgtcaaagccggcaggctcttatgtactccgtctacccaaaaatccgcgtatgcgcccgcatagagctctttttgccttctgagatgccccccgtgcgcgccgtctataagaagaagttttttctccctgtcgcaaagctcccttaaaaaaacaagctccgcaatattcccgtaatagtcgggtgacgtcagaagaagcgcctccgcctgcttcaattttttttcaatctcttccctgcatggctgtaacgggattccttccgaacagggtatctctaaaaatacaggttttatatttagaattaaacaaccgtttaagacacttttatgggccgagcgcggcagggcgagagaggttattttgctcgctttcagcatggaaaatatgcccgacgtgctcccgtcggtgagaatgaagctcgccgaggaatgaaggagcgcggaaatatctctttcggcttccgcgatgactcctttcgggcaggaaaggttatccgagtaggataattccgtgatgtcccaatctcccgctttatggccgggcgtatgaaaagaaacatgcttccttttcgcgtgtgcgcgcagcatgttgtaaattttacagctctttaaggtccgtttgtcgcaaaaaatttttttcatggcaggaaattgggaaaaggggaaaactcaaaaaacgggaggtttactctcccgttttcagattcgtttgaatgagataattgacgaaggaaagtccctcccaacggttgtaatccgaggccgcatcgccgaaatcgaataaaacaaggttgacgttttccgccgtgggaaccttcttttcttcctccgtctcttcgtctttgaccgtcttataataatatacgtcgtttttgaggtcttccattcgttcgtcgggacagagattgatgctgaattttcccgtcttttcgagtttttctcccgtcgccgaattttggagatacagcgtcgtttcctgcaattcgacgacgcccgattcgagataaccgttaaaatcgatgaatgcctgacgataaccctctatacgcgcaagctccttcgcaattccttcgcggatttccgattctttcttgaatctcttgtcctttgtctgcttgatacgggtacggaaatccgtttcgattttctgtttgtccgcttcgcccttcgcataatcgccgccgtaataaccgttgagatattcttccatctcttcgagataaacgtccatttcggccgctatattataataaccgtaaaggaattgttgaagataggtggggtggaaagcgtttccttccgtgtccgcatactccgcgtcggggttttcgacgttcgccgcaaacagcgcgtctccttcgcccaccgaaagccgcgtttgaaggagcgtttcgctgtaattttggcccgtcgtgatgtccgtcgcgctgatttctaaaatttcataggaaaaaactcccttctcctttaatgtggacgaatacgagttaaatcggctgttcgcgctcgttcccgtgtaattgaatatcgtaaaattctgcgcgttcgtcacccgcgtcgccgtcatggtgaaaacaaggctccacaatactatcatggcgaccgctacgagaatgatttttatccaatcataggacaaaagaatattcagacgtttttttgttatctttgcatccataaacgctcctattagagaccgagtgcagtatatctatattctattaaatttgtgtgtgcgaaacatgtccgtattgtgtatttttcttaaacaataaaaatgtgaataaaagtataataatttaataaataagactaccgtatatcaaattaaagaaaaatatttttgaataatcctataaaatttcacggatagggtaagaattatttcttcggcttcatggtcgggaagagaatgacgtctcgaatggtggagctgtcggtcaagagcatgacgaaacggtcgagccccatgcccagtccgcccgtcgggggaagtccgtattcgagcgcgttgatgaaatcctcgtccacctgcgcgtctttgtttcctgcggcgcgcttggcctccacctgttttaacattctttgtttttggtcgatggggtcgttgagctcggaaaatgcgttgccgtattcgtgtccgcaaatgaaatactcgaaacgctcggtgaaagcgggatcctccgttttgcgcttggcgagaggggaattttctacgggataatcgtaaataatcgtcggctgaacgagcttgtcctcgacaaaggcgtcaaaaaagtcgatgaggacgtgccctttggtggagttctctccgtgggagagctctacgcccttttctttcgccgccgcgcgcgcgtccgcgtccgatttccaatccgcatagtccgcccccgaatattttttgaccgcttccgccatcgtcatccgcgaccattcgcccatgtggatttccgtaccctgataagtaatatcgagcgtccccgccactttcagcgtgaccgtcttataaagatcctcgatgaggtccatcatgtcaaaataatcgctgtatgcctgatacatctctatcgacgtaaattcgggattatgaaaagcgtccattccctcgttgcggaaaattctgcccacttcgtagacccgatccatgccacccacgatcaggcgcttcaaatagagctccgtttcgatgcgcatatacatgtcgatgtccagcgcgttatggtgcgtcttgaacggacgggcgtccgctccgatttccagcgtcagaagaacgggcgtgtctacttccagatagccctgtccgtcaaggtatgcacgaatctctttgagaatttttgaacgggtttcaaacgtctttctgacatctcggttcatgattaaatcgagatggcggagacggtatttcaaatcctgattttgcagcccgttatatttttcgggcaggggcaggagcgctttggaaagcatgacgagttccgtgacgtgcaccgtcacttctcccgtctgcgtcctgaacacaaaacctttgaaccccacgatgtccccgatgtcgtaatcctttttataggaaagatagttttcctctcctatatcctgtctcgtgacgtaaatctgaatcgaaccgctcttgtccgctatatgcgaaaaggaagccttccccatcacgcggcgggacatcattcttcccgccatcgaaacggtctttccttcatacgcttcaaaattccctttcagcgtctcggaatccgccgtcacttcatacttggtatgcccgtagggattctttccctccgattggagtttttgcagcttgtcgcggcggatcttcgcctgttcgatgagttgttcttcctccgcctgtccgtcgggggcggaatttactttcttttcttccatagatgagcctctcttagtatgtctttacgggaaaagggaacggcgacgaaaccgccggggtaatgaattaacgagaatatcggttaacggaaagtcggtcaacggaaaatatcggtcaacgagaacatcggtcaacggagaacatcggctaacgagactgtcggttaatgagactatcggtcaaccaaaataatgacaaaactcgaaaagggggaaagcgcgggaaggacggtttgccgcccgccgtgctttccgtgccgaaatttgttcgaaaatcagctgatttcgacgattttcagtttataggctccgtcgggagcgttgatgagaacttcttctccgaccttatgcttcaagagcgccgcgcccacgggggattcgttggaaattttgttgttcatcgcatccgattccgtggtgcccgtcagctcgtaggtttcgtactcttcgagttcctcgtcgtataccttgacggtggaaccgatatgcacgaaagacgtatcgtcgttctcttcgatgatctgcgcgtttttgattttgtagtcgagctctacgatctcgccttcgttggcggactgctcgttgcgggccgcgtcgtattccgcgttctcggaaaggtcgccgtggcttctcgcttccgagatgcgttcgataatctcctggcgtttggtggtctgcaaatatttaagtctttccaccgcctcgtcatatcccttttgtgtcataaaaaattggtcagccataaaaaaacctccgtattatggtgcttgctgtccgtgcccgattcgctcgttttccgcaaaaatacatgcaaaaaagcgttctcttcgggaacgttaaaaatacaaccgtgacttcgtttcaaagccacggccaaagtatttcaatacttttattataccctatttatcgccctttgtcaatcaaaaaataacagggtaagacgataattatttgaattgcttcataaatttggaaatgcgtcggaaggcctccaaaagtgctcctgttcccgttgcgtaggaaatccgcacgcagttttccccgaactttccgaacgcgcttcccggcacgacggcgaccttttgttccttcaagagcctgtttgcaaactcctcgcccgaaagagaggattccttgaccgaggggaacgcataaaacgcgccgtgcgggggaaaacaggtcagccccgctccgcggagcgcctccaatacgaaacggcgcctgcggtcgtacgagtcccgcatttcctccaccgccgcaaagtcgtcggaaaagccgtcctttaacgcttctatcgccgcatactgcgccgtgatgggcgcgcacagtacggtgtattgatgaatcttgaaaacggcaaggtcgatgtccgcgggcgcgcagacgtatccgagacgccagcccgtcattgcgaacgctttggaaaatccgcccacgtataccgtgcgctccttcattccgggcagggacgcaaaggaaacatgcttttgcccgtaggtcagctccgcataaatttcgtccgacacgacgagaaggtcgtgcttttcgaccacggccgcgattttttcgagcgccgttctgtccgcgatcgcgcccgtcgggttattcggataggtgagaatgagaatcttggaacggggcgtgatcgctgcttccaatgcttcttgcgtcggcaggaatccgtcctcctccctgcattccaccgcgacgggaaccccgtccgaaagcagtgcgcacggcgcataggatacataggcggggtcgggaatgagtatctcgtcgcccggctccgtgcacgccctcaaaacgaggtcgatcgcctcgctggcgcctaccgtcacgagaatatgcttcgggtcataggtaagcgaaaaacgggtttcgagatagcgcgaaatcaactccaaaaggggcgccatgccgcggtttgccgtgtactgcgtgtaacccttctgaatggaagaaatcgccgccgaacgcaccggccacggcgtgacaaaatccggttcgcctacgccgagggaaatcgcgccttccgtctcgcgcacgatatcgaaaaatttccggattccgctcggctgtaaaattctggttttttggtttacaaaattgcgcatataattatatttacgcatgtacggaaagtcttttgtcatggagacgttccgtaagaactccttctattttatactttttcaaaatgaagtgggtcgccgtgctcagcaccccttcgaacgtcgaaatacactccgacacgaaccgcgcgacctttctgagcgacgctccctctacgaataccgccagatcataaccgccgctcatgagatatacgcccttgacttcggaatattccgcgatccgtcgggcaattccgtcgaagccttcgccctttttcggggcgactttgacctctatgagcgcctctacccgcctttcgtcctgttcgtccgtgtggacgatcgtcatatatttgacgatatagccccgctcttccaaagaacgtatgagagaagagattttttccggctcctcctgcaacatggaagcgattgcttcgggcgtcagccgcgcatcggccgaaagaatggagagaacggatttttcaagttccgtcataaaagtttcctcctcaatatataagtattgcttataaaattatgttttcgagaaacagctggtcgtagtcgaattcctctatgaaatctcgggaagtgaatttgacgtgattgaatttcgcaaagttaaaaatatgcgtcttcaacagcacgggcgtagggatatccagctcgtggcagatgtccgcgagatagtcgaaaaagcgggaatacgtgaggcgttcctctttctcatagacgaattgttttcggatttttcctgcggtaatgagttttgcccaaatcttcatacttctattatacaggaaattcccgaaaaagtaaacaaaaaaagggcacttgaaaaaatgccctttcatccgttgccgccctttttcaacgggtgtgccgcggttattgaaaaatcgcggctgttcgttggaccatgtttaacagggagtgatacggccgcggttgtccgttaaccatggttggcggggactgagactctgcgtcacgcccgttgaaccgcatggtggcgggtgtaccgacgcaccgcgacaacttattgaatgcgttgcggttatcggcgcgatgattgattatttattgaacatgattttttcgttgtcgaacatctttgcgagtgcgaacgcgagcagcagcgccacgacgagattggacgcgatggtgatgattacgttcagcggcgacgcggcgaacgagaagattccgctcatggcgcgggcgctgttatagaggggaatgaggtaccagaagaacgcgcctgccgaacccgaagtgaacatcgtgctgacgcccagaagcacgaccagaatcatcagggggccgatcatgttggtcgcttccttcacgctcttcgcgaacgcggagatgagcgaaatcagcgcgacgatgacgagcaccgaagacaggacgattccgaggagcatgatataatcgctcgcggtatagaccgttgcgcttatattgccagtgcctcccacgagtttgggcagggaaagaatgattcccaaaaagctgcatatgccgctgatgagggacaacgtactcagagcgatgattttcccgatggcgatatggctgcgcttgacgggcgtcacgagcatggtcgcaaacgtaccccgttccttttcgcccgcaatcgattccggtgcaaccgccatgcagcccgagaacaggaacacgagcacgagcatggggccgatcatagagaacatcattcccgtgacgtctttatccgtcgcgaggtctccgtccagaggattgccgatctggaaccagccttccgagggttgctggaagagttcgagcgccgcggaaaacagctgaaacgccgacgaggattccgaacggacgctgttatagtacagatcgtattggggaatttcgtccgaagtgccgtttttcaccgcgttgtatttttcttcgaaatcctccggaaataccgcgacgaggtcggttttctgatcctgcacctgcgtttttacgttctccaaatcttccgttgaagtctctatgagattgatgttttccagctcctcgaagggggctttgaacgaatcgggcatgtttaccgtatgcacctgatacacgtagttttcgtccgttccgccgatttgggaaaatattccgtttcccaaaaaagaataaatgacatagatgagcacccccggcagtatcagcgccagcaccagccttctgtccttgaaaaagcgggaaaactcctttttcatgatcgtccagatatttttcattccctgcctcctttcgtctccgcgtaaatatcgaagaatacgtcctccaaacccttctccttcgtcaggttcgtcacggtgtcctccaccgtcattttaccgtcgatgatcacgcctacgcggtcgcagattttctccacgagactgaatatgtgcgtggaaagcagaatgctcttcccgcggtttctgagctccaccaaaaagtcggtgaccgctttcgccgtcagtacgtccaggccgttggtcggctcgtcgaagataatgaattcgggatcgtgcacgagagagaccgcgatagaggtcttttgcttcatacccgtggacagatccgcgattttcgtctccgcgaatttgtctattccgaagcgtccgaacagcgtccttttgcgttcgtcgcgtacctgggtggggatattttgcaattcgctgaaaaagtcgaaaatgtagttcggcgtaaagaaatcgtcgagtttgagctcgctggtcaaaaatccgatttgcgaacgcactttgtcgggctgtttcacgatgctgtatccgttgatgagcgcgtcgccctcgtcgggacggatcagcgtcgccaacattctcagcgtcgtggttttacctgcaccgttgggtcccaaaagtccgtaaatctctcctcgcttcgctttgaaggaaatcccgtttaccgcaatcttttctctgagcggcgtcttttctatcttccgctgcttcgccgaaagacgaaacgtctttttgaggttcgcggcaatcagtacgtcctcttttccttcgcccgaaagcggagaaggggaaagctccgcaaagggctgttcctctgtcaagggttctgtgttttccataagttctccttatataatttacaagttttcgcggggcggctcctcttgcagaagaagctcgatttcccgttttttgaaatgtgaagtgacgaaaggcagggcaatacactctcctacgattgatgccgccagccagccgaacgaaataaattccgtctttgcgaaagtatccgccagcgcggcaaggatttctccgatccccataacgacccagactttgcccatgactctgtgcgtctgcgcccagacgtaatcgctggcgagcgtcgagggcgtcttgattcccaacgttccgttccgcttgattacgggaagataattccccataataatgaacatcattcccatcggaacgcaaacgagaatgtaaaggggagcttccgctttctgcccgatttcactgacttttccgcaccagacgagcatcagccagcccatataaccgatcagcaccgcgataaacgtgagaatgattttcaggggctttcggttctgcggcttctgccctttcctcacgttttcgaatatcagtccgaccgccgcgaacggcggcagaacaaacgcgggcaaatacatccacggcgaacctaatttatccgcctcgaatgccgcgttgaaatggaccgctacccgatcgggcgacaagcagataaaaacaattcccaaaaccgcgttcagaagcgtcgccgccagcaatacgaccggataagaaattttttttgacaagaaaaattttttcttcatggcttcatcccttcgggaagagcaagctctgcgcccgtcgagccgtcaagggagccaaacttcgaaggagcggcaaagttcggcgaggaaatcccgcccgattctccccctttggcaaaatcagccgcctgcggcgcaggcgtgcgctccttcgcggagcgcacagaaggggattcctccgcgttcgcttgcgtactccccttaaaattcttatcggcaaaaagattgttcaccgtcaacagaaaggattggaataccgtcatgttcagagaataaatgatcgtctgcgcccgcttctccgtatcgaccagccccgcgcctttcagtacggacaagtgatgggataccgtcgctttcgtcagatcgaagcgttccgctatctctcccgcgctcaaatctttctccttcaacatcgcgaggatttcccgcctggttttatcgctcatcgcttcccacacgtctcgcacggcttcattttcctcctttttgtttatttagataactatctaaatacaaatttatcatatcacagaagaggtgaggttgtcaagcgtttggaacaaaattttttgaatagtccgtccgaaagggaaagaggcggcagaaaaaagagcgaagaaacggagaaagtgtttggcgggtggaaaggtgatgaagaaaggggagaggcggtttgcaggtaaaaaggaaggaagaaaggaagaaaggagggaaggcgggttacgggtgaaaagagaacggagaaacgcgaaaaggtgtttgccgggtaaaatcgggacggagaaacggaaaaacggtttataattgaaaagagaacgaagaagggaggaaaaaagatttttcgggaagaaattttattcagtcataaaccggaacgtgtgtccataaaatagagcaaaggtgagaaaaggagtgcggggctattcgacaaaattggcgaaaattcgactctacctccgattttccgaccggtgaaatttggtagcattgaggtatcgaatgaaaataatctgtttcaaggcaaagcgagtcctggggggattcggcttactggctcttgcgttggctgtgatggtattaatgcgagaggtgggggcgtatgccgtgaacgcgatgacgaaagcgcgttcgttgcccatttattcagtggcgcgggaggagaagaaaatcgctatttccttcgattgcgcatggggaacggagcacacggacgcaattttgaaggcgctcgatcaaaacgacgtcaggtgtacgtttttcatggtggagttctggacggagaagtatcccgaatacgtaaagaagatagacgaagcgggacacgagatcgggacgcacagcaaaacgcacccgtacatgagcaaattgagcgaagcggaaatccgcgcggagctttcctcttcgtcagaggcgattaccgccgtgacggggaagaaggtggatttgttccgccctccgtacggggattacgacaatctcgtcatcgacacggcgaagtctatgggaatctattccatacagtgggacgtcgattctctcgactggaaagacctttccgccacggatattgccatgcgtatcatcaacggcgtaaagcccggctctatcattctctgccataacaacggcctgcatacggcggaggcgcttcctttgattttttccacgcttcaaaaccgcggctacgaattcgttccgataggagaactcatctaccgtgaaaattacacgatcgattcggccggaaaacagcacctcgcggaagaaaattaaagcggaaaacggaacgcggcgccttggaacagattgttttcattcgatacacatgcaagaaaaacaaaatcggaggtttttatgaattactcggcggaaaaaaacaacaaggtctacattatgggtgaaatcgtgagcgacgcggtgttctcgcacgaagtgtacggggaaggcttttacgagtttttcgtgcgcgtcatgcgcctttccggacaggcggatattctgcctatcaccgtctcggaaagattgattcagggctcggccctttccaagggttcgtccatttgcgctctgggacagttcagaagctacaataagctggaaaacgggaaatcccgactcatgctgacggtgttcgtgcgggaaattctcgacgagattccgggaaaaaatcccaacagcattcttttgagcggctatatctgcaaaccgcccgtctaccgcaccactccctttaaccgcgaaatcgcggatattctcgttgcggtcaaccgcgcctacaacaaatccgactacattccctgcatcgcatgggggagaaacgcccgtttcgtcaaaaacctctccgtcggagacaaagtggcgatctcgggacgcatccaaagccgagagtatcaaaagcggctctccgaaacggacgtcaggacgatgaccgcctatgaagtctcggtctccaaactcgccgcgttcgacaacgccgaggatttcgatatagacagcgaattcgatttatataccttacagagccacgcgcaaggagagggctcgcagatgaacgacaatatcgtataactcctgttcaatgcgtacccgccccgctcgttttcaaaaacgagcggggcgggttttcttatgcgaaaaagttgcgggaacttaaaaagaattatatttttttgggatttgaatattttgcggtcggagaaagaaattttacttgacaaatatgtgaaaaaagtgatattatagtaaaaattataaaaatagaacaacgcccccctttttgcgaaacaagaagctcgaaacgggtctttccgcccgttcgggacagccataagggggattttttcgggcttgacggacaaaaatcgctccgattcgcgcggcgaaagaacctcggtgcgactttcgaaaacaggaatcgacggctgatgccgtacaaataattctaccaaggagactggaaagattatgcaactcgtttacaaagtaaaagaccgacctcccgtgggcaaattgctcatcgccgccttgcaacagctcttggcgattctcgccgctaccatcgccgttcccgcggccataaacgcccagttccccgatgcgaatatgtcggcttccgccgctttgctcggcgcgggcgtcggcacgatcgtgtatcttctgtttaccaaattcagaagccccgtgttcctcggctcctccttcgccttcctcggctctatggcggccgccttcgcgggcagtgtctccgcttccgcgggctatctcggactcattatcggagccgctttcgcgggactcgtatacgtcgtcatcgccgtcgtcgtgaaactcgtcggcgtaaagtgggtgaataagctcatgcccgccgtcgtcatcggtcccaccgtcgccattatcggtctttccctcgccggaaacgccgtcggggatttgatgaagggaaacgttttgaacgatgcagccgaaatggtaggctctccctacatcgctttgctctgcggactcgtgactttggcggtgacgatggtttgctcggtgtacggtaaaaagaatctcagactgttcccgttcgtcatcggtattctcgcgggatatgcggtcgcggcgatctttaccggaatcggcaccgccgcgaatgtggacgcgctcaaaattatcgatttctccaaatttaaggatatgcagtggctcccgaaattcagctttatagaggcgtttaagggaaactacgacttcggagaagtcggttctctcggaacctatatcggaacgattgccgtcgcttatgtccccgtcgctttcgtcgtctttgcggaacatatcgctgaccataaaaatctttcctctattatcggctccgaactcctcgaagaccccggtctttccagaacactcctcggcgacggtgtcggttccgtcgcgggcgctttcttcggcggctgccccaatacgacttacggcgagtccgtcggctgcgtcgccattacggggaatgcttccgtattcacgattttagtgaccgcgtgtctggcgatcgtcatctccttcttcgctcccttcgtcaccttcctttcgacgattccttcttgcgtcatgggcggcgtctgtatcgctctgtacggcttcatcgccgtatccggcctcaaaatgattcaaaaggtggacctcaatgaaaatcgcaatctgttcgtggtctccgtcatcctgattgcgggcgtgggcggacttaccctcacctttgggaaagtgacgctcacttcggtcgcctgcgcgctcattctcggtattctgacgaacgtgctctgttcgattaaaagcaaaaaagaaaatgccccgtccgctcccgcggcgggaacggcggaagccgaaaatgcggaagtgactgcgctttctgacggacagacggaggaaaacgtcgccgcaccgtcgaacgaacagacggaagatcaataattccgtcccgttttcaaatcggcaagagaacaattatagataactccgcccttaacgaacgggaggggcgatgtgtgttttatcgcttgctctttattgaacgggaagagagaggagtgttttaccgctcgtcctcggctgaacgaacaaaggaaaaaagtctgtccgtttaggataaacaagcggggaaaaacgttgtctgtctcccgtcctccgacggataaaataaatgagataaaactgtccgcagacggcggcgggagcaaccgaaacgcctgcggaaaataataaacgcccgtccgacatacgtcgggcgggcgtactttatgcctgttatccgaaactacatgacgacgatatccatcgccttgaattgttctttgagggattcgggaaaaccttcgtcggtaatgaggacgttgatatcctcggcgcgggcaaaggtatagggcatgattttgccgattttcgagctgtctaacatcatatacaggaacttcgctttttttcgcaccagcttcaaaaggtcggcctcgatttgcgagccgcaggaaaatccgttttcgggcgtaaacgccgaagcagagatgatcgcgagctcgaaattcgtatccgtgaaatattgcgccgcgagcggggaggccgtggacaggttttctttgatgagctgtccgcctaaaaggttgatggtgacgtttttcttctgcgcgagttcttttgcgacggcgattccgttcgtaaagacgttgcagttcatgtcgcgcaattcctttgcgagatacagagccgtcgtgccgccgtcgataaagatggaagatccttcgtccaccaataccgccgctttctgagcgatctctattttttcgtccgtatgaatggtcgcctttttggtatagggctctccggaggccttctggacttcctttacggacatggcgccgccgcgcacgcgaatgatttttccttcttcctccaattggaaaagatcccttctgagcgtcatctgcgatacattgggaaaatattcttcgagctgttccagcgtcagctttccgcgcttatccaaaagctcggcgatttcctcgatgcgttctcttttcatcccttaacctcccgtttctttttcagtatatatcaaatttatcataaaaatcacaaaaaatcaagtaaataaagaacgtttttcaaaatttttttataaaagttaacataaaatgcgagaatatcaatttcaggtcttttttagagcgtaaaaaacgattgcttttttcaaatggatatgctataataaaaaaaacggatatttcagcggaggaatttttcgtgacctttgatttcatagaggaccttgacgagtatttttgcgaaaaatacgcgaattacgaccatatctgtattctcaaagggtacgaaatgcccaaaatgcagacgacggagcggcgcgaggatgggacagattattcttatacgcttcccgcgtccaccatgcgcctcgctttacagcgaaatcgtaaggaccttttggcgcaattgaaggaaaagatgacggatgcttcattctcgtttaccttctgtcctttgagcttgtttacccgaataaaaaacctttttaagaaggtgacactgaaaaaagtgctccccgaagtgctgggacggtacggcatgaccgagtcggaagccggaaggctgcttgtcatagacgtcgtcacttggagccgcatctgcaaaggggtttacgagcccacgaaaaatttattgttttcgctggctttggccgcgcacatgtcgatagaggatttgacggagctctttgacgtctgcgggtattctttcgattacgcgcaggtgaaagacacggtaatcgcctatcttctgacgcggaaagttttcaatccggaaatgatgcgcgcggcgctcgccgaatataaggtgagcaatttattcgtccgcgatttataaaaaagcgcttaaaacggttgcgttttttgcttgcgcgtgatataatgacgcaaaacagaatattccgaagcggaaaaagagtacccgaggcgggggcggcggaaagagaggcgtgtcgaaggctgaaagcgcgccgtgccctgcgcggcggcgaaagtgcgtttccgcgccatcaggacagaccaatcctctgcgggcgcctccgttatcgggcatacgaggaaaaagtttttgctttttcgaaataaagtggaacagcgtttgaccgcgcctttatactatatagtatccgactatatggcatgaaggcgcttttgtcgtatttcgggaattcaggtcaagtcaaggagaagcaagtatgtggttcaagaatctgcgggcggatatcgccgccgcgaagcgcaacgatcccgccgcgcggaacaagtttgaaatttttctcacctattcgggcgtgcacgctctgtctcatcatcggtttgcgaaatttctctatcggatacatctgaaattgctcgcgcggatcgtcagtcaggtgtcgaaatttttcacgggtatagaaattcaccccgccgcgaacatttatccgggcgtattcatcgaccacggctgcggcgtcgtcatcggagagacggcggaggtccattcgggtacggtgatttatcagggcgtcactttggggggcaacggcaaggagcacggaaagcggcaccccacgatcatggaaaacgtgaccgtttccgcgggcgcgaaagtcttgggcggcttcgtcgtgggcgagggtgcgaaaatcggcgcgggagcggtagtgctcaaagaggtaccgccgcacgcgaccgtggtgggcgttccgggacggatcgtccgaatcaaaggcgagaaggtctgcgagcccgatctcaatcaggacaaaaccgatccttatcagaattgtctcgcggaaatctgccatttgcgcgcaagggtttccgaattggaaaatacgctgaaagaattacaggacggcatacccatggctgaggttattgtggaagaagaataaaaatcggacgagggaaattatatgaaagtttacaattcgcttacgaaaagaaaggaagaattcgtccctttggaagagggaaaggtaaagatgtacgcatgcggcattacggtgtcgggcgaagcgcatatcgggcacggatatcaggcgctcatttacgacatcatgcgcaaatttctggaaaaacaggggtataaagtcacctatgcccgaaactatacggacgtggacgacaaaatcatcgcaaaatcgaaagagacgggaatccccgcggacgaatatgcggccaagatgataaaggacatcgacgaggtgatgcgaaaattccgcgtagacgaccccgacatctggctgaaagcgacggaaaatatcggaaatatcatagatttcatcgcaaaactcatcgaaaaggggcatgcttatcccacgaaaaagggcgatgtgtatttcgacgtggacagctaccccgcctacggacatctttcgaacaggagcctcgacgacgcgctcgacggcgtgcgcgtcgataacgacgacgagaagaaaaacgcttatgatttcgcgctctggaagagtgcgaaacccggggaaatctgctgggattccccttggggaaagggccgccccggctggcatatcgaatgttcggccatgaaccgcgcggcgttcggggaacagatagatcttcacggcggcggccgcgatctgattttcccgcaccacgaaaacgaaatcgcacagacggaggcgctgacgggaaagcccttcgtcaaatattggacgcacaacgggttgattaaagtgaacggtcagaagatgagcaaatcgctcggaaacagtctgctcctttccgatctccttgcaaaatattcggacgaggcgatcaagttcgcgctgctgcaaaccaattaccgcaacgatatcaacatcacggacgatttgttccccgaggcggaaaaacacttaacggaattttatgccgtcctctccgcggcggaagattcgggagccgaagcggacgatacggacaaggcgtatgcgttgaaaatcgacaaagagttcgacgagtgcatgagcgacgatttcaatacggctctggcgctgagcaatctgttcgggtatttcagggaaataaagaaatgtctggcggaaaaggacggaaaaggcgccgctccgcagaccgacggggcgaaaacggcggagggaacttcgcgggcgacggcgggacgggcggtcgccatggcggcgcagatacgaaagacgtattccctgttggggcttttcgaaaggcccgcgaaggagtacctcgacaaatacgcgccgcgcggggaagaaattcccgccgacgtgaaagcgattgcggaagagcgctttgcggcgcgtaaggaaaaggattgggcgaagagcgatctcctccgcgcccgccttgccgaactggggtattccgtcaaggattccaaggacgggtacgagctcacgaaaaactgacgggggcaggcggagtattcaaaagcagaaataattgcggaaattgacgagggaatctctcgcagcgagcgagggcgtcagaaggacggcgggcggaaaacatcgttttttgtccgaaacgaaaacggccggataaaaacggccgacgcgggcgaaaacgtttgacatttttcgcgcgaccttatataattttagaaaaaacgcagacaaaaaggtagacgacatgaaagaatataccagcgaaagtttaagagaaatgtatctcggatttttcaaggcccgcgggcataaagtgattccgtcggcttcgctcattcccgaaaacgacccgaccgttttattcaccacggcgggcatgcaccccttggttccctatcttctgggcgagaagcaccccgcggggaaccgtctcaccgacgtgcagaaatgcgtccgcacgggcgatatcgacgacgtgggcgacgagaggcactgcaccttttttgaaatgctgggaaattggtctttgggagattatttcaagaaggaaatgattccttggagctatgaatttctgacgggagaaaactatctcggaattccctcggacaagctggcggtgacggtattcgggggcgacgagacgctgccccgcgacgacgaggccgccgaactttgggaacaagcggggatcaagaaggaaaacatctatttcatgccccgcgaaaataattggtggggtcccgcgggacttacggggccttgcggaacggacacggaaatgttcgttatccgcaagcccaaatgcgggccgaactgcaatcccgattgcagctgcggcgcgttcctcgaaatctggaacgacgtctttatgcgcttcaataaacaggcggacggcagctataccgagctcagacagaaaaacgtcgatacgggcatggggctggaacgcgctctgtgcgtcctgaacggaaagtcgagcgtatacgaaacggatatttttgaaaaagcgattcaaaagatttccgaattgacgggccgcgcttacggcgcggacgaggagacgacgagggcgttccgcgtcgttttggaccacgtccgcacggcgacctttatgatcggagacgaaaagggaatcgtcccttccaacaccgaccaagggtatattttgcgccgcattatccgtcgcgccgtgcgttatggacgcaagatcgatctgcccgaaggcagcctcgccaaagtcgcggagacctttatcgaaaaatacagtgcggtatatcccgaattggagacaaaccgcgcgaaaattttcgaggaactcgacaaggaagaggcgaaattttccaaaacgctgcaacaggggctgaaagagtttgaaaagtgcatcggcggcctggaacgcaaaaacgcgttcatggccgcgaaggatccctcctatgttcccgaaaaggtcatcggcggaaaacaggcgttccacctgtacgacacctacggcttccccgtggaaattacttcggaaatggcgaaggaacgtggctacggcgtggatctcgacggttataaagccgcttttgaggagcatcagagcaagagcaaagcgggcagcgaacagaaatttgcctgtggcctcgcggatcataaggaggagaccacgcacctccataccgccacgcacctcttacatgcagcgttgaaaaaggtattgtccgaggacgtcaatcagaaagggtcgaacatcacggaagagcgcctcagattcgattttaatttcccccgtcccatgacgcaggaggaaattaaaaaggtggaagcactggtcaacgaaaagatttccgaaaatatccccgtcgtcatgcgggaactgagtctggaagaggcgaaaaaggagggctttacgggcttattcgaaagcaagtacggcgagcgcgtcaagacgtactccatcggcgatttttccaaggaaatctgcgggggacctcacgccgcttcgacgggcgagctcgggacgttcaaaatcgtcaaggaacagagctccggcgcgggaatccgccgcattaaagcaattttgacgcatgaataatccgtacgaacgaccatttatctgcgccgcgcgaacgacgatttgcgcggcgcggaaatatatggcgacggccgagccccctaagcagaggaggaatcatggacagaaaaccgcaggaaacgaataaatcttatcaaacggaaaagccgtatagagaagaaaagccttacgaggacgtcatcgaaagggaattttcctttcttttgga

SEQ ID NO: 2062 - DNA, 12072 bp, Unknown
  16S sequences of unknown bacteria
gccagggcggtggacgctcctatgacggtcagggaagaagccagggcggcggacgctcctatgacggccagggaagaagccagggcggcggacgctcctatgacggtcagggaagaagccagggcggtggacgctcctttgatggacagggaagaggccagggcggaagaggccagaatggtgcaagtattccaaaggcgccgactgagtccaaaccgctggagaaggagagcagaaagcgcaccgagcgtggcgaccgcaaccgtgtggagaagggtgagaagctcgagcggatggaaaagaaccagagcggacgtccgaaccagaagggcggaaagaagccacaggctccggcaaagccgccggtacagaagcaggagaagccggaggatacgatccgtacaatcacaatcccggagaagctgacgatcagcgagctcggtgaggcaatgaaggtacagccggcacagattgtaaagaagctgttcctgcagggtacgatggtgacggtcaaccaggagattgaatttgataaggcagaggagatcgcactggagttcaactgcatctgtgagaaagaagtgaaggtcgatgtgatcgaggagcttctgaaagaggatgaggatccggaggagtcacttgtatcccgtccgccagtcgtatgtgtcatgggtcacgttgaccatggtaagacatccctgctggatgcaatccgtgacacgcatgtcatcgaccgtgaggcaggcggaatcacacagcacatcggtgcgtacgttgtatccatcaacggacagaagatcaccttcctggatacgccgggtcatgaggcatttactgcaatgcgtatgcgtggtgcaaattctacagatattgcgattctggtcgtggcggcagacgacggcgtgatgccacagacgcttgaggcgatcagccatgcaaaagcagccggtatcgagatcattgtggcgatcaacaagattgataagccgagtgcgaatatcgaccgtgtaaagcaggagctctctgagcagggtctgattccggaggattggggcggaagcacgatctgtgtgccggtatccgcacacacacatgagggtatcgagaacctcctggagatgattcttctgacagcagaggttgcagagctgaaggcgaatccaaaccgccgcgcaagaggtcttgtcattgaggcagagcttgataagggtaagggaccggttgcgacggttctggtacagaagggtacactgcatgtcggtgatccgatcgcggcaggtgcctgccacggtaaggtacgtgcgatgatggatgataagggacgccgtgtcaaagaggcaggcccgtctactccggtcgagatcctcggactttctgatgtgccaaacgcaggcgaaatctttatggcgatggagaatgagaaagaggcgagaagctttgcggagaccttcatcagtgagggccgtgagcggatgctggaggagacaaagtcaagaatgtctctggatgatctgttctcccagattcaggcaggcaaccttaaagagctggatattatcgtcaaggctgatgttcagggttctgtcgaggcagttaagcagagccttttgaagctgtccaatgaagaggtggtcgtaaagattatccatggcggtgtcggcgcgatcaatgagtcagatgtcattctggcatcgacctcgaatgcgatcattatcggattcaatgtgcgtccggatgcgacagcaaaggcgaccgcggagcgggaaggcgtcgatgtacgtctgtaccgtgttatctacgatgcgatcgcagatgtcgaggcggcaatgaagggcatgctcgatccggtatacgaggaaaaggtgatcggtcatgcggaagtgcgccagaccttcaaggcatccggcgtcggcacgatcgcaggctcctatgtgctggatggtacattccagcgaggctgcaaggtacgtatcacgagagagggcaagcagatttacgagggagcgcttgcatctctgaagcgtttcaaggacgacgtaaaggaagtcaagtctggctacgagtgcggacttgtatttgagaaatttaatgatattcaggagatggatatcgtagaagcatatattatggtagaggttccgagatagcctctgtgctattgcttcctggcgtgcagccatccggagagataccggatggctgtacgtggaagtggcagcgaatggaagaaagggatatctatgagaaaaaacagtattaaaaatacgcggatcaacggtgaggtgcaaaaggagctttccgtgatcattcaaaatgagatcaaggacccgcggattgccccgatgacctcggtagtagcggtagaagtggcgccggatctgaagacatgcaaggcatatatttccgtacttggtaatgaggaggctgcacagaacacactggcaggcttaaagagcgcagagggatacattcgccgtcagctggcgcgtacggtaaatcttcgaaacacgccggagatccgttttattctggatcagtcgattgcatacggcgtgacgatgacaaagctgattgacgatgtacgcaggacagaacgaagagatgagggagagcatgaacaggacgctgaagcttgaggaagaactgaagggtgtacattccatcggtattgccggacatatcagaccggacggtgatgcagtgggatcctgccttggtctgtatctgtatctgagcgaaaactatccggagcttgcagtgcaggtttatctggaagattttccaaagtcgtttatgatgctgaagggtacggagacgatttcacatgagtttcatgcagatgcaccgcacgatctttttattgctctggactgtgcggatgagaagcggcttggcaatgcgctgtcgcttttgcagaatgcgaagcatacgctctgcattgaccaccatatcagcaatatcggctttgccgatgccaacgatatccggccggatgccagctctacttcagagatcgtagcggatatgcttgatgagtcgaagatatcgcaggaagcggcagaagcactttatatgggaattgtgcatgacaccggcgtgtttcgccattcctgcacgtctccggagactttggaggtggcagcgaagctgatgcgcaagggtgtccgctgcaataagatcatcaacgacacatattatgacaagacgtattatcagaaccagattctgggccgtgcacttttggaaagcgtactgctgctggacgggaagattattttcagcgcagtccggcaaaaagaaatgtcattttacggcgtcggaccttcggatctggaagggatcgtacagcagctgatggggacagtcggtgtggagaccgcaatttttctctacgagaccgcaccgcagcagtttaaggtgagcctgcgttccagagaaaaagtcgatgtaagcgagatcgccagctattttggcgggggtggccatgtccgtgcggcgggctgcacgatgcagggcagtgtctacgatgttgtgaacaacattacgtaccatattgaaaagcagctttgcggagaaaaacagtgacagacggaattatcaatgtatataaagagcggggctttacctctcatgatgtggtggcaaagctccgcggaattttgagacagaaaaagatcggccataccgggacactggatccggaggcagaaggcgtgcttccggtttgccttggcagtgcgacgaaggtttgcgagcttctgacggataaggagaagacctatcgtgccgtgctgctactcggtgtgacgaccgatacgcaggatacgacgggaacggtgcttaaggaaacaccggttgtctgtgagcagcaggccgtccgggattgcattgcatcctttgtcggtgagcaggatcaggtaccgcccatgtattctgctttaaaagtaaatggaaagaagctctatgagctggcccgccagggcatagaggtggagcgaaaggccagaaggatcacgatccgccggattgagatctgcaaaattgatctgccgcgtattacgatggaggtggcctgctcaaagggtacgtatatcaggaccctttgccatgatatcggagcggcgcttggctgtggcggctgtatggagtcattgttgcgcacacaggtcggaccgttttatctggaagagagtgtacgtcttggcgagatcgagcagctgcgggatgcaggacggctttcggaagtgatacagccgatcgactcggtatttcagtcatatagagcacggcatctgacaaaggccggagaccggctcgtgcaaaatggcaatccggtcgaggcagtgccggaactgatcgctgatgctaccgggaaaatggatgaatcagatggagagcggtatcgcatttacagcagcagcggagctttttgggctgtgtatgagtggcggcgggaaaaaggacgctactggccggtgaaaatgtttttgggcaaagagagatagtggatgaaatattttgagaatacgacagattttttctgtgacggcccgtctgcggtgacgctcggcaagttcgacggcttgcaccgcggtcatcagaagctgatccggaaaattacagaattgaaaaaagaaggactggaggcagtcgttttttctcttgcaccggatgagcgcccgtatttgctctctccggaagagaagcggcggaaggtggaagcattcgggatagatgtaatgattcgctgcccgtttgctccggagatcctgaatatggagccggaacagtttgtactcgagattttgaaacaaaaactgcatgcttcgtatgtggttgtcggtacggactggcgtttcgggcatgagcgaaagggagacgtgacgcttttgcagtctcttcaaaaaaaatatgattatgaggtcatcgtaatagaaaaggaatgctgccgtggccgggaaatcagcagtacatttgtgaagcaggcgcttgccggtggcgatatggagctggtagaagagctgctcggctatccgtatgaggtcggtgggatcgtacagcacggtcagagactgggacggcgtcttggtatgccaacggtcaatttgattccggaagcagaaaagctgctaccgccatgtggcgtctactacagtgatgtgcaggcggaaggacagatgtatcacggtgtgaccaatatcgggtataagccgacagtggatggttcattccttggagtggagacctatctgtatgagtttcatcaggagatttacggaaaggaagcaactgtcgggctgcggcattacagccggccggagcagaagtttgactccattgacgcactgaagtatcagatgcagaaggatatagcgtctggaaaggagtatttccgtgtatcatgagctgtggaatgcgagtattgtgtttctcattttaggcgggctgtgttttcttgctgctcagatctgtaatgcctgctcataccggtatctgcgttatccttctagggcagaggcacgtgtgatagatatcgtggccgttccgcgcgagggcaatgcggctttatcagaataccacaaccggcttgcggcggtgtttgaattttatgcggatgggcgtcccataaaagtgattgatgcaacggagatgtatccgtgtccgtaccgaaaaaatgagcgtgtgcagatctgctatgatccgaatgatccgaagcgccatgaggtcataaaaaaggataaatggaagatactctcaaagcggttcaaccgccttggtattttgctgttgcttacaggctgcggactgtttctgttttatgcacgttcggtggggaaaagtcgcccttgacggggatccgattctgtgttatagttttccggtatgaatttcagccgatactcagaggcgtggacactccgaccggtttcttagtatcaggcgattatatttaggaggagaaccatgatttcaaaggaaaagaaaacagcaatcatcaatgagtacgcaagaaagccgggcgacacaggttcaccggaagttcagatcgcagttctgactgcaagaattcaggagctcactgagcatctgaagagcaatccgaaggatcaccactccagaagaggacttctgaagatggtaggtcagagaagaggacttcttgcatacctgaagaagaccgatctggaaggatatcgtaccctgattgcaaaacttggtatcagaaaataatttaccaataagggcgggattttttccgcccttgttctgtatcaaagcaaaagaagactgatctgcaggaaatgtcccgagaccactgaaaagaagattttgaagacaaaaagtctgtttttcagtagtttcggactcttgcagatatccgtttcattttgcggtctgtttacatgaaaacgaaaaggagactgaatatgtacaagagtttttcaatggaattagccggcagaactctgacagttgatgttggacgtgtcggtgcacaggcaaatggctgtgcatttatgcattacggtgatacgaccgtgctttctacagcgacggcatctgaaaagccgagagacgggattgatttcttcccgctcagcgtagagtacgaagagaagttttattcggtaggaaagattccgggcggatttaataagagagagggaaaggcttcagagaatgcggttctgacctcccgtgtcattgaccgtccgatgcgtccgctgtttccgaaggattaccgcaacgacgttaccttaaacaatatggtaatgtctgtagatccggagtgccgtccggagctgaccgcgatgcttggcgcagcgatttccaccagcatttccgatatcccgtttgacggtccgtgtgcgatgacgcagatgggtcttgtggatggtgagctgatcgtaaatccgtcccaggcacagtgggataagggtgatctgcagctgactgttgcatcgacccgcgaaaaggtcatcatgatcgaggctggcgcaaatgaagtaaaagaagaagtgatgattgatgccatttataaatgtcatgcaatcaatcttgagattatcaagttcatcgatcagattgtagcagaggtcggcaagccgaagcacagctatgagagctgcgcggttccggaggagctgtttgcaaagatgaaagagatcgtgacaccggaggagatggaggcagctgtatttaccgatgtaaagcaggtgcgcgaggagaacatccgtcaggtgactgcgaagctggaagaggcatttgcagacaatgaggagtggctggcgatccttccggaggctgtctaccagtatcagaagaagacagtccgcaagatgatcctgaaggatcacaaacgtccggacggacgtgcgatcgatcagatccgcccgctggctgcagaagtagacattatcccgagagtacacggctctgcgatgtttacgagaggacagacacagatctgtacggttacgacactggctccgctttctgagatgcagaaggtagacggactggatgagaatattacgagcaagcgttatatgcaccattacaacttcccgtcctactcggtaggagagaccaaggtaagccgcggtccgggacgtcgtgagatcggacatggcgcactggctgagaaagcgctcgttccggtacttccgagcgaggaagatttcccgtatgcgatccgcacagtatctgagacgtttgagtccaatggttcgacttctcaggcgagcatctgcgcatccacgatgtctctgatggcggcaggtgttccgatcaagaagccggtagcaggtatctcctgtggtctggtgactggcgagacagacgatgattatatcgtactgaccgatattcagggccttgaggatttcttcggcgatatggacttcaaggtggctggtaccttcgatggtatcactgcaattcagatggatattaagatccacggactgacccgtccgatcgtggaggaagcgatcgcacggacccgtgcagcgagagagtatattctgcgtgagatcatgcttccgtgcattggtgagccgagaccgaccgtcggagaatatgcgccgaagatcatttccatgcagattgacccgcagaagatcggtgatgtagtcggacagcgtggcaagacgatcaatacgatcatcgagcgcaccggtgtgaagatcgacatcacggatgatggcaatgtatcgatttgcggtacagaccagaagatgatggataaggcaaagaagctgatcgagatcatcgtgactgactttgaggctggccaggttcttgagggcgatgttgtaagtatcaaggagtttggagcattcatcgagtttgccccgggcaaagaaggaatggttcacatttccaaaatcgcaaaggagcgcattgatcgcgttgaggatgttctgacactcggcgatcacgtgaaggttgtatgccttggcaaggataagatgggcagaatgagcttcagcatcaaggatgtaaaataatatcatagatatgagcctgacagtcgatgagatcgtcagatagaaagcgcctcaggttctctggggcgctttctggattgtgtgtaaatcatttttgaacgcagatgagcattctctcgcttcaagtgcgcggaacaattgtgaatgtccgttttactgaagaggcggatttatgcggcctgaggcagcagaaaggagtaatattcgatgaaatatagactgataaaaggattggcaggaatttcggcggtgatgctgctggcgacgggatgtgaatccggaaaaaaggccgagacagaggcggtatcattggagatcgcagatatggcggttgtcgatgagagcgaatcagaatcagagagcgagacaggcttagaggccgaaacagagctgcagacggaggagctggatctgagcgagacggagccggataaagcagggaagaaagactccggagcactggtggaagagagtgaaccagagacagaagctaccacagagccggtacagtctgagacgaaaaagggaaaggcgcaaacgaagacgaccgagaaggagaccgaagccgagacagtaaaacagacggagaaggcgacatccaaaaagcagtccggagcgaatcagaagcagtccgagacggctgctcagaccgaaaagatgtcagaagagacgctggtacagagccagtctgagacgactgcggcggtaaaaaccggaacgaagcagtcggagcagactgaggcagagcagaagatgcaggacgctggggcgcagactgaggagagaaagagctctgctgtgacagaagccgcgaccgagcaggagactctggctggtgagacaaaagattctgaggcgatgacggagagcgagacagagcctgagaaacagacaggcgtgggatcagcgggacagtcaaaaactgagactgtgacagaagcagagacggaaacagcagctgcaacggcgaacacaaacggagtgaaaaacggtgcgggaaccgcgtccggaacagagacagaaagggaaaacagtacagcccccaggcttcgtgtaatcaacgaccagatcatcgtccgcagcgaggcttccacggagagtgagaagctggcaaccctgacgccggggatgcttgtgattgcaataggggaagatggcgagtggacacagattcgtttccagtcgccggatggctttgagaatggttacattaagacgcagtatctgaatgagctggatcagttgtataaggtaaaagaaaagatcaatgtccgcaaggaagcagacaaagagtctgcaaagcttggtgagctgaatgccagcgagctggtacttgtcacagggaccaagaaacaagactggtctgtgattctgtatcaggcagatggagagacggtaacggcctatgtgatgaccgagtttctggagccggtagacgtagataccctcgagaatggtatcgtggacgaggaagcacggattctgcgtgaaggactggaagcggagagcgagactgagacagaaacagaaacagaaaccgagagggaaacggagaccgagacggaaacggagaccgaaaccgaaacggagacagagaccgagaccgaaaccgaaacggagactgagacagagtcggaaaccgaaacggagactgagacagagacggaaaccgaggcagcgacggaaacagaaacggagacagagaccgaaacggaagcggtaaccgaggcggagagcgaagctgcggcagaatctgagactgaaacggaagttacgttcgcatcttcacaggacgctcagttcgccctcaccaaacagctcttcccggaggcatccaccgttggcgttatttactccgcagataacaagatggcgaagaccgagctggcagactatgaggcgctggccaaggaatatggctatgagcttgtgacgacggaagtgaccactgcggaagatattgactttgtagcgtcggaactggtcggcgaggtagacggcgtcttctgtatggatgatgcgacgctaaatgatctgatgcagacgatctgtgcctatgcggatgaggtagagatcccggtattcggtgtaaagaaggagcaggtagagagcggctgtctggcagcctatgacggtgcgctttactggaatgcgacggaggcgggcaagcttggcaagtccgcggacacactgtctggtaatgtaatgacggtagattgaggcaataaagaaatctgataaatcagcgaaacactgttggtaatgtggcagctgtggattgaggagataaaagaagatggaagaaaaacagaaagaaagaaagatggcaggatttgattttcgaaaagaagcggaaggactgctggactttatcgataaaagtccgacggtatttcatacggtggcaaatgcagccgctatgctggatgcggctggcttttgccgtcttgcggagagcgggcattgggaacttttggcaggaaaaaaatactatgtgacaagaaatggttcctctctgattgcctttacgattccgggcggagagatcgggccgttccggctgttctgcagccacaatgattcaccgacttttaaggtaaaagtaaacgcggagctggagggcggtaaggcttatacgaagctcaatgtcgagcagtacggaggagcattgcgcgcgccgtggtttgaccgcccactctcggttgcgggacgtgtactggtacaaaatggaactgcgatcgagacaaagctgatctgcatcgaccgggatctgctcatgattccgagtgttgcaattcatatgaaccgggatgcgaatgaaggggcctcctacaatgtacagaatgatatgtgtccggtattcggggatgcggatgcaaagggcggatggaagaagctgatcgcgcaggaggcgggcgtggacgaggagcaggtgctggacatggatcttttcctctacaatcgccagcacggcacatttgtcggattgaatgaggagtatcttgctgcaccgcggctggatgatctgcagtgtatgtacggttctctgcgcggtttccttgaggcagatgcgaagtccggcattccggtatactgtgcgtttgacaatgaggagaccggcagtgtttcccgtcagggcgcagcctctacctttttgcatgatgtgctcgtgcggatctgtgcggcgtcaggcggtgtgcaggaggattacctgcgggcagtggcaggcagctttatgatctccggtgacaatgcacatgccgtacatccaaatcatccggaaaaggcagacccggtgaaccggccacagatgaatcagggagttgttgtaaagttcaatgcgaaccagaaatatacttcagatgcaaggagcggtgcagtactgcgcatgctctgcgcccgggcaggtgtaccatgtcagaattacacgaaccgttcagatatggcaggcggttccacactcggcaacatttccaatacacaggtatccctgcaggcggttgacatcggcatgccgcagctcgcgatgcactcgtcctgcgaaatggcaggcgccaaa

SEQ ID NO: 2063 - DNA, 24614 bp, Unknown
  16S sequences of unknown bacteria
taatccagggtttcacccgtctgtgcaaaacccccggcttcgccgggggatatttatttgtaatactttattcactggctcttgacaaacaatatggtttgctctattataacagtgttatatataacgctgttacatgaggtgcgcttatggaagagaaatcgactgccacactggaaaaaatccagcgggccgccatggaggagtttacggagaaaggctttcagggtgcctccctgcggcagatcgtgaagcaggccggtgtcaccaccggcgcactctatggctatttctccagcaaggaagcgctctttgcctccatcgtggagcctcacgccgctgcgctgatgggccggttcatggaggctcagactacctttgccgagatgcccgagaaggatcagccggaacacatggggctggagtccagccagtgcgtccattggatggtggactacatctgcgaccaccgggagccggtgaagctgctgctgtgcaaggccgagggcaccagctatgagcacttcgtccacaacatggtggaggtcgaagtggaatacaccctccaatacctggaggttctgcaccgtctggggcatgagtctccccagttggatgcccagctgtgccacatcatcgccagcgggatgttcaacggcatcttcgagatcgtcgtccacgatatgcccaaggagcaggccatgcgctatgtggatcagctgcgggatttctacactgccgggtggctgaagctgaccggccagtaacataccgccaatctttttcgtaagatcggggcttcgcccctttctttttacacaatcagttagcggtagctaaccttaaaaggaggagtatttgtgaagcaaaagaagcaaaatgcgctgaccgtcctgctgggatatgcgggcagccaccggcagctcacctttctggggctgggactgtcggcggtgtccatggtgtgcagcatgatcccgtacctctgcatctggctggcagcacgggatctgattgccgtggcgccggactggacgcaggcccggagcgtgacggactacggttggatcgccttcgcttttgcggtgggcggtatcctcatctactttctgggcctgatgtgtacccatttggccgcattccgcacagcggccaacatccgcaagcagggcatggcccatgtgatgcaggcgcctctgggctactttgacgccaacgcctccggtttgatccgcagccggctggatgcggccgccgccgatacggagacgctgctggcccataatctggcggacatcgtgggcacagtcacattgtttatcgccatgctggtgctgatgtttgtgtttgactggcgcatgggcgcggcctgcctgctggcggcggtgatttccatcctcgccatgtgcagcatgatgggcggcaagaatgccgcactgatggcagaataccaggcggctcaggaccgcatgaccaaatccggcacggagtatgtgcgcggcattccggtggtcaagatctttcagcagaccgtgtactccttcaaggcctttcagcaggccatcgaggactacagcgccaaggcagagcactatcagggcgatgtttgccgtgtgccccagtccatcaacctgaccttcaccgaaggcgcctttttgtttctggtgccggtggtgctgttcctggctcccggtgcgctggcttccggtaattttgcgggatttgtgacgaactttgctttttacgccgtgttctccgctatcatttccaccgcgctggccaaaatcatgttcgcggcctccggcatgatgctggccggcaccgctctgggccgcatccagccggtcatggacgcaccgacactggcggtaccggagcatccccagacgcccaaggacaatcgggtggtcttccgggatgtgagttttacctacgacggcgcgcagtcccccgccctgtcccatgtctcctttaccgccgaacccggtgagacggtggctctggtggggccttcgggcggcggcaagactactgccgccagcctgatcccccggttctgggatgcggacaccggcactgtcgaagtgggtggcgtggatgtacgccagatcgatccccatgtgttgatggatcaggtcgcttttgtgtttcaaaacaaccggctgttcaaggccagtattctggaaaatgttcgggctgcccgccccgacgccagccgtgagcaggtgctggctgccctggaagacgcccagtgcggcgacattctggaaaagctgcctcaggggctggacaccgtgatcggcaccgaggggacctatctttccggtggcgaggcccagcgcatcgccttggcccgggccattttaaaggacgcacctatcgtggtgctggatgaagccacggcctttgccgacccggaaaatgaggcgctgattcagaaagccttcgcacggctgacaaaggaccgcaccgtcatcatgatcgcccatcggctctccacggtggtgggtgcggacaagatcctggttctggagggcggcagggtgacggagcaaggcacccatgaggagctgatcgcggcaggcggattgtatactcggatgtgggccgactacaatcgggcgatccagtggaaaatggaaagcggcaaggaggggaaataaatgttcggagcaaactttcaacggaaatatgccctgacggatcagggtgtacagaacaccaaaaagggaaccttctggacggtaatcgtcaatctggtggtcatgggcggggtcagcattttgtaccttgtgatgtccggcctgatggaaactttggccggcggtgtcctgcctgcgactttgccggtgctggctggcctcgtgatatttgcacttctctcctttctcacgcatctccagcagtacaaggccacctacggcctggtgtacggtgaggtcaaggccacccgcctgcgtctggcggagcggcttcgcaagctgccgctcggatttttcggcaagcgggatctggccgacctgacggagaccctgatgggcgatgtcaaccgcatggagcatgtctggagccatgtgctgggctacttgtacggctcctacatatccaccgccgtgattgcggtgtgcctgctctggtatgactggcggctggcccttgcctgcctctggggggtgccggtggccttcggcctgctgtttgggagccggaagctcaccgagcgccaggcggagcagatcaagcgcgccgctgtgcgggtctcggacgggatgcaggaggcgctggaaaatgtgcgggagatccgtgccaccaatcaggaggagcgataccttgccgggctgtaccggaagattgacgaccatgaacggatcatgatccgcggcgagctggtcaccggcctgttcgtcaacggggccagcgtcatcatgcggctgggcgtggccaccacgatccttgtgggtgcggggctgattttgtcgggacagatcgacttcatgctgctgttcctgttcctgatggtcatcacccggatctatgcccccttcgatcagagcctggcactgatcgccgagctgtttgtctcccaggtgtcggcagaccggatgaatgctctgttcgacacgcccatcgccgaaggggcggaggttttccaaccccagggacacgacattgtctttgaccatgtggagttcgcctatgataaagaggctgtcctgcacgatgtcagctttaccgccaaagaaggcgagatcactgcgctggtggggccctccggctccggcaaaagcacctgcgcccggctggctgcccgcctgtgggatatcaccgggggtactattaaagtgggcggggtggatatcgccacggtggacccggaggtgctgttgaccgattactccatggtttttcaggatgtggtgctgtttgacgacacggtgatggagaatatccgcctgggcaggcgaggtgcctccgacgcggaggtgatggctgcggccagggccgccaactgcgaggagtttgtcagtaaactgccacagggatatcagacgcccatcggagaaaacggcgccaagctctccggcggcgagcggcagcgcatctccatcgcccgagcgctgctcaagaacgcgcccatcgtgttgctggatgaggccaccgcctctctggatgtggaaaacgaaaccaaggtgcagggggcgctttctcggcttctggcgggcaaaacggtactggtcatcgcccatcggatgcgcaccgtggccggggcggatcatatcgtggtactgaaggacggaaaggtggcgcagcaaggctccccgcaggcgctgatggctgagggcggcctgttccggcacatggtggagctccagagtgaaagcgcccagtggcagttgagtggggcaaggccataattctttgtgcaatagagagaagcccacagttccggacacaaaactgtgggcttctttctgaatcaaaaagacaaaatacatttgatttaatcgtcatcagcaatcgaaagccgtgccctgcggcgatactccagcggcgggcagccgaagtgccggacaaaaactgcggcaaatttgctctgattttcgtagcctacctgtgctgcgatctccgccactcgtaattcgctgctctgcagcaattctgctgcccggcgcatcctcacctcccgcaaaaatgtggagaggttttctccaaacacaccgcggaagtaattcttgagactggtttcggccacctggaaccgctccgccagttcccgcgctgtatggttctggctcaggtctgcgcacagaatgttccgtgtctccctggcgatggccacttgggagctggtaaaatagcggactgtgggactggtttcaagaggctggcgttctaccttccaaagcagcagagcggagagaagtttcagcagtcccacttcctccgaatctcgaaactgccacaggttatccagcaatgtctgcacacaggcaggcgtgggtcccaaatacaggcggcgggaggtatgcaggtgctccatgatcccctccgggcttacttccccctcctgaaacagtggataaggacgatgggccaacagatccagatccaaaaacaactcgataccctcatagagaccgctggggtagcgatactcctcctgagcctgctgggttcctacggccatgtgtccttgagagaggaaggcaaactgtccatcctccagcaccacctcacagcgcccctttcggcagaagttcagcagcagaatgttggccgcttcattttgtgccaaaggccatacttgggtatagatccggttgaaagaaagaactgcaccatcccatagggagaacaatcgcaggcttccggtttccgggccgcagagggtcatcaccgcagccttgccggcggattgaaccttcacatggcccgggaaacggctggcatcaaaaagttgcgtcatattggacatgagcagcgcctccgttacttgatctggctttgattgtaccggaccggcaacgagccgtcaatgattgctcagaaactaagtgctgtttggagccaaaacacctgtatggagttggtagcagacaagcagttatgctatcctgtcttgtggttagcgatgcctaacgattaccgacaggaggaaatgaaatatgtctcaatcattggaacagggaaaacgcaaactgactgccaaagacgccatcaccgccggcgcactgggggcggtgtgcattgccatccgctttctttttatgctggtgggcggcgtcagcccctatgtatggtttgctacccactttattgatgccattctgatcgggccggtgttcatgctgatggtggccaaggtgcggaaaaacggccccttcctgctcaccagcctgattaccggcgtggtgctggtggccgccacctggatgttccccatcacgggactggtgggaggaattctgtgtgagctgtgcctgcgggctggacagttccggaagaaaggctggctgatgctgggcttcttctgcttcaatctgggctttatcggggactttctgcccctctggtttaccaaagaaagctatttggagtatgccgcccagatgatggacgctggctatatggccaccatggagggcctgctgacctggccggtgttcggggtcattgtactgagcattctggtaggttctgttctgggctccttgctgggtatgaagctcatgcgtaagcattttgtcaaggccgggctggcccaatgaggacgaagaatatttacccttcttttctcgatcctcgaaccaagattctaatctggctgttggccaatgtggtggtgttcacctggagtcctgcggttttccagctcagtgtcatggtagcctatttgattctctttctggtagaacggaaaggaaccatgctgggagggctgctggcgacatatctggctatcctggcgatacagtactggctgttaccgctgctgcccggctctttggctacggtctttgctacggtaacctacttcattctggtgttcccctgcattgccggcggtgcctatctgattgccaccaccagcgtcagccagttcatggctgctttggagaggatgggtgctccccggagtttttctattacccttgcggtgactttgcgctttctgcctgcacttcggcaggatttgcgtcatatctgggatgcaatggcccttcggaatatccgtggttttgaggagaaactggagtgcatttatgtaccaatgcttatgggggcagcccagacagcagaagaactcagcgagtccgccaccgctcggggcatcgaattcccaggaaagatgtcctcctggcggcccatcggatttcacatccaggatgtggtggtcacactactgtttctggctctctgcgtgggcggaatctgctgcaagggggtgctgccatgattatctttgaccatgtgacctatgcttatgagggcaaggagacgccaagtcttcgggactgcaccttttctgtgaaaccgggggaacttatcctgctcaccggagagagcggctgcggcaagaccacaatcatcaagcttgtcaatggcctgctccagcatactggaggtgggacactggcgggaactgttatggtcggcggccaggatgtggcacagaccccgctgtgggaactggcgcagacggtgggttcggtgtttcagaaccccaagtcccagttcttcaatctggacaccaccagcgaggtgctttttgggctggagagtcgtggagcgtcccacgatgaaatggcacaggcgctggaatccgctgtccaagtctgcggagtgggaccgctgctggagcggagcatttttgctctgtccggtggagaaaaacagcgcattgcctgcgccagcgcctgggccatggggccggagctgtttgtactggacgagccttcctccaatctggatggggagggtatccgccagctccgggagatcctgaaacagttgaaaaagggcggaaagaccgtgttgatggcagagcaccgcctttggtacgctgcggatcttgctgatcgggtgttctatctgcggagcgggcagctggaacgggaatataacgggaaagatttcctcgctctgcccgaggaggaacgccgctccatgggactgcggagcattgcggaggtacgggtgtcctcgcctgagccaagcccagcggctggagcagacggcttgatggttcgggagttgcgggcgacctataacggtgcggctgtatgggagggcgtatctttccatgcgcccaggggacaaattaccgccattaccggccaaaacggggcaggcaagaccaccctggcccggtgtctgtgcggtttgatgaaggaacaaagcggtacaattttttgggatggaaagcctctgagccgaacggaaagaaggcggaaggcgttcctgatcatgcaggatgtgaacctccagctttttggagacagcgtgctggcagagatccggctgggaaatacggccacagagcaggaggctttgacaaccttgggccgaatggatctggctcagtatgcggatactcaccccatggctctatccggcgggcagaagcagaggctggccgttgcagatggctgtctcagcggaaaggagctgctgatctttgatgagcctaccagcggacttgactatggccacatgctggaggtgagccgacgcctccgggagttggcggagcagggactatgtgtggtggttatcacccatgacggagaattcctgcgggagagtggggcttggacggcggattggctgccaaatgacaagcagccatgaagtgtccaggaaatagccgcctacataacggaagggggactgtctatgcctttacgcaaatcgggtgaagattatctggaagcgattcttgttctccaaaagaaaagaggcgtggtacgctccgtggatgtggctcggcacatggatgctttatgttgtgtataaagtgcggtgcctctcttcccgaaggggcaaacttctgccatatgtgtggaaaaaagcaaaccccacaaaaaagaaaacctctcaagcggcccaatggctccggcaccgtctataaactttctggccatcgcaaacgcccttggatggctgccaaaaataaagtcattatttggatattatgagaaaaaaaccgatgctttgcaggcattggaaaggctgtccggggtttctctctcagatcggttcaatatgacttttgctgaagtttatgcccaatggagccccgaacatttcaagaccattggtcccaaaggtgtggaagcctatgaaaactcctttcagattttttcttcccttcacgataccaaatttcgtgatctcagaacttccgatttccaggagatcttcttttctcattggaaaaaatcccacgccactctctccaaatataaacagcttctcacccagatgtattcttttgcaatccgggaagaaattgcaactacgaattttgccaaattcatttctcttcccgatcaagtaaaaaaggaaaaagagatcttttcccaagctgatattgaaaaactgaaaaaagaaggaagcgatgctgccaaaataattctcatgctgattggaaccggtatgagaatcggcgagctgttttctcttcctctgtccggctatcaccagacttatgtgatcggcggatcaaaaaccgatgccggccgaaaccgcatcattcccattcgcccggaggcccgggactattttgctcactttgcggccattgccacaggccccctgcttctctccggctactccggccagcgggtggccgataacttccgcaacagagaatattatccgctcttgaaaaaactcaaaatcaaaaaaagtcccctcattccactcggcacacctatgccacccgggctatcaaagagggcttatctcccgaaatgcttcaagcaatcctgggccattccgactactccacaacggttaatttttacaaccatttcgacccagaatccctcgttcatgcagtggattcttttgcggttactaacaagttactatcaaattcaaaagattaaaacaacaaaaaaaccctgcaaccattgaggttgcagggtttttgctggtgacccatcggcggctcgaacgccggacaccctccttaaaagggaggtgctctgcctactgagctaatgggtcatattggctgggatggcaggatttgaacctacgaatgcgggagtcaaagtcccgtgccttaccccttggcgacatcccagtataaacctttgcgatgtgcctttcggaatggtacggaaaagaaaaaagatatggggtggatgaccggattcgaaccggcgacccccagagccacaatctggtgctctaaccaactgagccacacccaccatatatcctggcgtgcccggagggactcgaacccccaacctactgcttagaaggcagttgctctatcctgctgagctacgggcacatacgatagcggccatagccacccgaatggagcgggtgatgggaatcgaacccacgtagccagcttggaaggctggaattctaccattgaactacacccgcaaagtaatcagcttaacgagtatatcatgttctccgagatttgtcaaggtctttttcatgccccggtccggcttttttaccggaccggggacttttgtggcttaatgacactccatgagaatctgctccccatcggaggaaagggagatgctggtgatggggttctggtaagcgctgataatcgcactggccgcccgatcttcgatctccttttgaatgaaccggcggagatttctcgctccgtattttatagaatacgactttttcaccaaaaagtcaaccagtaaatcatcaaatttcaaatcgatgccgttgccctgcaaagttttctgcaggtctcccagcataatccgggcaatggcggcaaaatcccgctcattcagctggttaaaggccaccacctgatcgatccggttgatgaattccggccgcatgatctcctgcagggccttcatggccttttcctggctctgctgggtcaccgtgcctccaaagcccatggccccctggttccggtcggaaccggcattggaggtcatgatgataacggtgttttcaaaggacacctttcgtccctgggcatcggtggccaccccatcgtccagaatctgcagcagcacattgagcacatcgggatgggccttttcgatctcgtcgaagagcaccaccgaataaggacggcggcggatcttctcggtgagctgtccggcctcgtcatagcccacatatcccggaggggcgccaatcagtttggacacgctgtgcttttccatgtattcgctcatatccaggcgaataagggcgtccggggtatcaaacaaatcggcggccaggcatttgaccagctcggttttacccacgccagtggggcccacaaagataaaagacaccggtttccgtttgggcgatacccccgcccggctgcggcggatggcagcggccaccgcctggatggcctcatcctgaccaataacccttttccccagccgctcttccagagagatcagtttttcgaattcctggcgcttcaccttgctggcggggatcttggtccaaagctcaatgacctgggccaggtcgtccaccgtcaactggggggtaggattgtcccgcagctccgtcaggcgctggtcgatctgaagcagccggctgcgcagataggccaggcgctgataagccccggtctcctccgggtcctgcatcagctcttcctgctcttcctggagggtgcttctctcttcttccagctgggctttttcattgatgtccttattctttaggttgatctctgagcaggcctcgtcgatcaaatcgatggccttatcgggcaaaaaccggtcgttgatataccgctccgacagatagaccgcctgccgggccgcttcatcaccgatcttcaccccgtggaattcttcataataaggccgaatacccttgatgatttccaccgtctgctccagggaaggctcggtgatggtcaccggctggaaccggcgctccagggccgaatccttttcgatgtgctgccggtattccttgaaggtggtggcgccaatcacctgcacctctcctcgggacaaggcgggtttgagaatgttggcggcgttcatggagccttcggcgtcccccgcccccaccagattgtgtacctcgtcgatgaccagaatgatgttgcccaggcgcttgacctcatcgatcagccccttcatccggctttcaaactggccccggaactgggtgcctgccaccatggcggtcatatccagcagccagacttccttgtcctggagtttatagggcacttcgccctgggcgatcttctgggccagcccctcggccacggcggttttgcccacacccggctcaccgatgaggcaagggttgttcttctgccgccggttgaggatctgaatgacccgttcgatttcgctctctcttccgatcacccgatccagccctccgtcccgggccttctgggtgagatcggtggcatagttgctgaggaattttttctttttctctcgcttcttgccccggggcttttccggtttatccggctcttcttcctgcttggcgctgctctcctgggagcgcatggaaaagaaaggaatcaccggcacctgagaggaattttcctcgtccggctcctcctctccttccccttcctcctccgccccggtgggcatctggaaggagctgaacagcccctgcatcagctcttccgggttggtgttttccagttctttggacacattttcaatgtcgctgtcggtgataccgaaccgctcgatcatgtcggtcaccggtttgatattcagctccttggcgcatttgaggcaaaggccctcgttgtgggccttgccgtcctccagccgggtgatatagataacggccacattctttttgcacctggagcaaagaggcatattcatggcgttttcattccatccatttctccgcccagtctaggtttgctccttcccgccgccgggcggaccggcctggaaggggaatcaatcccaaaagacctacccttgcgggaagatctgatagacaaaagaagctactttgctttctgccagggcctcctgggcaaaaaagccgcccactccctcgggagcaaaggagcgcagtcccaggcacaacagggcgatcatcacggctcctcccaaagcgcccaggcacagcccggccccatggttcacggtgcggaaaagggggagcgtgcctcccactacctgcaccagcagccacagcaccagcttacacagtgcgaagcccaccagaaaggcgatcacaggggccaggctctggctcaccgcctgtgctgccacctccagcacttgtccgccgctgttttccacctggctgtgcaccgcttccatcaggctttccggagcgtgcacagcgctgagaaggttgcggatgctttcctctaccgtggttccggccgcttccagctgtccctctgccgccttctccaggactttccccaccaaaggctgcaaaagttccgcaatgggggaggtaagcaccggcaccagcatccgcgcgcccacataggacaaaaggctgcccacaagccctatcagcgctcccaggatgcccttgcgggcgccccagaaacacatgagcaaaaagagcaccaaaaaaatcaaatcgatcatggactgtcctttcgccgggtcactcccggtctatctgttctccggcgtccttatccaaaagctccgcccggtcggcatagatgagcatcacatccccatccctgcgctggatcacatcccgagcggtgatctcctgcacctggcgggccgatgcgccgggaatgatggatgtgcacaccagggaatcccgcagcaaaatggcgatgtgatccccggcggcggaaagggagcgcacagccgaagaataccgggcttcaaataccgtctggccgttctcccccaccatcaccacctgggtgcgttcctgctggtcgccggtctccagcgccaccacaggccgctggcccatcttgtgactgaaggtgaccaaagacccttccggataggaaaagacgcctcgctcctgtccctggtcgtcgtaggaatacactccctggtcggtgacgatcatcaaagagtcatcttcataatattccatggaatagaccgtcatgcttcccaaaggcagatcgaacagcggctgctcctgatgaatggaaaagacacggatcatggatacccgcttgccgttttcctcgctcatgcacagggcggccagatgctgggaatccggcgagacacaggacagcaggatataatattccgaagtattccagcggaaacgctccttctgttggttgtcgtaaagagtcaccgcggcccgatagccctgctcgtcggtgaccacgctgaaggcgccgttctggttcaccgaagccgaaatgatctccgactccaggtccttctgccacagagcggtatagcggtttgtgaggcacaaaccatggccgccccggtcataggccagcatattgtcctcggccacgctgagagccggggaggaatattgcaaaggaatgctcaattcttctttgccctgggtgctgacaaaactgagggtgtcaccccccagcaccacaaggccattgccaaactcgtcgtacacactgtcgatgccgtcttcaaaggtataaccggcaaaatccacatcccccgaagcccacacagcggaaaaataggacgccatccgccgcaggctgctgagggtgagctgttcatggtaattccagacgcaataaaccatggagcacaaaagccccagaagcgccagacttttgaacaggccgcagatctgtccccgccggtcctgacgaaatttggtgatgttatttttctgaggcggcattttttcacgctctgccatccagttcctccatcccataggtcagcgccgtcatataaaggccgcaggccggagccgtggggcctgcccgctccctgtcccgggaagccaggatctccgggatctgccggggctcaattttgtgcagtccgcagtagagcagcgttcccgaaatggcccgggccatgttgtagaggaatccgtcggcgcacacccggatcgaaatcagatccccctctttctccgtgcggcaatagtacatggtccgcacggtgctgcgcaccggggtgccctcgctgcgcacagcggcaaaatcctgttttccctcaaaatagggcgccgcttccgccatggcgtcataatccagacgagagggacagaaataggcccggttgtgataaaaggggtcccgcacccggctgttgtgaatcagataggtatattcttttttctggcattgaaagcgggcatcaaaatcccagggcacttccaccgcccggctcaccgaaatatccggcggcagataggcgctgatggccaaaggcagcttgtccagcggaatactggtggccatacgggcattggccacataaattctggcgtggacaccggcgtcggtgcgtcccacgccggacagactgacctgacagcccgtggccttgccgatggcctgctggagcacctgctgcacggtgatggcgttgttctgatattgccagccgtgataggcggtgcccagataggccaggcggaaggcgatatttcgttctttgatctctttcatggcagcatccttgtcaaaacaaatacgcaaacaaaaaacacacaggtcacggcataggccgctccatcatttttccccattttcagctctttcagccgggtgcggccgctgccgccccggtaaagccggcactccatggccaccgaaagctcatcggcccggcggaacgccgacacaaacaaaggcaccagcaccggcaccaacgctttggcccgtttcagcaggttgccgctttcaaaatcggcgccccgggccttctgggcgttcatgatcttctcggtctcctcgatgagggtggggataaaccgcagggcgatggtcatcatcatggcaaactcatgcaccggcagatggatacggctgagaggccggaacagattctcgatggcatcggtcagggccaccggcgaagtggtataggtcagaagagaggtggaagccaccagcagcatgatgcgcaccaccatgtaaacggcggttacaagtccttccttggtgatgtggaaaatccagaactcccacaaaatctgccccggggtgtagagcatattcaaaagagcggtaaacaccgccagaaaggcgatgggtttcaggctcttgagcagcatccgaaaacggatatggctgagaagggtgactccgatgacccctgcggcgcaaagcacataggcccagaagccgtgggccagaaagagcacgatgataaaggcaaagctgagaatcagctttgtgcgggcatccagatggtgcaccgggctttccaccgggaaatactggcccagggtgatgtctttcagcatgatacgccctcccttttgcaccggaggatctcctgagcggcctgctccacggtgtagaccccttcccgcaccggcgcacccatctcccgcagtttcaaaaagacccgggtgatctggggcacatccagcccggcctccagcagctctcccgcccgggagaaaatctccggcggcgtgccgtccatgaacacatggctgtcccgcataaccacaatgcggctggccagacgggcggcatcctccatgctgtgggtgacgaaaatcaccgtggtgccgtgtttttcatggtattccgtaataaaacggaaaatatcgtcccggccccgagggtccagtccagctgccggctcgtccagcaccagcacttccggctccatggccagcacaccggccagcgccacccggcgcttttgtccgccggacaggtcaaagggggatttgggcagcatatcctctcccatgccgcaggcggccagggattcccccccccgccgatgcacttcttccggctccagacccatgttccggggaccaaaggacacatcggcctcaatggtctcctcaaaaagctggtgctccggatactggaacaccagccctacctgaaaccgggctttgcgggtcacttccttgctctcccagatatcccggccatggagaaacacctggccccgggtgggtttcaaaagagcgttgaagtgctggatcaaagtggatttccccgaaccggtatggccaatgagggccagaaactcccctttgttcaccgacaggttcacattgtccaccgccgttttttcaaagggggtaccggggctatatacataagtgagcccttgggctcgcaaaatttcttccacaggtcagtcctccaaaaaggccatcagtctttgggcgcactcttccaccgtcagtgcgtcgatgggcagggagcagcccttccggttcagctcctccagcacttccaccgtctgaggaactcccagaccggtctggtgcatcttgtccacctgggcgaagatcttccggggcgggccgtcgcccaccacatggccgtcctccatcaccaccacccggtcggcctgggcggcctcgtccatatggtgggtgatgagcagcacagtgattcccttttcccggttgaggcggcgaatggtgttcatcacttcggcccgtcctcccgggtccagcatggcagtgggctcgtccagcaccagcacctgcggctccatggccagcacaccggcgatggccacccgctgtttctgtccgccggagagcatatggggggcgctgcgcttgaagttctccatgcccacggccttgagagcctcatccacccggcggcggatctcctgggagggcagacccagattctccggagcaaaagccacatcctcttccactacggtggccacgatctggttgtccggattctggaacaccatccctgccttttcccggatatcaaagagcttgtcttcctcccgggtgtccataccggccacccgcacctggccttgggtgggcagtaaaatggcgttgatgtgcttggccagggtggattttcctgaaccgttgtggcccagcaccgccacaaagctcccctgcgctatttccaggttcaccccgtccagggccagcaggtcgggctgatcctccctgttccggtattcaaaggaaaggtctttgacctgaatgatctgttccactgaaaaaagtcctccttatccggccttaccgggcgatccagcggctggtatggccgcagggcagacccaaaccggtctgggtcaccggcagcagcagttcgccgccctccacttccccaccgtagcggcgggccatggtcatgcccagcagatagacgggcaccgaaggggaaatgccggtggtataggagttgatgatgacaaacaaggggtcgtcgctgagcacttccatgcacagctgaaggaaaggcgcaatgctctcttcaaacttccagatctccccggaagggccccggccgtaggagggcgggtccatgatgatggcatcgtatttccggccccggcggacttcccgctggataaattttttgcaatcgtccacaatatagcggatgggagcctcgcccaggccggacagacgggcattttctctggcccaggccaccatgcctttggatgcgtccacatggcagacgctggctcccgccgaggcggcggccagggtggcccctccggtataggcaaacagattgagcacattcaccggctttttctttttccgctctgccacctggcggcggataaaatcccagttggccgcctgctcgggaaagacgccggtgtgtttgaaactcatgggcttgatctgaaaagtcagatctttatagtgaatgcgccagctttccggcagacggaaaatctcccaccggccgccgcccttatccgagcggtgatagacggcatcgggctttttccacaagggatggccacccctgtcccagatggcctgggggtcgggacggacgaggatatgctccccccatcgttccagtcgttctccgccgccgcaatccagcagctcatattccttccagccatcggcagaccacataattttattcctctcgattccagttttctctattttctcccggcgccattccgccggaaagatccattctttccctataaaaagacggatgttcccataatcaatttattttaccacccggagcgggcttcgtcaatgaacggactgtaaagacccccaaaagaaaagccgggacgctgtttgcgccccggccccttttgttttggttgttagcggatgatttcgccttccacttcaccggcaatgccggcagcgttggcttcatcggtgtcgatgtgcatacgcagcaggaacttgtcggacacacgaaccacagtctcgttaaagacgacggaacgctcgccggaggtcttgacgctgaccacatccttgtccttcaggcccagcttctcagcgtcggcaggggtcatgtggatgtgacgcttggcagcgatgacgccgcagggaatggtgacttcgccggcaggaccaaccagcttgacgctgggggagccttcgatgtcgccgctttcacggacgggaacctggatgcccagagcgcgggcatcggtgaaggaaacttccacctgggaagcgcttctttccggccccaggatgctcatgttcagggaacccttgggtccttccaccttgactttctcgttgcaggcaaactggccgggctgactcaggtcctttttgggggtcagctgatagccggcgccaaagagggtgtccagatccttgcggctcagatgcagatgtcttgcagaggtttcgatgatcacattggccattgttctctatctcctttgttctttgttccatggggacaaattgtttgtttcctctctataatttaacacatccccgccggttgcgcaacggcgaggggaaaaatatttgtgtcccagggatgttttttcgccccacttttggatttttctcttttttacccatagttgtgacaaaatgcacctttacaaagggtattcatcggattatactataagcaagtatctttacttctttacacattctacaaattcattcgtgaggttagaggccacatggttaccgatttcccccggacgctgtcgcttttgcggcaggagaaaaaactcagccaaaaaaaggcagccgaggcactgggtatttcccaggcgctgctgtctcattatgaaaacggcatacgggagccgggactgagctttgtggtccgggccgccgacttctacggcgtttcctgcgactatctgctgggccgcaccatgtcccgggaaggggccgccatctcggtggaagagctgggggacctttcggaggaaaagggcaatgtgctgcggggcagtgtttctgccatgctccaaaagaagctgctggtcaactcctccggcattctgttggatattctgggaaaagtgggccacaaaggcctgatcggcgatgtgtcggcttatctgtccgccgccatctacaaggcctatcgctatgtgtatatgatctcggggaaatattccgacaccatgttcccggtgcccgcccatctgttttccgatctgtgcgacgccgaaatgaaaatgcgggaataccgcctgcgtgctctggcttcctccaaccaggacagccgggagccgctggagttccccgacctttccatcgacgggctgagccaggaataccccaatctggcccccgctcttctgtcggtgctccacaatgtgtccgagtctctggagaagatgacccctgaccaggaataggggtcaaaaaaatttctcaaacttttttgcaaaaaacccttgccaaaggggaaaagctgtggtatattatatcttgcgccagatgtggtggcaaacaagctggtgtagctcagctggtagagcagctgatttgtaatcagcaggtcgggggttcgaatccgtccaccagctccaatttcatatgggagagttcccgagtggccaaagggggcagactgtaaatctgttgcgtttcgcttcgatggttcgaatccgtcctctcccaccaatgcccggatgcaatagcgtctgggcatttttaattttctcgccccttaaccaggggttcattttttgccctttttctgtcgcacccctccgttgcgtctccgatccccctctgttatgatggagccaaaggagggagcttcatgaaaatcaacgaaatcatccgcacccgccgcactgcccagggactgacccaggaagccctggcccagcttctgggggtctctgctccggcggtgaacaaatgggaaaaagggctgaattatcccgatatcaccttgctccccgctctggcccgggctctgggcgtggatctgaacaccttgctttccttccaggatgacctgaccccggaagagatcggacgcttttcagaacaagtcaccatagtggcccaggagcaaggctgtaccgctgctttccagctggctcgggaaaagatgcaggaatttccctcctgtgatcttctgacctacaccatggccccattgctggaggggattctaaatcttttcccgccaaaggaagaagaagccgaacccttccgccaggaagttctgcaactttatcagcgagctgcaaacagccatgatccccagatcagccaatgggcctgcgctcttctggccggccgctacatcgcccaaaaccaactggaacaggccagacctttgctggagcagcttcctcaatcccacaaaaacaaacagcttctccaggcctctttagcccgaaaagagggaaacatcgcagccgcatggacgctgctggagcaggaactcttcacccgtggaaatggcgttctggaggtgctgagccacctgatggatctggccgcagaagaaaaggacctggatcgggccgaagcctttgccgccgcttcccaaggtaccgcggaagccctccatcttcctgccgcttcccgtctttctcttcccttccagctggcccttctccgccaggacggccctcagaccctggctctgttggaggagatcttccagagcatccaccgcccggctcccttttccgactcccccctctactgtcacttgccggaaaaggaaggggccagcaagggccagcagatgatgctgcgcatgatggtaaacggggtggaagaagacccggcgtgtgcattcctccgggacctgccccaatatgccctttggatgaaaaaatggcaaaagagtgcctttcaggaatccaatccataaagaaggggcccgcttcagagagcgggccccttctttaattatatttcctccatcagctccacaagctgggcaaaatgatcgatggcggtatcataatctttggtatctccaaagccatagcgggcaaacacaaaaggaatacctgcctgccgggccgcctgggaatccccctgggtatctcccacatacaccggctgtttcaggccattgcggcggatgatgagcttgttgttctcccctttggaaaggccggtggccccgaagcactcaatgtccttgaaatacttttccaggcccatagaccggaagaagcactggatatacccatcctcacagttgctgacgatgaacaaggggaacttgcggctgagggcctgcaaggtctcctccacctgaggatagagctttccgccccgcttttccagcacctcatgctccacctggcagcattcttccagcagccgctgctgctgtgtttccgggcacatggggaacatccgccgggcgatctcgtccatgggcaggcccatatagccctgaagctccgaatactccaaaggcccccgcagatcggaatgggctgcaatcacctgattccaggccgccagaatcccctccactgcgtcccacaaagtgccgtccagatcaaaaagaatgccgtctgttttcatcttgttctcctctgtctctttcctgtatttttccttttgcatcatacctttttcaaaggagaaaatcaatccccttttcctatcccatcaagcgaaaaaaggccaggagcaaaaggagcaggccgctgcaccagcccacttcccgctctccccgcttccccatccgccggcccagaaaatgccccaggcccagcagtgtcagcgtggccagcagggaaaaaagaaacagcaggcgtgggtccatgcctcccagaccggctcccaccccggcggcggccccatccaaagacagggcagctcccagcaaaagaccttccctgggagaaaggctgcgggagccgtcggcatcggcccgggagggatcggcatacaggcataagatacaccgaaagctccacaaacgaaaccgcatttctcctcttccgccccatttgcgcacccagcttttcagcaggctgtcgcagatcttacacgagcccaaggccgccagcaaaaaggcgcacagccagtgaagccctccagccaacggctgccacagtcctccggcccaggccccggcggccagcacgccgctgcagcacagagccaccaccagagcgctctttcccggcaagcgaatctcccccgctccataggccaggctggcaaaaaaagcgtccagagacagggccagcaccaaggttccggcttccagtccctgacggacaaatccaggcaaaggcaaaaacccctttccggtttttgcttcatcctatgccctttctttccaaagggtccctaccccttgtcctagtcctcctgcgctttggcctgctgggcatactgctcggccagcgccacaaattcctccatccgtccattctcccgaatggtctgaggacaattttttccgctgaagtcataatgctctttcacctgatcggccgaaaggtcataggcgttcatcagccagccggtgagccgggcggcgttgtcaaaagtcttttcaaaatccccgtctgcattgacgcacaattccacgccgatgccgtggagattgccatccccttcggcgccatcccctgcatgataagccacttcatcgtcagggatgctgtgccatacttcggtgtcatccaccgtatagtgccagccggtggtcccctctccgcctttggcctccagctggccatgggcggctgcatcggccccggcggcggtgttccccgtttcatgaatgacgatgtaccggatctctctcttggttcccggccggttctgcgccccttccggggccagctgggtgtacaccggcacccccagcacatcctccggatacaatccttccgtgggtgctttcagcagtctccatgccccaaaggccactccggccatcaccatcagccccagcagcaggccgcagcctcttctttttcttcttttccgccgtcttttctgggccatcgtcgatccctccttctccccggacaaagccaaagcggcctgtcccgctgcttctatcatacagtgggccaggccgccgaatcttaaattttctcttaaacttttctcaagttcttattgctgggtgaggaaagcatccaccgcgcggaaaagcgcctcggcctcctggtgcagcttttcggtgctgttgatcttttccacatcggtggggttgtccatgaaggcaaactccgaaatgactgcggtgacatccacaccggccgccgcccggagcagaccgtaatagtctccggttttggtgctgttgtagcggtagacaatgggccggactttctggcccatcttggcatattcctcattgatcagctcggccaactcggtggaagggccgccatttttatcggccacctgggccagcacttcggcgccagtggcgttatgggcttcggtggcattgtggtgaacgctgatgaccagatcgggcttgacttcccggatcatgttcatccggttggtgagggacaatgtctccaccttggcccccagctgcgtggccttcttacaga

SEQ ID NO: 2064 - DNA, 16865 bp, Unknown
  16S sequences of unknown bacteria
catgcacaagccgctgaacacggaaaagtaaatctcccctgcacagcttcggctgtgctttttttcgctcagatctcgtcgtcttgaaacagccgcacggcctcagagacaaaatagagcgagccgctgatcacgatgcgggaatcacaggccatgcgcgccttgagcaccgtccgcaagtcatgagccaatggcagcccatgctgatgcgcgagcgattgcagatcagccagcctgccctgctcgaaggaacaaaggatgaggtgtctgcacacctggcggatcgtttcgatcatgcgcccgcattccttgtccttcagcaccgaaaagatgaccgtgtcgacagacatgccgcgcaaggtctcacagagcgcctccacgccctcgcggttatgcgcgccgtccacgatgacatccggatccttgtgcagcagctggaagcgtccggcccatccggcagaaaacaaggcggaacggatatgcgctgtctcgatgccgggaaacagcaggcgcaccgtcttcacggccagcgccgcgttttccgcctgatatgccgccggagaagacagacacaggccgctgagctcatccagatcgaaacagatgtgtccggctttatccctgcgcacatgagaagggcgggcccgatacagcggggagccctgctgcgcgcagatcgtttcaaacacctgtaaacaggaaggcttgtcctccgcggtgatcagcggaacacctgccttgatgatgccgcccttctcccatgcgatctcctccagggtatctcccagcagctgcatgtggtcatgaccgatccccgtgatcacgctcgcacagggagtgatgatgttggtcgcatccagtctgccgccaagtccggtctccaggatgacgacatccaccttctggctgatgaaccagctcagcgcgatgtggacatcgatgtcgaacatggccagtcccagcgcgcgccactcctcatcatgctggttgaccagatcgaggaactcctgttccccgatccactgatcgtcgatgcggatgcggtccagatgcgagacgagcgcgggagaagtcaatgtgcccacgcgcaatccggccgcgttgagcatgctgcggatatagttgagcgtagagcccttgccgttcgtcccggcgatatggatgatcttcagcgcgctgacttttggacagcgcgaaaagacgaagcgctgaaacgccggcagatcttttctgatccgccggcggctctcgatggacgcgatggcatcttggacatccgcgtagctcattctctcaccctccagtcgatctcctcacgtcccagctcccgcaggaaggcgttcgtccgggaaaagggccgagaaccgaaaaagccatgataggcggaaagcggcgaaggatgtgcgctcatgatgatcctgtgccggcgatcgtcgaccaaggccgccttttcctttgcccagtttccccacagcaggaacacgctgggccgggcatgatcgctgacaaagcggatggcatgatccgtaaaggtctcccatccctttttgcggtggctgccgctcttgccggcttccacgctcatcacggcgttcatcatcagcacgccctgatgggcccagtcgagcagcgaaccgtgcgcagggacaggcaggccgagatcgtcatgcagctccttgtagatgttcttcaggctgggcgggatcttctcgccgcgattcacagaaaaacaaagcccgtgcgcctgatgcgcatggatatatggatcctgtcccaggatcactgcgcggacgctggcgaacggacattcgcgaaagcaggagaacagctgttccctgggcggatagactgtcttttccgcatattccccttccacgaaagccatcaggtcatgaaaatatgactgctgctgttcctgttcgaaaaactcttcccagttcatcttcttttcccctttcttcgcgtatttccccggaaattgctcagcgagcgacatcttctgcgttcagatgaaacagcggcgtctccactttgcccggcgcgcagccgatggtcagatactcctgatgctcgatccgccgctccttcagctgagcgatcagctcctctgccagctgcttcatcgacagccgggtcacagcggcattcaccgctccgccagccagcggaacgaacgaagacatccgcattttcagggcatggcgcagcgccatacgcatgagcgtgccggacaccgcgctgacgcccttggccgtaaacgcggtcccgaagaagatgcacaggtatcccggcagctgatgatgcgccagcatatgctcttccttgatgccggtgtacagataaagcagcttctgcacgagcagggcagactcatacagataagacgcatattccagcggcagcgtaaacgcgcgcatcacgccggatgccagcgcggagggcagggcgacggccgctgccctgtccgcatgctcagcgatgatccgatcgctgatccgggcgatcacccgaggatcgacgccggcctgtgccggcgagacgctctgcagccgttccaggatctcatcatccacatacggcgccagactttccaacagaaatgcatcccggctcaccaggatctgattccataacccgttcatgattaccccctcctcaggaatttctcagctcgatcaggatatcacgcagctgagcagcacgctcgaaatccagcacacgcgcagcttccttcatctccttctcgatattctccagcatcttcgtcttgtccttcttgcccatcttgtttttcttcttcatgtaggccgccgtcatctccttggtctccttgctgcggacgacatcatggatcggcttgatgatggtcttcggcgtgatgccgtgtgcgtcgttgtatgcgatctggatctcccggcggcgggccgtctcatccagcgccttgcgcatcgactgagtgatctgatccgcatacatgatgaccttgccctgcgcgtttcgcgcggcacggccgatgatctggatcaatgagcgctcactgcgcaggaagccctctttgtccgcgtcgaggatcgcgatcagcgacacttcggggatgtccaggccttctcgaagcaggttgatgccgacgagcacatcgtatttgcctttgcgcagatcctggatgatctccgtgcgctcgatggtggtgacttcatgatggagccaggccaccttgaattccatattcttcagataagcgctcagatcctccgccatccgcaccgtcagcgtcgtgatcagcgtgcgttcatcacgctcgatgcgcgccttgatctcgtcgaccagatcgtcgatctgtccggtggtcgggcgaacttccacctcgggatccagcagtccggtcggacggatgatctgttcgatgacttccccatgcaccttgtccagctcatagtctcccggcgtcgctgagacgtagatggcctgattgaccatctgctcgaattccccaaagcgcagcgggcggttatccagcgcactgggcaaacggaagccgtaattgaccagcgtttccttgcgggcgcggtcgccgttatacatgccgcggatctgcggcagcgagacatggctctcatcgacgacgaggaggaaatcatccggaaaatagtcaaataacgtatagggacgctcgccgggctgacggccgtcgatatgccgggagtaattctcgatgcccgggcagacgccgaattcgcgcaatgcttccacatcatagcgggtgcgctgttccagccgttccttttccagcagctttccttcttgttcaaaatagtccagacgatcctcgagctcttcctcgatcgtatcggcagcccggttgatgatgtcctggctcgtcgcgtacccgctcgccggatagacgacatagaccgtataggcattgagcaccttgccggtcaacggatcgacctcgcagatgcgctcgatctcatcgtcgaacatctcgatgcgcaggatataggcgtcggtatggcccagcgcgatctcgatcacatccccgcgcgcacggaaggtccctcggctcagctccatgtcgttgcgcgaatactgctgagcgaccagccggcgcatcagatccttgcggtcgatgatatcccccacccggatcgagaagaacatatcgcggtactggtccggattgctcgcaccgtagatgcaggcgaccgaagcgatgatgatcgtgtccctgcgctccaggatggagttgaccgccgccatccgcagcatatccagctcgatgttggtcgtcgcgttcttgtcgatataggtatcggtcttcggcagatatgcttccggctgataataatcgaaattggagacgaaatattccacacggttatgcgggaaaaaccacttgaattcagaatagagctggcctgccagcgtcttgttgtgcgcgaagaccagcgtcggtttgttcacccgcgcgatgacattggagatcgtgaaggtctttcccgtgccggtcgcgccgagcagcacctgctccttcttcccgctgcggatgccctccaccagcttgtcgatggcctggggctgatcgccctgcggcgtataggttgaaacaaggtcaaacagcttctcttccatggatgatctcaactgcctttcgtttctgcgtatccagttcctcctcgtgttcgttccaatagacgccggctgcgttcaccagcgcctctgccgtctcattatcgatgacgccgtcagcttccagcccctgatcgcgctggaattgcgccagcgcgctggaggaagcctgagagaaatactcgtcgcttcggtctgcgtcatagcccagaaagcgcagatagatctgcaccggtttggcgatcaccgccacgctgtccgcttcgacagagatctcttccgtgtaattgggcatgccgacgcttctggcttcatccagcgagacctccacatccggcgtgatgcccacgccgttgatctgcctgccctggctggagaaccactgcgcggtcgtatacttcagcgatgtgccgtcgctgaacggcacgctcgtctgcatcgtccctttgccataggtcgtattgccgatcatgatcacctgatcgcccagattttcatccaaggcgctgatgagcacttctgacgccgaggcggtgttctcattcatcaggatgacgatctgatcgaagctgattggcgtgtatccttccgtaaccttatattcggtgcgttccccgctgcgatcctctgactggaacacgatggtgtcctgcggcaggaagcaggcggcgatatccaaggcagagctgagatatcctccgccattgtcccgcaggtccaggatgatcttcgactcgcccgcatcgcggatgcgcttcagcgcgctctgcatatctgttccgctgttctccgcaaatgaagaaagcaccacataaccatagccgtcttccacataagcggccaccgtattgtcgacgactgccggcttcacagagaccgtctgctgtgcgccatcgcgctcgatgacgatctgcgccgtctcatcctccgagagggcgagcagttcctggatctcgccgctggacagcgtgctgcagtcttctcccatcacggagatgatcagatcgccgcgctgcagcccggccttctgtgccggagaattctcaaacacggccgaaacgacatactgcccctgagcgttctgataaaactgaatgccgatgccgacaaatgtgccttccagcgaggaggaaaagttctgcgcatcctcctgactcatgtaatacgtatgtgggtcactctcgctgtaggccatcgctgaaatggctttttccaacaatgtcgtggacagatcctgaatatcctttccgaaataccagtcttcattcaggatcgtatagaccgactccagcttctgcatctcggcagaggcctcgccgctgaccactgttccctgcgtcccttttgcgacaaaaaagccggccgcaaaaaacagcaggcagctgcacacgacggcgaacttacgccgccgcgctttcttttctgcctcgatttcatccggccacttatgccgttccagtttataaattaccgttcttttttctcccatgagatcacctcaattttttctttagacatcatatcatattttggttaaaagtgatgagtaaaagcttttttcatactgctgtaaccctattgtaaccctataaccacattgaatgcagttttatctgcttttccggatataataaacgctcacagatacttctccagcacttccatggtacgctcatccggcgccggatcggtcagcctcagctggtacctgtcttgtgcaggcatgctgtccagcagctccttcatccgctcattgtgcgcgatcagcaccctgatccattcttcctgcagctctatggcctcttccaggcgctgcttcttcgtcaggtagccgatcatgtgatccttgcctgatgcgttctccagacgcactgcagatggatccacagcgcgcacgctggccacactgtccttcatctcatccagctggccctgcagctccctgatggcctcttttgccctgtgtatggcctcgctctggctgctgatgcccttcaggctgcgaaacaggctcatgatgcgctcctggcggtctgcctcgctcctcttccccttccggttgcacatgtacatcagcagatcggttaagctggctccgttgccgaagtgatcgatcagcatctggaacagctggcgctctccatacggcgcaacatccgggctgtcctggtacatgtgcagcagctgcataaatgcctgtatgcccttcttttcgtcctctgtggcctgtttcttctcgtactggatgacctctataagctccagcgtcagctcctcgctcagcctctgctcgatgcgcagccggcactccgctgtgttccttctgcgcttgtactctttccgattcatcccgatccgctcccttctggcaaagaaaaggggcacccgcgtccatgtccggaacaggtgcccttttcgtgaggaagagaatgagcatttcatgagtgctgccaataatgccttatgctcgtatctatcagacaacaccatcatagcacacttttcttcccctgttgtctactcctgcgccttgtatacctctttcatggccttatgcacccgtctgtatagcccagatcgggaatacgcgtgatcatatgccaccttctccactggctggcgctgcagatacagctcatgcaccatagcgcgatcgcccggatcagggaccagctgcagcagctcctcgcatgctgcgcgctccttcggttccccactcctgcagcgcctgcggaaagcactgaaccacgctgtgaagcccacagcaggcccctgctggccgttcagcccttcgggcacacaagagggcgcagtggctgttttcggctctgtacgcgcgcgcatgacgatgtcaaccttctcacgctctgacgctgatcaattccagatcatcgcccaggcgctcctgcacaaaggaaatgaagccttccagcgtcaggaaaagcaccgtttcctcataggtgcgcccgctgccgtggatcagctggaacacgccctgatcactgatctgcgtgtccacattgtgcttcagacgctgcaacagctctctgttcttgcctctggtgtcttccggaagctccagcgcgatctcctgatatgctgggatggtgctggtgatcagcagctgtctgatggctgctatggcgttgtgatcgccctcatacaccgtcacggcgttgcggatgtccgtcttatccttgatggcccctgtctgcaggatgtgcaggaagttggtcagcccggcctgatatccggcattctgaatgttcttcagcacttccgacttccacttgctttcaaggccctgcaaccccgcatcgatcgcgtccatggcctgctggcgctgtgtctggatctgtccggtgtactgctctgtaaggcggttcagctcctgcttcttgccctctggcgtgtatgcgttgccattgatgatttcccggctgctggcaaagccacgggatgccgttgtcttgatcgtttcaaagatcgcgatcagatcagactttctgctcatgccgtggtcactccttcctgtgcttcctgggcgctgatgaagctgtccagatcggccatcatggaagccagcgcgccatcttcctgcagcgccttgtccgtttctgccggcccttcctgctggtaatacttattcaccccatcgccgatgctggccaggctgtgcgcatagtccggcgcctgaacggatgccaggcgtcccatgctgtgtgccagctgcagaacggccgtatatgccggccagttggcagcgtatttgtccaggtacatgcccagctcttcatcactgatcgtaccttccttcactctgatcacgcccagatcatccagcagcccctgcggtgtgtcctgcatgtagatggtgctcagggcgtctttcccagcgctcagcaggcgctggcacttggccaggctgttctgcctgtcctcttccttgcgcgccttgtagtcctctctgagggccttcagctgctcttccagcggtgcctgtgcgcctgatcgcacggccgtgcccgtcagatcagcgcggtgcgcgtcccattccgcctgcgcgctgccttgcttgaagcgctctttcagcttcgcttctgcctgctgctgggcgcccttccagtacgctgccagctgctgccactccttcatttcttccaagatatctaaaaacattgctttcactctcctctcacttcaatgttgatcgctgccatgcccttcaggtcattcttcggttcatagcttaccagctgcccgcgctgcagctcctcagcgttctttacctcgctgatatgggcaaaataggtctgtccatcgtccccttcgatgaagccatagccgtgccggtcattgtatcttttcacgatgcctgtcatgctctcacctctctttccgcgtctgataaacaaaaaagacgcaggaaaccagctttcactgattttcccgcgccgagcgatatctcgcagcttccaatgtccttaaaaatgtcattagggtactcatgccgtatttttgtttatctgcgtctattgtaccacagaaaggccatcagcagccctctttcttcgttttgttcagcgctgcacacctgcacacaaaatgcacgcacacaaaggaaaagagggcgctcacttgccctctttcatcaccgtgtatgccttgcggaaccggctaccgtcctgggcgccggcttccttccagggcttcacatggccatgcagcagcttcttgatccgctgcagctcttccggcctctcatatgacactctgatcttgatcatgctttcttacggcgtgccctttccgctctcttcccgcacacatagccccacaggaatcctttcagaatgcagtcatacacagacaccttccggccgttcatggcctctctctggatcgcgttcttgatgtccgcgatcccctggcacgctgcatcattgcctgcgatatcttcaataggcatctccccgatgatcttcatggtatcgttcatctttcctcactctcctcttcctcgtagtagaaaaacgggttttcatggttgaccaggcagctgatcagataaaatgcactgaccagcagccccgctgccaacatcaacacatcaagcgcgctcatggtcttctcccggcgctggtggcgtcagatcgtcaaccagcatgctgcgcagcatatagcacgccatctcataaccggcatagaagccggctgctgtgtaatccagaaaggcagagccacacttttcttccaattccactgcatactgtttttcgaccttttcgaccttttcgaacatctccgcaatcatagaagaacttcttttatccgcttttgccagaagttcatttccgcgcggcgttcctggatagatgaattcatatcttccagcccactcatcatatctttccttcagaaatttctcgttcattttcgtttacctctttcctttcctgttcatgttgtggtaaactgccccttggtagtggtgggcagcttacccgctgggcatccggaaattgccgtttccgatgcccctttttttatctggtggatatcttttctaacctgatttagctattattctgttcagccatcgcttcgcgccgtctcttcatgcagctgcactctttcacatacagcacatcattcccaggcaccgcgatatagatccatcctttgttcctgcatttccggcagttgatatgatcgaccttatgcagctttccgcgcttgcggttcgctattgctgctgctctgtatgcgttcatggcctacttctcccgaacagcatcgaagatctgcgtgggcttattaaacacaatcttgaatatgcctttttccccgctgcggttcttttcaacgcgcagctggtagagggggtgcatatcggctggatcgtgctttacatcgtgcaggatcatcagaacatgcgccgtctgttccagctccccgctgtccttcaatgaggacatgctgggcttatcctcgcccgttcggttgatctgtgccaggatgagcatggtgcagtcataatcctttgtcatgatctgaagctgtctgaccgcttcaccgatgcgctccctgtcatcctgacgccttccggtggtgacgtatccaatgtaatcaacaaacacgatacaatggcctttccggctctctctggccacgatcttgcggatgccgtttactgtctttgatccgttatagatccggatgttacggctcctgagcacgtttataccgctgttcagctgattgctgatctttgtgtccttatctgcccttttcatcgcttcgatggacagatggctgttgatcgctgttaaacgctgatagatctcctgctctgtcatttccatgttcagatataggcatctgtagttttgcgccagatcgttcatcagattcagcgcgaaagctgactttccgaccgatgggcgcgctgcgatcacgttcactgtcttttcgatgaagcccactttttcctgaagccagcggaaccggctgaagcgcagcttcgtggcgcatctggtgaccagatcgcggatgtccttggcgctgagcatcgtggccgtgctgtcgcttacgaactgcgcgctgatgccgttcatctgctgcagcgcttcatcaaagctcagttttccatcgctcatgcccttcatgatctcatcggcctttctgaccttgtagatctcctgcaggtcatcgatgtaggtatagaggctggctgatgagatgtatatatcctgcaagcgcagcacatagtcatctgcgcccggaacgctctgcatgcgcgcgaacagctccatgagatccagctcgcccttgtcggccactatgctcttcatggtgcggtacagagatctgtttgtgtaatcggcgaacatctccgggtctatctcgcattccttcatcttcggatggtctacgatgaggatggccaggatggcctgctcaagctgcatgcctcgctcaaaattctggcaggtcataatatggctcctctttcttccggctctggtcattgcgtgcccagttgcgcattgcagctttccagtccttcatcggatttcttccggctttccatccatttgcctcgtagtagtccatgaagcgctcgcaatccacattcagctgcttctcctcattgtaggctttcaactcatccaaagaaggcttaacgaagcgtgtgcgtgcaggctttgcctgctccttcttacaatcttcctctattctcttatctcttttctcttttctcttttctctagcatcacaatgtgagtttaatgtctcacaatgtgagtcacctgtctcacattgtgatgttttacttcgactttttctcatgtatcttgcactatcaccttcactgccagtaagacccaatacttgaggcataaagtaatttgattgtttatcaaccaccatcaaattattattgattaaatagtcaagagtatctttgacactttgtgtatcttcagaaaagatttccgctaattcctcttcaagcgttccaaatacgccttgataataaataaagccctctttatcaagactaaaaagcatcaacttcaaatagattatctgcatatttaacccatttttttgctttctcatcttacgctgctccagctcatcaaaataggtgtttttgagtttgagccaatagtatcgcttattcttcttggccatctacatcattctcgtttctaaccataacgattacagaatcggtgtctactgacataatgcagattacctcacaatcatcaagcgatgttttcctagggggtctaacttcatcacttttactgtatgcaacacctagatccgcctgctgtgtattcacaaaaaacacatcacatgccacaggcaaaaccttcatgagatctccaaccgtcatgcctttgctccctcgctttccggatcgcctgccagcagcatcatgaagtcagcatcaaccgtgaggatcttcagcacctcacgctccatggcctctgccttgccgttgtagaacgtcccagcgcccggcatgggcttctgagcctctgccagcacttcatcattgcgatcaaccgccacgaggtggcagcctcttggcatcgcatttaccagttcttttactttcatgccttctcttctccttcctcgctttcaagcacccacttcagcgcgtatgcagctgcagccgtacctctgcgctccagataggcatcccagtcctgcgggtccttcctgatccgctcctgcgcttcctggcagcgcttttcatagtgcttgatgtaactcttgatctgttccaccgtcttcatgctcatcacctcttctttgatgtgatcccgaaggccgtggcagccgtttccctgcacacctcaacgatgagatcatgcgggatcttgatgttgctgctcccgatcaacccgagatattcggcgatccgcagccgtgggatatggaaatccctgtgccctgtgctggtcttcgtgtacgatccaggcagcgtgccctgttcgatcgcgttctttacccagccggcgctcttgcccagcaatgcagcgcattcattcacgctcatgcacaggtcatctgatgtgatgctgtccggatcgatgcccagggcttcgcacagctgctgctcccgctggtacttcggcggtacgccttccagatatgccttaatgtctccaccaggcaccccggccagcttggaagctgcgcgcacgctcatgccctgctcttccagcgcatccttcagcgcgtccttgaatagcattctcttcacctcactttaagctgccttatgataggccttcggttttctcacgcccagggcctcagcatcctcttgggcgtccatgtattgtttcatgttctcagcttgttctcctctctggggtatatttacccattcatcatgcaggttgaattttttcaataaccatgctgtatttcccgactatttcccgccattctgatgcaaccttgcccgcttcagattctcagcgcgctgttttttctcctcatctgtaaggatcctcttcctaaactgcgctctgatactgatgaggcctttagggaaaagataggtctttgaaacgatctttccctcgcttcgctcctggccgatcaccttgaaggtttccgggtgttcctgggtcagcttgtccatcttccggatccataccgggctggcagcatataattccgcatcagcactttcagcattgaaattgatctgcacttcctgttcataccttgataacggcataaacttctcctttcctgcctgtggcagtcaggcattgctcccctgttggtagcagggcatagcgtctacctctctaagagagtgctcagcttcacacccagggctgctgcaatcttcttcccaacgtcatcggaacatgatttaccgcccttgatgtaacacaccgttgcttttgaaacgccagctttttcagcaagctctttctgggtcaagtcctgtctggtcatttcggcaacaagtttgatcctgtcgattcgcactttcatcacctcttttcagaatttagtgtttttataccaaattcaacataatagtataatggtttttcactaaagtcaattaaaacaaaacttttattagtgttttttcatcaaatgtgatttaatatgatatgaggaggtgataaacgtgggaatcggtaagcaactaaaagcaattctgaaaaaaaggaacatgagcattgcatttctttcaaaattatcgggtatttctgtaaataccctgtactcaatcacaaaaaaagatcctagtagcataaacacttcaaccttacaaagtattgcagctgcattaggatgccaccctttagagctttttgatgaatctgacaactatgtaaatgtcttatttgaggaagtaggttatgcactagccgttgccaatatgaccaataaactcaagtcaatctcgtgcaatttaattgatgaaggcttcggatcgtacagcattttgtgttcagatggagaaatacacgtcaacattgatgaattagatgagttaaacaaagaaactgatgaattcctagaattcaagctaaatcaattaaaaacaagaagtcattttattgaatacgcttcatccgaagagcaaaaagaaggccttcccgatgatcaggaaggcaatgatgatacaactgaataaaaaaccccggcgctaccaacaccggggcaccagcggtactaccaataccgccagtatagaaaaagaaatagctgagaactaaatgctttttctatacccaattttaacaaataaaagggggtatttcaatgaaaacatcacaacgccagcgccgaccgaagggcctgggcactatccgcatgctaggccagaatcgcgcacgaccctaccaggccatcatagagggcaaaggaagcgcgatagacggctcccggcaccgttataccctgggcacctttgcgacccgtgagcaggccggaaagtgccttgacatccatttcctgaaggctctggacgttatgcccgccatcgtcagggacaaaccggcatatgaagagcagtatctgcaattcatccgtgagatggcccagaagggcattgtggccatcgatccgcgcgacattgacaatgccgacatcataaaccagatcttcctggcacgcctggccaaagaaggcatagagctgcgggacgtgaagccgatcagcaccgcacccaccctggccgagatctgggaacgagtgaaggacacagggctgcgaaagatgcagggcacgcccacgctgcgcaattatgatactgccttcaagcatctgcatccgattcactccatgccaatcgacaccctaaacctgaaggacatacagccgatctttgaccagcagatgcgcgatcatgccagctatgcgaagatgaacctaatgaaagtagtgctgaatcattgcttcaggcatgcgatcaagtacgatctggccagtaccaattatgcccagtatgtggatttctacgaatcgcgcgaagaggtagagacgcgccagccgttcgatgatgatacgatcaggcagctatgggccctgcgtgatgatccagacgcccaggcggtgctggtgatgatctacacaggcatgcgccctggtgagttcaccacgatcaggaaggatcatgtgcacctggaagagcactacatgatcggcgggatcaagacggcagcgggaaaagatcgcatcatccccatccacgaggccatagcgccgtttatcgcgcagatgctgcagcgctcccggaatgcctggctgtttggtgatggccgttataaggtctatctgacaaactcctttcaccctatccgggacaaactgcactttctttacacgccccacagctgccggcatacgttcgccacgctggcgaagcttgccagaatggatgaatacgcccggaagaagatcatgggccacgcctgtaaagatttgacagatgacgtgtacacccacgcccctattgcgtatctggtgaaacaggtaaatctaatcaaaacgccttaaatctgtaaccctattgtaacccaatgagcaaaaacaagcattttttataaactttttaaattatgcagaaataatataacaaatatgaatatagcccgatttaatcaaacaatcgggcatttttttaatttataatttccattttgttgaaaaggcacatcgataatatcatattttacgcgcatttttgcaaaataatggcacagatgcccacaccatgggccgatgccccttattttgtccatgctctcccacttttcttcactcaatcgtcaaaaacggatcatttcatgggatcttcccacacaaaggcggtataatgaaactgatcagtggcccgatcaagatgatcaggcagaaagcgaggtatagatgaacggtgtgatcttatatcaatcaaaatacggagcgacacgcaaatatgcccagtggctctttgccgcgacaaactttgatctgctggagatgaagcaggcaaagggcacagatctcagccgctacgaagtgatcgtattcggcggcggcatttacgcgtctggcattgcgggattgaacgcgctgaaaaaacagctggctcacctttctccgcaaaaggtcgtcatcttctgcgtcggtgcttctccttatgatgaacaagcattggctgcaataaaggaacacaatatggatgggcc

SEQ ID NO: 2065 - DNA, 2995 bp, Unknown
  16S sequences of unknown bacteria
ggcttatgtatcaggcaaaaaagagtaagaacaaagccatcgccggctttgtgagcacgcaaacggaaaataccggcaaaggcaaggatgtcgagatatggagttaagagattgctatgcggaattcggcggagattacaaggaagtgctgagcaggctgcagcgtgagcagaccgtccagaaattcgttctcaaatttttagacgacaaaagcttcagttctctggaaacggccctgcaaaaccggaattacgaagaagcattgcgctttgtccatacgctcaaagggatctgccggaacctttctttcaccagactgtacgaaagcagcagccgaatgacagaagcgtttaaggccggagattttgaaaatgcagccgccggaatgccgcagctctccgacgactatcatcagatcatccgtgcagttgaagcctacaagacgtgcagggagggatagccgcagatggacagcagcttggcaaaaaagaatactacgcggtttctgatatacagcttcgtcggccttcttgtcttcagcatgggtgtttttgccatgctgggtgtctatatgagccggaaaagcacaaagaccatccatgaagtcggcgagatctatatgtccgggatgagcgaacagatggcccggcattttgagaacatcatcgaactgcggtttgagcaggtcgaaggcatcgtgtccgtggtcccgtcgaagagcgccgacaaggaagccatgtatgcagatctcgtatacagggcgcaggtgcgcggtttcgaatatctggctctctgtacctcagacggcagatttgaaacgctctgcggggaagcattccagccggtcaacccgccgcccttcgtggacgcgttaaggcggggcgagcagcgggtcgccgttggcgtggacgccgccggcaacgaagttgtgctgttcgggatcgacgcggattatccgatgcaggacggcgaagcctgcaccggtttggtcgcggcggtgcccctggaatatatcagcgattttcttttttcagaaaatcaggatgctctgatctattgccatatcatccgcccggacggcagccttgtgatcgccaactccaatacggagctggttggatatttcagcgcgctgcctgcctcttccgcggcaggcggcccgcttgaggggcttgccgcggcgctggaagaggagaaggaatacaccgcaacgcttgacacgggcaggaacagcctgcaaatctacggcagacctttgccgcgctccgagtggtacctcatctcggtgatgccttacggcatgttggacgaaagcatcaacgacctgagcgcgcagcgcaccttcatcactttgcttgcctgcggctccatcctgcttttcctgacgctgatctttctgcggtactttttcctgacccgccagcagctgcaggagctgggaaaggcccgccaggcggcgcttgaggcaagcaaggccaaaagcgaatttctggccaatatgagccatgatatccgcacgccgatgaacgcgatcgtgggcatgactgccatcgcaacggcgcatatagacgaccgtaagcaggtgcagaactgtttgcgcaaaatctcgctgtcgagccggcatttgcttgggctcatcaacgatgtgctggacatgtccaaaatcgagagcggaaagctgaccctgacgctggaagcaatctcgttgaaagaagttgttgaaggcgttgtcggcatcatacagccgcagatcaaaacccaaaagcaaaactttgacgtccatatagaaaatatcacggaggaaaacgtatattgcgacagcgtccgcctgaaccaggttttgctgaaccttttgtccaatgccaccaaatatacgcccgagggtggctccattcagctttctctctttgaagaggcgtccccgcgcggcgaaaattttgtccggacgcaccttaaagtgaaagacaacgggatcggcatgtccccggaatttttgcaaaggatatacgaatcttacagccgtgcggatgaagccagaatccacaagaccgaaggagccggccttggaatggcgatcacaaaatacatcgtggatgcgatgggcgggaccatcgacattcggagtgaactgaataagggcactgaattccacatcacaatcgaccttgaaaaggccgcccttccggaagccgacatggtgcttcctccctggaacatgctggtagtcgacgacgacgcggtattatgccagaccgccgtcagcgcattaaagtcgatcggagtaaatgccgaatcaacgctgagcggagaaagcgcgatgaaacggatcgttcagcgccaccggcagcacaatgactatcagatcattcttttggactggaagcttccggatatggacggcctccagatcgccagggagatacggcgcagctttgggagcgaaatcccgattctgttgatctccgcctacgattggaccgaatttgaggaagaggcgcgtgaggccggcatcagcggttttatttccaagccgctgttcaaatccactttgttttatggcctgcgccagtatatgggccttgaagccacgcatcagcctgcatccagccacggcgccggcctctccggcagccgtgtcctgctcgcagaggacaatgagctgaattgggagattgcaagtgaactgctgtccgatctgggtgtggagctggaatgggcggaagacggacagatctgtctggacaaattccgggaatcgccggagggttattatgattttatcctgatggatctccggatgccgcacatgacaggctatgaggctgcacaggcgattcgcgggctgaaccgcgcggattcggcgtcggtccccatcatcgccatgacggcggacgcctttgccgaggacattcagcgttgtctggaatgcggcatgaacgcgcatatcgcaaagcccatcgacatgcaggttttggtcgaagcgctgggccggctc

SEQ ID NO: 2066 - DNA, 4176 bp, Unknown
  16S sequences of unknown bacteria
atcttgagtatttcgacgagctcctgaagaagggcgacgtgctccacgtgacgctcggctccggcatgacctcgtcggtcgctaatgccgagaaggcggcggaagagctgagaacgaagtacccggacaggaagatcacggttgtcgactcgctcggcagctcgaccggctacggaatgctcgtcgacgacgcggctgacctcagggacgagggaaagagcatggaggaggtcacggaatggcttctcgcgaaccgtaaccgcatacaccatcagttcctttcgaccgaccttcagtattaccgcaggggcggaaggatatccggagcggcggcgaccgtcggcgctatcctgaatatctgcccgatgatgcgcataaactctgatggaaagataatcgcctacacgaaggtgcgcggcaagaagaacgcgataaaggagacgatcgcgacgatgaagcgcctttgtgacgaccacgagaactattccagcaagtgcttcgtgaaccactcgaactgccttgccgacgcggagctcaccgtatcgatgcttcatgagcagttcccgaacatcaaaggtgagattaagatctgcgacatcggaacgataatcgcgtcgcacaccggtcccggtacgatctcggtgttcttccacggcgaagaacgcgtgaaataacgatataaacgatatatataggaaatatatgacgacgatccggaaaaaacataccgggtcgtcgttttttcgtggctgggtcttgacaaacaggtcggaatggtgtataattatatggcaggaaataaaaccaaagttgcgaaacatatgttatctgggggataatatgaaaagattgaggcaaaacggcggggagtccgggaaggaccatatgactgccgggctgtgcatcggaatgtgcataggtatgtgcgtcggtatgtcaaccggaatcggaatgacgtccggcatgagcgtcggaatggcagtcggtatgcttatcggctcggagatcaggacgaattaagacggtacgaaaggaacaaacaatgcttgatataagtcatctcacgaaaaaatatggcgacaggaaggcggttgacgacctgtcgcttcacatcgccccgggcgagatctacggctttattggtcataacggtgctggaaagacgacgacgctgaagtcggtcgtcgggatacagagctttgacgatggagagatcacgatcggcgggcacaacgtgaagactgagccgctcgagtgcaagaagatcctcgcctacataccggataatcctgacctttacgagttcatgaccgggcagaagttcctcgattttgtcgcggacatcttcggcgtcggcgcggctgagagacgggagcgggtcggaaagtacgcggaggagttcggaatgaccggcgacctcggaaaacctgtcgcggcgtactcgcacggtatgaagcagaagctcgctgtaatctcggcgtggctgcactctccgaggcttatcatcatggatgagccgttcgtcggactcgacccgaaggcggcgcatatcctcaaaggcatgatgcgcgaggtgtgcgacaacggaggagcgatctttttctcgacgcatgtgctggaggtcgcggagaagctctgcgacaaggtcgcgataatcaaggaaggaaagctcatccgctccggaacgatggaagaggtgaagggcgacgacacgctcgaggacgtcttccttgagcttgaaggagaagaatgatgctgaagatattgctgaagcgtcagatgaccgagatattccggaattacgtctacgacgcgaaaaagaataagaagcgctcgaaagcggctacgatatcgttcatcgtgctgtatgtgtacatcatggtcggagtgctcggcgggatgttcgcggcgctttcgatggcgatctgcgggccgctctgcggcttcgggctggggtggctgtattttgcgctgctcgggctgctgtcggtgcttttgggggctttcggaagcgtgttcaatactttttcggggctttatctgccgaaggacaatgatctgctcctctcgatgccgataccggtcaggtatatcatggcgtcgaggctcctcggggtctatctgatggggctcatgtattccggcgttgtgtctgttccggcggttgtcgtgtatatcgtcactcagggggcggatgttcaacggatcgtcggcgggctgctcttcgtgctgctgacgtctgtcatcgtgatgatactttcctgtctgctcggttatgtcgtcgcaaggataagtcagaagctgaagaacaagagcttcattacggtgctcatttcgctcgtcttcatcgttgtgtattatctgttctatttcagggcgcaggagatgctgtcggcgttcctcgcgaacgcggcggtatggggcgagaagatcaggggcttcgcttatccggtctacgcgctcggaattgttggcacgggcaatatcatcgctatgctcggatgcaccgtcatcgtcgcgctgctattcttactcacgatgtatgttatctcgaaaagcttcattaaaatcgcgacgtcgaccgccgattccggaacaaagtcgaagatccgtgccgagtcgaagaccggtacatatggcggagcgctgttccggaaggagatggcgcggttcacgtcgagtccgaactatatgctgaactgcgggctcgggctgctgttcctgccgattggcggcatattccttgccgtcaaggcgcggactttacttgaagcgctgtctgagatggagatctcggatgggatgatcgcggtcgtcttcgcgtgcgcggtctgtctgatgctgactatggtcgatatcacggcgccatccgtgtcgcttgagggaaagaacatctggatactcggctctctgccggtcagagcgaaggacgcgcttatagcgaagctgaaggtacagctcgtcgtgacagctccgccgctgctcatcgcggatatctgcggtattgtcgggcttcggatgggcgcggcggaatcggtcatgattctgcttgtgacatttattttcatgctgtttcaggcgctgtttggactgtttctcgggcttaagatgccgaacctctcatggacgagcgagatagcgccgataaagcagagcgggagcgtcacgataacgctgctcggcggaatggcgatagcggcggtgacgtgcggcgtctacttcgtcatcggcgatattaccggcgggatgttgtacctcgctatagtgtcggttgtcttcgccgccgccgatattatcctctacagatggatagtcagccgcggggcgaagatattctcggagctgtgagtattaaatattgaaatcgggaaaaactaccttttgaattaacggaagcgcctgtcgcgtttccggaaaagaaaggtagttttttcatgtctgaaatgttttgtttccagtgccagcagaccgcgggcaacaagggctgcgtgaagaccggcgtctgcggcaagcagccggagaccgcggctttacaggatgaccttgtgaaggagcttatccgcctcgcgatcgccgctgatgaaaagggagagcacacgcctctcgcgtcaaggcttatcgtcgacggtctgttcacgaccctgacgaacgtcaacttcgacaacgccgcgatacaccgcttcaccgggcgtgtgattgatgagcggaacgccctcggagggcgcgattatccggtaattgagcttttcaagggagagacggacattgtgtcactccgctcgacgcttcttttcggaatgaaaggaatggcggcatacgctcaccacgcgatgaacctcgggtatgaggacaacgaggtgaccgactggttctataagggtctgcgttcccttaacgaggagcacacggtcgaggagtggctggcgctcattatggagttcggaaaggtgaacttccgctgcatggagctgctcgacagcgcgaacaccgggagattcggcgatccgaccccggcgaaggtcacgaccgacataagaaagggaccgtttatcgtggtctccggtcacgacctcgaggatatccatcagctgctcgagcagacgaaggacaagggcgtaaatgtctacactcacggagagatgctcccggcgcacggctatccggagctccgcaagt

SEQ ID NO: 2067 - DNA, 25830 bp, Unknown
  16S sequences of unknown bacteria
ggaactttcgcgggggaaatttatgtacggctcgtctataaagacggcgaatgtttttattacgccgcgatctccgaccgctcgggcaacacctattccatgctgatagacgccgattcgggcgaaattttggcgaccagagaaaactaaaagaaaaaaaggagcgtaaacgctcctttttttcattgctgttgttgcagaaaatcgatgatgacggtattctgcacgtataaatattcttcgcggatacggacgtacccgttctcaaacgcgagatagtttttttgtctttcgagcggcttggaaaaatctttaaagaaatccgagccgaaagccgcggaataatcctccgccgaaagtcccttttccgtgcgcagggcgagcatcacgtattcgaatttcgcatcttctccttcgattttttcattgtccacgacggggtaaaaatcggtcaggatacacttgatgtactcgtccagatcgggcgtattcgtaaaacggcggccgcccataaaggaacttgccgaaacgccgaacccgatatattcgccgcggcgccaataattgagattgtgcctgctttcaaaaccggggaccgcaaaattgctcacctcataacgggcaaagccgcgctctttcagacagcctcgcgccgcgtcgtacatggcggcaacttcgtcgccgtcgggcaattctccattcagatagtcggaatagacgggcgtgccgtcctcgggcgtcagcgcatacacggaaacgtggcgtacgccgccgcgcagcgcaaaatcaatggatccgagcacgtcggaaactgtctgccctttcagcccgatcatgatatccgcgctcttgttcgcgtcgcccagcatttcgcacgtttccagatactgcgccgcgttatgcgcgcgcccgatctcttccaaaagaacgtccgacgaggattgcagtccgatcgaaaaacggttgatccccgcgcgtttatatgcctccgccttttctttcgtgagcgtgccgggattgatctctacggtgatctccgcgtttgcggaaagtttgtataattttcggatctgattcatgcagcccgcgatatatttcccgtcgatgacggaaggcgttcccccgccgatatagacggtatcgaaggacttgtccgacagatctttcgctcgcagtttcatttctttatagacgcaagccatgtacgcgtccgcgaacgccaatttggagggatacgaggtgaaatcgcagtaacggcatttcgatttacaaaacgggatatgaatatagatgcctgccataataccttccttttacccgaacgggtcccacaaatgtttgtcgagcgcgaccgtatattcgtcggaaaacgatacgccctccgccgttaacagattgcgctgaacgtccgcgccgccgaacgcgaacgcgggcgcaagcccgccgaaacggttgaccacgcgatgacagggaattttccccggcaagggattgacgtgcagcgcataccccaccgcgcgcgaagcgcggggattgccgcaaaggcgcgcgatctgaccgtacgtcgccacgcagccgacggggatcttttgcacgatttcatagacctgttgaaaaaaaccgctttccattttttccttcgcaacttatttattggttttgagaatagacataaacacttcggaaggcacttccaccgagccgatgctgcgcatgcgctttttgccctctttctgtttttcgagaagttttttcttgcgggtgatatcgccgccgtagcatttggcgagcacgtctttgcgcaccgccttgaccgtttcgcgggcgatgatcttgccgcccaccgcagcctgaatgggaatctcgaacagttggcgcggaatcgcgtccttgagattttccgccaattccctgccgcgaggataggcgcggtctttatgcacgatcatggagagcgcgtcgcatacgtcgccgttgagcatgatgtccagtttgacgagatcgctccgctcgtaacccgtaatttcataatcgaaactcgcgtatccgcgcgtgcgcgatttgatattatcgaaaaaatcgtaaatgatctcgttgagcggcaatgaatacagaagttttacgcgcttttcgtccagataggtcatgtccttaaagatgccgcgcttttcctggcaaagatccatgatcgaaccgatatattcgggcggactgtatatctccgccttgacgatgggttcttccatgtattcgatatcggaaggatcgggaagatgcgacgggttgtccacgaaaaacgcttcgccgtccgtcttatgcacgagataggaaacgctcggcgcggtcgtgataatttccagattgaactctcgctcgatccgctcctgaatgatctccatgtgcaagagtcccaaaaagccgcagcggaagccgaatccgagcgcgacggaagtatcgggttcgaagatgagcgccgcgtcgttgagttgcaatttcaggagcgcctccttgaggtcgttgaatttgctgccgtccagaggataaatgccgcagaatacgacgggctgcacctttttatatccgggcagaggctgttcggcgggcacgttcgcattcgttaccgtatcgcccacagccacgtcgagaatgctcttgatactcgccgcgatataaccgacttctcctgcctgcaaactctctttcggcgtcagtttgggactgaatacgcccacctccgtcacgtcgaacatcttgtcgcagcggaacgttttgatggtatcgcccaccttcacgcaaccgtccttgacgcgcacgaagagaatgacacccttatagttatcataataactgtcgaatatgagcgctttgagcggcgcttcggtgtcgccgtcgggcgcggggatatgttcgcagatacgctccagaatatcctgtatattggtgccctctttcgcggaaacgagcggcgcgtaggaagcgtccaaaccgatcacgtcctcgatctcgcgtttggtcgcctcgggttcggcggagggaaggtcgattttattgatgacgggaacgatctccagatcgtgttccagcgccagatagacgttggcgagcgtctgcgcctcgatcccctgcgtggcgtccactaccagaatcgcgccctcgcaagcggcgagagagcgcgaaacttcgtaggtgaaatcgacatgcccgggcgtatcgatcagattgaattcgtattcgttcccgtctttcgccgtatagtacatgcgcacgggcgtgagtttgatggtgatgccgcgctcccgttccagatccatggaatcgagcagttgatcttccatgtcgcgctccgacacctgtcccgtaagttccatgatgcggtccgcgatggtactcttgccgtggtctatatgcgcgatgatacaaaaatttctgataaattgattgggctttgccattgatctctccgatttttcgttgctgttaccgtttcattatataaaaaattgaaaaatttagcaaacgaattgcaaaagcattcctctttgtgctaaaataattttatctttttggaggtaaacctatgagaattcccgaaaacagttttttaaggacgacgccgatcgcccaccgcggcctgcacgatataaaaaaaggcatcccggaaaattcctacgccgcttatcaggcggcgatcgacaaaaactacgccatagaaatggacgtgcgtttttcaaaagacggaaaactcgtcgtctttcacgacgacacgctggacaggacgacagaggcgaaaggccccgccatctcgaaaacgagaaacgaactactcgaactgcacttacagggcacgcagcaaaaaattcccgtattcgaggaattcctcgaatttgtcggagggaaagcgccccttctcatcgaactgaaaaacgtacccgagcgaaaagatctcgtaagagcgacgcttgcggcattaaaaaactacaagggcgaatttgcactgcaatcctttcagccgaaatatgtgtaccagatgaaaaagcaagccccgcagatcttacgcgggcaactcgcgacgatccccttaaaagaagagagcatgcccgccgtgcagaaatgggcgctgaaaaacatgcctttccattttttgaccaaacccgactttatcagtttcaatatcgcaaatcttcctttctccaaagcgaggagaaaaaacgctttgctcctcggctggacggcgcgcaccgaagaggaatatctccgcgtcaagcccatgatcgataacgtgatatttgagtatatcacccccgaaaaactatgatttatgctacacatagtactatgcaaatggcttgtttattaaaaaacaaagggcgcgtttgaatacgcgcccttcttctttcctttttaccttattgtaatttttcgatcatgtctacgatgtctttgaccgtcttgacgttcacgatatcgtcttcgggaatggaaataccgtaatcgtcttccaaagagatcaacaactccactacgtcgagcgaatccgcgccgagatcttttacaacgtcgctttccaaagcaatggcttcgggttttaaattcaactgtttcgcgagcatatctcttaccttttcaaacatacacctgtcctcctcgatttattattccattgtactaaaattcgcagcaaaagtcaatgaaacttttatttgtttgccgcttttttctgtttcatcgtcaatccgatacggttctttttcacgtccacgtcctttacccatacggtgaccgtctgcccgacctttaagacctcggaaggatgcctgatatatttatcggtaatttcgctgatatgcacgagaccgtcctgatgcacgccgatatcgacgaacacgccgaaatcaaccacgttgcggaccgtgcccgtaagttccatacccgccatcagatcgttgatatccatgatatctttgcggagttgaggcttgggcagcgcgtcgcggatatcccttccgggttttacgatctctgccacgatatctttgagcgtgggcacgtccagcccaacttccttggcagccttttcctcgccgtacttttttactttttcgggaaggtcggaaatattgcgcgctttgacgtcctcttcactgtaaccgaacagttgcagcaatttttccgccgctttgtaagattcagggtggacggctgtattatcgagaatattttcgccgtcggtgatgcgcaaaaatcccgcacactgggtaaacgccttttcgcccagtttgggaactttcagaatttctttacgggaataaaacctgccgtgctcctcgcggtacgatacgatatttttcgcgatccccgcattcagccccgcaacgtatttcaaaagagaaacgctcgcggtgtttaaatctacacccacgctgttgacgcagtcttccaaaacgcccgccaatacgctgtccaggcgctttttgtccatatcgtgctgatattgccccacgccgatggatttcggatcgatcttgatgagttccgccaacggatcctgcaagcggcgcgcgatggaaaccgcgcttcgttcggaaacgtcgaaatcgggaaattcttccgccgcgagcggactcgcggaatagacgctcgcccccgcctcgctgacgaccatataattgacctctttttccagttcttttaaaagatcggcgacgaaaatttcactttccttggacgccgtaccgttcccgatagagatgacgtccacgtcgtatttattgatcagttctttgagtttctttttcgcctcttcgactttgttctgcggaggcgtgggatagacgaccgtcttatcgagcactttacccgtgccgtcgaccacggcgatcttgcagcccgttctgtacgcgggatcgagtccgagcgttactttatctttgacaggcggctgcatgaggagcggtttcaggttgatctcgaacattttgatcgcctgctcgctcgcactttccgtcagcatagcgcggatctcgcgctcgatggaagggaaaatcaaacgatcgtatccgtcgtctaccgcctccttgacgagttccgtggaataaccgccgtttttcagataagacgcacccgcgatacgtttggcgatctcgtcgtttaaaagaagtttgactttcaaaaacccctctttttcgccgcggttgacagcgagaacgcggtgactcttgatctccgccacaggctcgctgtaatcggcatacatttcgtaggtcttggaatcttctttatccgtattgacgagtttggtagcgatctcgccgttgcgcataaacaaattgcgcaactttttgcgcacgttcgcatcgtcggaaacgatttccgcaatgatatcctttgcgcctgcaagggcggcgtccgtcgtcggcacgcccttatcttcgtctatgtatttttccgcttcggccttcacgtcggcattcggatcctgtgcgagaataaaatccgccaagggttgcagcccgcgctcgatcgcaacgctcgcacgagtctttttcttctgtttataaggacggtagatatcctccacctccgtaagcgtcacggcggcgtccagcgctttttggatttcctccgtcatcttttcctgttccgtgatcgacttggcgacttccgcttttcgctgttcgagattgcgaagatacgtcagcctgtcgttgaattcgcgcaacacctggtcgtcgcaactgccggtcatttcctttctgtaccgtgcaatgaacggaatggtattcccttcgtcgatcaactgaataatgttctgagccctgtcctcgcgtatgggaaattcttccgtcaatttctttaagatgtccatagtaactccgtcgaaaaaatttgttatacgtttgcccttgccaagcaagaacgaatgcaaacccgcccatgcggatttccgtactctattgtatcatacttttacaaacttggcattattttttcaaagttttaagataatttttttgttcgtcggtcagacgataggattcacgcgctttctgaatggctttattcagcgtttttgcaggaagagcgctgctccgcaaaaatttaacaccttcgccgtagcccttgacgaggatctccgcaagcagccacgccactgccatgtgcacgtaatatttggaacagtccgcgcgttccatgaacgcgaattctttttcaaaatattcgggtatcgtataatggtcgagaagacaaacgtacgcgaaacgctgcacatactcccgctcgtcgctaacgcatttttcgatataaaaaagaaactcttcgcgccgctttcgaagactcttcaacgtggaagtgaagcaatcgcagatcgcccagttgtcgatacgcggcacaacgatatccagatattccaaaagttcttcaaaggtcagtttcgcgtatgcgacggcaagacatttgacgaaagtcacctcaaacagatcgtcggggaaacgacaaagaatgtccaattcatctttgccgagcgcagcgtattctttcgatattttccgaagcgcaggaacccgcacgccgagcgtgcgatcaagcgaaagcacgcagatctttgcgttaaattcccgaaacgacacgtcggcgttttcccgcaatttttctaaaagttcttcataagcgatcattttttatttctcctttgtacagttcgtcaagccgttcaaaccaaaccctttcggaataccgcgtattggcgggactggtcgagggcatacaaaaatacggcaccgatacattctgatatttttcaagaaagatacgatacgccgtcgtgccgttcaacaatatcgcccgcagcggacaaagcccgatcaaacgcccgatatccgcgatctcgtagtttcggatcttactgtcggaagaaccctctatctcgcaggaagataccgcgtcccacaaggcgatcttatgttcatataaaaatgaaatttttcccgccgtatccgtcggaatatctttccgaaaatacccgcacagcattttccagaatcggttttgtttgtttccataatagaactcgaccttacggctcttcacggaaggaaaacttcccaaaatcaaaagacggctgtcattcggttgataaacaggttcaaaaccgccgattatgtctgacatagtactatctaaaccctttaaaacaaagaatacagcacctttttaggcgctgtattacatttttatttaatgaagcaggaaaggcttgtctaacttcccgaccgcccccgcagccatcttttcctcgcggaaacttacatcgatggcacgggcgacgtcgtcccgagtgagcgtatcgatggcggaaacgcgggcatcgaagtcgaagatctcatctgtaaagagaagatgtttaccgtacacgagcatctgggaagccgtgctctcctgtcccagaatgagggaagacctcaactgttccctgccgcgcacgagttcctcttcggtaataccgtccttgcaaaggcggctgatctcgccgcgcaccgccgcgaacgccttttccgcactctgcggatttacacccgcgtacacgatcagcgaaccgcattcggtataggcggaaatatacgaatagacggaatacgccaaccccaactgctcgcgcactttctgaaacaggcgcgaactcatgccgccgccgagaacatagttcatcagatttcccgcgtcgagcattttatcgtcgcggcgaaacgagggaaacgcgagcgcgaaatgcacctgttcgatatcttttttcttgaaaaggctctgcgatggatagaaaatttcgggcttgcggtcctctcttttgcgcttggggatcttgctttcgatataggtttccacaagttcttcagcatatttttcgtctatatttcccgcaaaagaaattacgatattttcgggcgcatatcgcttttgaatatattccaaaagattttcgcgggtaaaggacgaaacgtttttcgccggccctaaaatactcctgccgtagccgcgattgccgtaaaacgcctgtgcgagaacatcgaaacacagatcgtcgggcgtgtcttcggtcatggaaatttcctcgagaacaactcctttttcgcgctccatctcgtcttcgggaaagacggaattcaaaaagaaatcggataaaatttcaaaagcctcccccgcatggtccgaggtggatttggaatagtagcaggtgatctccttggaagtaaaggcgttgacctgcgcgccgatacggtccatcgcatcggagatctcaaacgcagtgcgtttatccgtccccttgaacatcatgtgttcgatgaagtgcgatattccgttttcgccgtccgtttcaaaggtcgagccggtgcccacgatgatgcccgtactgaccgaccacagcccctcgatcttcttcacgatgagccttagtccgctgtcgaatttcttgtaatacgtcataatttctccgttatgtataattatttttgccgctaaaccttttccagaccgctgatattttccgatacggtcacggcgtgcagcgaatgttctttatagtattcgagcaccgcgggcaacgccgcggcggtatgtttggtcggatgcatcaaaacgagatcccctcccgacgccttttgcgtggcgcgcgagaagacgagttgttcgtcgtggtcgcgccaatcgatggtatctttcgaccacataatgactttatatcccaattcctttgcgacttctaccgtagtcggcgagtaggcacccgagggcggcgcgaacagtttaatctgcgcgtcggtcaaagcccgcaccagttcgccgcaaagatatatttcctgacggttttccgccgcgttcagtttgtcgtggtctttatgaaagtagccgtgattgcccagttcatgcccgcgggacgcgatctcacgcaaaacctcggtattgtcgtccgcccaggagccgcccacgaaaaaagtcgctttcacgccgtactcatccaacgaatccatgatgtcgagcacgtattcggatccctgatagacgttgaacatcagcgagatcatatcgctgtcggtattcccgttatagtaaacgccgtcgctcttgccgcccgccgtggaaatgcccagcgggatgaaacacaccgcgccgaccgttaatatgatcagcgcgagcgcaacgttggttacgatcgcaagtttgcttttgccgtccaaattagtttacctcattttccgaaatagtttgcaaaaaaaacaaaagttttttctcattcaattatattcggaaaaagacgggattatgaactattcggtttcatgcagcgcgcgtttcaaatcacggaaatatgttttttgctgcaagcgcatatagaaataggcgggcacaatgagaatcttacgtttcggccgaatattttcggtaaaaacggcgagcgtctttcctcccgattcgctcaattcacccgtccagtccccgacgaaattttcattttccatcgaaaaggcatatcgggtaacaggctgaaaatccgtgacaataaaccgcgtttccacgccgcccgtcgaaatttcggtaaatttatttccctgttcaaaaacctcgatgcgggaaatatccgagcgccaggcacaatcgcttaaatcggtaatcactcgccacacctcagaaatgtgactttgaaaaacttctctgcgcttaactttcatttttcctctacttcaatttgacgatggtcacgcccgcctcgccctcgccgtagacgcccgagcgaaactccccgacgtttttatgaccgcgaagatgattgcggatcccctctttgagtttgcccgtaccgacgccgtgtatgatcttgacttcctccaatcccgtcaatacggcgcggtcgataaaggcgtccacttcggcgaccgcctccatgaccgttttaccgagcaggttgatctccaactgcacagccgcgggcgcacttactttgcgcacgacttgcacgttttgttttttatccttgatcggtttcttctcgtatatccgatagagttcttccgcttttaccgtcagacgcatatttccgcaacgcacctccgcgcgttttttcttcgcgtccacggagagaatttcgcccttagactgcatcgcgccgacgtataccgtatcgcccgcccgcagggaagaaagatccgctttttcaaggcggggtttttccgtttcctccgcctcgttcgcatacgcctgatccgccaacttatttttcaacgtgcgcgcgcggatgagatcggcatcggatacgttgcgggaagaggcgagcttttcgatttccgccagcaattcttccgccgtttccgtcttttcgttgatgatgcgccgactctccactttcgcgttgagataaagtttttcgcgctcttttttcagtttttcccgttccgcatccaccgcggacactttttcgctccattcgcgtttcaagcgttccgcctcttgtttttcggcgtcagcctccacgcgagaaagttccgcctgccgcacgatgttttcgaaacgctgcgccccctccgacaaattggcgagcgcagaagacaatatttcctctttgagccccagccgccgcgaaatggcgatggcgttggaacttcccggcagaccgatgctgatccggtacagcggctgcaaggttgtcatgtcgaattccatgctcgcgttttcaatcccgtcggtggaataggcgaattctttgagagatgaataatgcgtggtgatgatgcctttgcatttgaggctcagcaaataggagatcaccgccttggcgatcgcctgcccttcgtcgggatccgtgcctccgcccaattcgtcgataaggacgagggaatttttatccgcattttcggtgatctcgatcacgtttttcacgtgcgacgaaaaagtggaaagattttcttcgatactctgggaatccccgatatcgcaaaaaatattttcaaataccgcaaccgtactcgggcccgaggcgggaataaatatcccgcagcaagccatcaaacagaacagtccgcacattttgagcgtgaccgtcttgccgcccgtattcggtccggaaatcaaaagcaggtcgtacttgtcgcccagagaaacgctgacggggatcgccgtctttgcgtccaataaagggtgcctccccttgacgatatcgatgacgccgcgggcattgagccgaggccgcacgcatttgtttttataggaatattccgctttcgcgtagcagcgatcgagttcggaaaggcggtctatatcttctttcaatttctcgtatattgcgccgacgcgattagatagttgcaacaaaatgcgctcgacttcttccttttcgtcgctcatcagcgtgcgcaactcgttattgagttccagaacatattcgggctcgatgaaaaacgtcgcaccgctctgcgaacggtcgtgcacgaaacccttgatcttgcttttatactcggcgcgcacaggcagaacataacggttgtcacgcatcgtcacgacgccgtcctgcaaatatttggaatccccgcccgtcagatacgcggacagtttggcgcggatcttttcgttgaggctgcggatcgagcggcggatcgtatacagagcgtcgcttgcgtagtcgctcacctcgtcttcggaaactatcttattttggatatcgtcttccagcgccgtgtcgaaataaatcctgtcggcgatctcgcgcatatatacgatcttttcatcgtagacagacgccacgctcttataggcgatgcgcgcggaacgaagcagcgcgcacacgctcagaagttctttacacgagagcgccgaacccttttgcgcgcgctccaattcgtccgtgaaagccccgaaatcttcgatcttgcccacgccgtatcggtacaaaagaagatccgcttccgccgtgagattcaaaagatattccgcctcacactcttctgtctgcggacgaatggaaagcatttcactcttcgttttctgcaaaacggcaaaggaagaaacgctcttcaaaattttattcagttccaatttttccaaaattcgttcgttcatattcacctcatcgcacgcccgatctccacgggttcgcggtatacttacccaatgcgtttttcaacgcgttttcatcgccgcaaaattgaaaatacgctcgttttttcgcggaaggaagcgccgtgaaatcgtataatttcgacggtacgtcttttgcgcataccatgggcgcacagttgtataattcaaatcggcagacgctgttttcatagcgcctgagcgggaattcccgccccgcctcgtccgccagaacatagcagtttttcttgtcgcaattcctgcatgttttggaaaaaagacagtgccccagatccatcgcctttacattgcccccgaaagcatagaacgcgccgcggcaaaacaaattttccgcttctttcaaagaaatttcctttgaaacgcaaaaattctcaacgccctcgctctttaaaacggatatgtcggcacggttgaaaatattgaaacccgtgcccgcaaagacgggcaaatcaagttcttttccgagttctaacccgaacgcgccttcgcagtatagcccttgaaataaaggcgcacaatttcgtatcgcgatcagatcgtcgttcagcgtataagcaggaacatacagcaatatatgcgtgacatagtactttgcataagttatattttgcttgatatcgtcgatatttttgtaattattcggtttcaaaacgaaaatatcgggaggatattcggcataggctttttcatcgaaaaaagtatcgagaacagccgtagaagatttcactcccccttttgtttccccgaccgaaagcggctcgtaatgaattttttgatttttcagttttgtcagcaattcgtacagcgcctgataaaaagcgcggcgaaaagcgtttaactgcgagcggacgacaaacacgttttccccgatattcacagcgccgaaatcaattgaaaaaggataggcgtcggttttggaaaaacaagcgcggacatcattttccgaaagcgaggaactgagcgcaatttgggcacaaaattccgattcgagagaaaaagaagcaaagtccccttttgccgtcacgcgcagtttttcgcctgagcgcgcctcgatatcgatcaggatttttcgtttccgcactccaaaatcctgctcgcagagggaggtatcgctcgtaacgtgcagcgcgtctccctcgcggaaacgttcggaagaagggagataaaacccgttcttttcgcacggaaaattttccgaatagacaaagcccccgacctcgtttttcccgccgcggatgaccttgaagccatcccctttccgaggaacgaacgaggtttcggcaaagagccttttgccccgcgcgcggagcacgccgatcctttccccgagatgattttgcacgtcgcgggaaaggaggtctttcgcctgaccgtacaagtaacccttcgtataatcgccgcgattgaacgcgcgtttcatgcgggaaaaatcctcccgaaggcgcggcgaattttccgacagaacgtctttataataggtcacggcggcgcgcacgtattcgggcgaacgcatacgcccttcgattttaaaggaagatacgcccgcttcgatgagcgcgctcaaattttccgccgcgcacagatcggaaagagagagcgcataggcgtaggaatcgaacccctctcggtcgattttgtacttttggcggcacggctgtttacaggcgccgcggttgccgctgttgccccccgccagggcggacatatagcattggcccgagaaacaggtgcacagcgcgccctgcacgaacacttccgtctcgatcatcgaggcgatctctttcacgtctttcaagggcgtttcccgcgctaaaataacgcgcgaaaagccgtaccgcttggcgagccgcgcgccgaatatattgcagacgcccgcctgcgtggaaaggtgcagcgtgattgcggaatagcgatctttgatcagtttgcccagaaaaatatcctgcatgatgatcgcatccgcgccgctgttatgcgccgcaacgagcgcggaaacaaaagattccatttcgacgtccttgacgagcgtattcatcgccacatagacgcgcacgtgcagcgcatgcgcgtgatcgatatatttttttaaattgtcggggcaaaaattttcggcgctttgacgggcggaaaaactcgataaaccgagatagaccgcgtccgcacccgcgtcgatcgccgcataaaacgacttttcatcccctgccggtgcaaggatttcacacataccgatattgtatcatgtttttcgttttttggaaagagaaagcgcgcaatttttcattgcgcgccgtaagttttgtgttttcagcgtaattccacggacaatttttcggagagcgcccgcaagatccttttgatctgcgcgtccgcgtcttcgggcttgatcgccttgtcggcaggcgtgagagtcagcgagaacgccatactctttttcccttctcctacctgtgcgccgcggtacacgtcgaaaagtttcaccgcagtcacatatttcgaagcctcgaaaatcactttttcgatctcggcgcaggtcagtttttcctcggcgacgagcgccagatcgcgctggacttcggggaatttcggcaactgtttatatttgatcgcgccgccgagcagttcggaaagcgccgcataatccagttcgcccacatatacgttcgtttcgacgacgaggctctccgcaacgtcgggagcgagttctccgagatatccgacggctttgccgttgactaagatctccgcgctctttcccggatgcagataggcgatatcggcgggcgcgtagtcgaatttcagaccgaattcggaggcgatcagttcgaacacgccttttgccgtaaagaaagtttctttctcgccgaacactgccgtacagagcgtcttgtcctctttcgccatttcggtgagcggcaaagattcggcgcggtacacgctcgcaagttcgaagagccgccccgccgtgtttccgcggcgcagattccttacgacggtattgacgagcgacggcgccaacgtcgtacgcatgagactcatatcctcgccgatgggattcttgatttttatggctcgctgcgtctgctccgatattttcagcatggcgtaatctttaggcgatataaaggagtagttgaccgtttccgaatagccttgcgtgcgcaggagatttttgacgcgcaattcgcgcttttgcccgtcgctgtaaccgccgtcggtgaccgacgcgtttttcagaaaagtcgattcgatatgctcgtagccgtacatacggatgacttcttcggcaaggtcgggataatcctcgatgtcctcgcggtatgcgggcgaggtaacatccgcgtcgtcgccctgacagcggacgttgaagttgagccttgtcagaatatcgacgatctcttttttgggaacttcgatgcccaggaccgcgcagatcttgctgagtttggtatgaatggtcagaggttcgggatgcgacgcctcgatatcgtaacggtcgcaggcgatcttgccgcagccgagcgtttggatcaaattgagagcgcggttgatggcgatgcccgtcgtgtaggcgtcgacgcccttttcgtagcgcgcggaagaatcgctcttctgcccgagcgcgcgcgaagttctgcgcacgttgtcgcgcaagaatttggcgcattcgaacagcacttcggcggtgtcgtcgctgatgccgctgttcagtccgcccatgatccccgccaaagccacgggcttcaccccgtcgctgatgaccagattgtcgggcgtgagttcgaattccttttcgtcgagcgtgacgatcttttcgcccgtcgcggcgcgacgcacgacgatcttactccccgtcacgtgcgacagatcgaaggcgtgcatgggctgtccgagttcccaaaggacgaaattcgtaatgtctaccacgttattgatggaatgcagcccgcacagggccaagcgccttttcatccacaggggcgaactttcgattttcagatcgcgcacgtaatgcgcgatatagcgcgggcacagatcgggcgccgcgacttcgaccattacgcgcccgctggtcgcgaacgtttccacgtcgtacgtaagttccacgggtttcaacggctttttgagaacggccgcgacttcgcgcgcgataccgtacacgctctggcagtcgggacggttcgccgtcaccgaaatatcgaaaatataatcgtcgatccccaccacttctttgatatccgtaccgacgggaatatcttcctgcaagatgaggatgccgttcacttccgcgcccgggtaataatcgtcggtaatgccgagttcctcgcccgaacacagcataccgcacgattccacgccgcgcagtttgccttttttgatcttgacgccgccgtgtaaagacgagccgtcgagcgccacgggtaccagatcgcccgccgccacgttatccgcgcccgtcacaatctgaatatcttcgccgtattcgccgcaatcgatcctgcaaattttcaatttgtccgcgtcgggatgtttttccacagatttgatgagtccgaccacgcagcggtcgatctccttgccgacgtatatgagttcttccacctcgaacccgcaggaaaacagtttttcctgcaactcttcggcggaaatatcgatatccacataatcctttaaccaactgaaaggtactttcattttgctcctcctcgtcaatccttgaactgttttaagaaacgcacgtcgttttcaaagagcagacggatgtcgttgatgccgtatttgatcatagcgattcgctcgatgcccatgccgaaagcaaggcccgaatacacgtcgggatcgacgccgcagttttccagcacgcggcggttgacgatgcccgcgcccagaatttcgatccagcccgtgcccttgcagaggcggcagcccttgccgtgacagtcgcagcaggacacgtccacttccacgctcggttcggtgaacgggaaatacgaagggcgaaggcgcgtcttggtttccgaagagaacattttgcgcgcgaattcgtccaacagccctttcagatcgcacagagtgatatttttatcgacgacgagcccctccatctggtggaacatgggcgaatgcgtcgcgtcgctgtccgaacggtacaccctgccggggcttaacaccttgatgggcggcgcttttttctccatgacgcggatctgccccgaagaggtctgcgagcgcagaaggaattcttccgtgataaagaaagtatcctgcatatcgcgcgcggggtgatccgcggggatattcagcgcctgaaaattatagtagtccttttcgatctcggggccttcgaaaatttcaaatcccatgcccgcgaaaatatccacgagttcgcgcctgaccatgctgatgggatgttcggtgccgtaggcggagaacgccgcgggcatcgtgacgtcgatcttttcgctggcgtatttgtcttcgagttccgcctttttcagctcttcctcgcgcgcggcaaacgcctcttccgcccattcgcgcgcgctgttgatcaccttgcccatttcggggcgctcttcgggcggcagatcgcgcatgcccttcaagagcgcggtgatctcgcccgtcttgcccaaaaatttcatcttcaattcaaagagtgattttctgaggctgacggacgcgagcccctcttcgatctgctgtctgatctgctggattttttctttcataaaatctcctccgatataaaaaaagccccgtgactgaaagtcacagggcgtagaaacgctgtaccacctatgttcgcggaaaaaattccgcctcgttgccacttaacgcgtaaggtcacggctcccgttactatgagttcgcggaaacggctcgaaagtgaatactgcacctctccatgagaaaacttttcagccgacgggttttcctctcttgcaaagagccgcggtgcatctgtctttgtctttgccttttttatatatagaaatcatactaaaaaaaagcaaaaatgtcaatcgttttttctgcaattctatcaatcgggcaccaaatcgaagccttccccgaaaatattgccgttgagatagacgtcgggtacttttcccacgatcacgctctccgcgatgagtacctgcgaactcccgcccacctgcacggtgcgcgtcggcaaaatgatgctcacgctcgtctgcacgtccacgaaaatagagtgcagcgtctgattgatgcccgcagaggtaaacttggaagagaacttgcaaaggacgttgccgatgggcacgatctttacgttgacgcgtggccccgtgcccgccaaaatttctattcccgaaaaggcgccgagcgggatccgcacgccgcccgcgctgagttcggacaggtttttctgcgcgacggaggcagtccttctcgcaagcgaattgatctttaaagaatcggaggtgatcgccacgatatcgcccgcattgttgcgttcgatggaaacgagatcttcgtaagaagacgtattttccatcgtctgaaacacggcgtcgttgacagccgtcgtcgtcatcgcctgtacggtcgcctcgctcacggatacgagcacgcggttgacgttcgtttgaaagaacacgattataaagatgagtatcgccaaaagcacgccgagaaatatccaaaggcgttttttactgccctttcgtttatactttctggtatagtattccgacataccctatatatatgcgcacacgatcgaaaacttgccgcaaagagaaaaaagcggcgtttcaggcgccgctctttttttagtattcgcattccctgcaagccttgacgaattctttcagattttcgggatctccgaaaaagaaatgatcggacggactgcaaataaaaccgccgtcgggtttcgccgcaaacagccgtttcacctcttcgcggataaatttccgatttccgcgctcaaatccttcgttctgatcgaacccgccgataaaagcgacggaatccccgatgcgccttgcagcctcttccatacggcaatcgccgcccatggaagagggcgtcatggtttcaagcgcgtccgccccgttttgcctgacgagttccaaaagaggcatcactccgccgcaaagatgatagacgacaagcgttccctggcggtgcagcgcctcgtgacgtattctgtcgtaaggaagacaaaactcttcgtgcatggcgggactgatgacggtactcgatgccgcgcccccgccgttttcaacgaggtcggcggggatcttacccatgttttcaatcgacgcgaccgccttatcgctgatcgttttcagcgcgtaatgcacccaatcgggttcatccatcgccttatatatagtgttttccgtaccgatcagacaggtaaggctctgccaggtaccaggctgaccgtatgcgtggcaccacgtacgcacgatccctttatcgcctatcttatttttcgcctcgatgatcgggctccaatcggcagaaacgggaacggggtaaaattctttgaacagttcgaaatcgtcctcgtttttgatcatagattcggtttcccacgaggtgaaacgattgcgcgcgcccttgattgtcagatcgcccttgggggtatgatatatttgaatgaaagattctacgccgtccttatcttttccgagcgaccgatattcatacgcccagtttttaagagatttttcgtcgaagatcaaatgcggaaaggcatagatcacgggatccattccgaaataatcgtatgcctgataagaatccatgccgtttaagtaagtatcgagatagtacgtcatccaactgtgcacctgacagggaagccgatcgggcttttgatttttcaaagccgttaaaaagcgctctcgtccgttcataaaaactcctttttcctgctgttaaaaagtaaacagacgggaagatacgatatttccgttttcgtcggtgatttcgacaaacccgaacacggcggtctgcggcacggctgtgcgcaaagtatcgccgtctatggcgacactctctcgctcccatacgttcatggcgtcgtgccagtattcgagcggataggaagaccaataaaaatccgcttttgccgccccaacgttttccacgcgcaggcttatcccgccgctttggacttcgccctcgctcacccgcaaaagccctttttccgactttgtcatttcgtcggcaaatacgaatatttcgtgaagtccgctgccgtcgccgggctgttgtccgtgcgtcagtttccctcgccaggaataagtattgcggccttggttcaaatcggcgcatttctgattacaagccagcgaaaacgcgtggtcgttcgcacccgcgagccagaacataggtattttgcaatgtttcatatacacggaaggatcgaaccgctcgcggtaaatcgcgagcgattcgtcgtccatctgaaagacgcccgccagttcgcccgtcacgtcctcgtgattataccctgccccgtaaacgggaatgccgaatttaaagcgcgtatccacgccgaccgtaatgcaggtgagatacgatccccaggaaatacctgtgatgcccacgttagttttatccacggaatccatggaacgcagaatattatggcacgcaatgatattcgccacgctgatatattcccaggaatttgcgggatttttcatatccgcgggcgtaatggagatacgcggaccgccgcgttcgttcaaagaggctttgtttgcgctgtcggtcatgttcgcgtcgacggacagcgcgatggcaacgtagccgcggtccgtccaaagttttacccaatcaccgtacgcctgcccaagtccgccgtgcacaagcaccatcgcgggatagccgtttgtcggcttttccgtttccggaacaccgacaaacgcgaatattttcgttgcttccccgttatattccgcgccttcgaaatagatgcccttgatattttcatttcccgcataggtatatcctgcatcctccgtttcgggcgtctgcttttccaacgcctcgaaatcccataaagaatccgattcggacgtttttccgccgcaaccggcaaaaccaatactgcacaacatgatcatcgctatcaaaaaaaccagttttttcattttcattaccgtacctttttgcggacgattgcgacagccgcgcaaaccagtacgacgagggaaagcgcgctgcccgcatatattgcgcttccgcagcctttattctcctccgcctcggcaaaagccgcataatctttttccgccttttcaagtacggaaagattggtgactttcgcttttgccgcgccgtcgagcgcgtcgtatgaggttctcgccgcgtcgatcttcgccttgcattctttcgtgtccgtaatctcgccgatcgcgttgatctgatcaattaccgcctgcgccgcggcagaagccgccgcatcctcatcgaatgcctttacgctgttttccaacgcctctacgagcgcgtaatttttaacgagcgccttctgcgcgtcggtcagtttttcgtaatccgcctttaaactttccactgcttcaatcgcggcagagcggttttcctcatcgatcgttgcgaaaaattcggtcttgctcttcgcgtttttatcaaaagcggatgccttggcgaaatctatttgttcctgttcgaaagcggcgatcatttcttcgaaccgcgcgatcttcgcaaagttagttaccgcttctttttccgcatcggtcagcacttcgtacgcgtctttgaccgactgtaccgcggctttggcagccgctttattggaacttgtgatcgtttcaaaatcggtgaacaatttttcgatggcgttggaaacaaactgtgcggggtcgtatgcgttaagcgcttctccgtaagccaggaactgttcgcggttcgcaatgtgttcccgatactcggctgcgagcgcatcgtatttttcccgcaacgccgcataatttgcacgcaaggtttcaatattggtcggcagcgggtcttgcgcgatgagcgcggatatctcctctgtcagcgattttgccgttttacagcccgcgatatcggcgcgtatcgcgtcggcatcggcgtcgaacgtatcgtaaagagccttttgcgcagcggaaaacttttcccattgagtgaaaagcgcggcgaatttcgtttccgtttccgcaacgttttcgacggtgacgtttttcaaactttcaagagaagatctcatatacgctgcggcaagggcgtcgacagcggcaagtttcgaagcgtccagcgtcgcgctcatttccgcatatttcgccgcttcgtgcgttcgaagatctttggagagcgcgtcgatagactgcttttcggcattgtaagcggatatctcgttgaacgtaagactttcttttacggaaagagattccgtcagttttttgtaactgtcaaactgcgcatagagcgagttgacgttgcggaaatattcgtctttaatcgtcttcacggtcagttccatgtcctgtccgccgttaaatgaagtcattccttcgcccgtcgtaaagttcagtacgagtttcgacgtgtcgacgtttccgtcgtccgtacggaagagatatccgaggtattgcgcagacaatccgacggaaaccgtatttccgccttcgagcgcgagcgttaaggaaacgccctcttccgctttttgcagtttcaaagtaatatttttgccgagaacgccggagggattggacaaaataccgaatccgccccattcgtccagaccttcgaaccctggatgatcgggtgcagtgttcttattgggatatacgccgcccttggtttcggtcagcgcaacgcctatcgtgttgccgccgccgaatcccattctgaacatgatgctcagtccgggatcggtctcttcgccgaaaggaagagcagagcgctcggatacgaaattcacggcaaaacggccgctttccgcaattttatcgacggaaaaagtcatctcgaaatcggaaagatccacggcgtagtcgctccacgttccctccgcgatatccgtgccgtagacgagacgcagagccgtgtcgtcagaaaggatcagttttgtactgccgtcgtccgcacgcagcgccgccgcataactcttggatatcgtcttttcgtcctcttctccgcgtacgccccattcattggtgaagtaacttcccgcggtagaataatacagatccttcatttccgcaagagaggaatccgcccactcttgcaaagcatcgtaatttccgaccagcgcgcgcacgaacgcggagagcgcgtcgtactgtttgacgaccgcccgatattcgtcgagcgccgcataataattctcgcgtttgatctcaccgcccgcatattttgcggtaagttcggaaattttcgtttcaacggctttctgtcccatatcttcctgcgcgagcacagcgcggatatgttccgcggccgcggcgtattcgctcaactgatcggaaaattccgcatagaaggcaaaaacggcgatcgcatcctctttatcggtaatcccgctctccgcgtcgtaatttgcaaacaccttatctttgacggcaagcgacgcctccgcaaacccttccgtggagagcgcaaccgcctgctgatattcgtatgcgtcgtttttgcgcaagccgttcgcattcatgccctcaaagttcattttcgcggaatagaaatccttgacctgctgcgcggtcgtcgcgtttttggaaaaatttgcgactgcctcggcgtacttttgcgtgtacgcgatcgaatttttgtatttccctccgtacgtctgataataagcgtcgtttttggcgtcggaaatgtctttgacattcaatttcaatgtatcgttgccgccgttgttggatatgccgaactgcgcatttttgtaatcgaagggcgttcccccttccgcgggtagttccgccaaggggatctgcgcgcggaaatcgtacgccgtttccgcattgacgtcatcgcgcacccaatcggcgtgcacgttcaaaacgtcgccttcggtgaaaatgtggattttcagttctttccccagataagaagtgcggggagaagcgttgttgtagaccagatattgattgccctcgtaggctttgttaataaacgcactgttcatcgaataggtatgcacgacggggacgaacccggtattgttgcttccgtcgtccgtaagccgaagcgaaaatccctgcccggctccctgcatgggataggatccgttcgcaacgtaactgacgaaatagatctccgcgcccacgcctgcggccaactcgtcgacggaaagcgagatcgtcgcatcggtcaaatccataaaatacgcgttttcggctccgccgctcgtgtagtcgccgtaaaacaggcgtgcgttgccgccgccgtaattttgcgtcacggaaaaacttccgtcctcgtttttcacgactgtgctgcaatcgggcgtatacggattgttataaaacggcgcgcgagggtcgacgctctctgcggcgaaggcttgcgcggtgaatccccaaagacacaacgccatgacgacagccaagagagccgccagcataagcctgacctttttttgaatcattttctttcctccttatgttttgtttcagagggcgaaaagccctctgaaacatttat

SEQ ID NO: 2068 - DNA, 32759 bp, Unknown
  16S sequences of unknown bacteria
agggtttttctctttttttaccccaaaaatcgcaacttcactttggcaatttaggttaggatcgatattattatacagcgttcgctgtcccataaacgggactaccgcatatgtttcgcgcgatttttcacctgaattgcgccgaaatagcttccaagctctcactttcggacattattcgacgtgtgctacatatattatacattattttcgcacgtcagtcaacaaaaatatgatcaatcttgcgtttatttcgattttcacataaaaaagcggagcaaaggctccgctttttcgtattcaaatgaaccacactgttccgagagtgaaatgcgcggtcggtacacccccgcgcctcttctttcaaaattcagccgcggcagcgatcatctctcttcttccgtatcaaaaacgccgcggtaagcgcaatcaggcaaaagaccgcgaccgccgcacaagcgaaaagactctgcgtaggtgagtggttttccgcggtcggattcgacgtcccgctttcgtattcttccgcttccgtgtcgtcggcagcagacaaggtgccctcgtcgttcacctcagagccgaacacgggtattatcggcgaagtctctccggcattcgccgagatcgagtaaagcgggctcataccgcggcggaatctgacgatcgagcacagcgcgcagagcgcctgagcgcttgccacggaatcggattcgtttccgttttccccggaaatgtgggcaaacgctccgtcggcagtgcggtatttcataattccgtcgagaacgctgttcccgtttttcacaaagcgtgcgtcattttccggatcgatcccgagggtgcagagcgcaacggcgacctgcgccgtgctttcgagattttcctgaccccaagatgcaaaatctccgccgtccttctgcactcccgacaaaaactcaaccgcgctgttcaatgcgcggaggacatcttccctgtccgtatacgggcttagcgccgttatcgccatcgccgttatgtcaacatccggagtctccccgataagtcggaatcccccgttttcaagctgaccttcaagcacggcgtttatcatatcctcccgcgtgtcgtctgcatcgtccggcaccacgcccgacaccgaatcaagcgcgatcagcgcccatatataagcgtttatcccctgtacgccgagatcggcggtgcgggagcggaaatacgttccgtccgcaatgaggttgatcgcgtttccgtccgcgtcggtgccgaagcttgtcggatcgccgccgagagatgcgaccgcaagagatatccgatgccactccgtcgctttctgcgcattcagcttgccgggggtactgtagcgcacctcaacatttgatctgagagcggaaagatacgccgtgtaatcgtcggcaagtccgaatcttcccacggcgacagcgtaccaatccgccccggaatttcccgccgccgaaagaaaatctccgcggaataggtatccgttttcactctcgccggaggctgcccgtcgccacgcgagagtttcttcgaccgcctttttgatatcagcatcggtataggcgacgtccgcacgacatatcggaatgagctgcaaaagaagcagaaaagccgccgaaagcgcgattatcttcgtttgatatttcttcacagtgcttcaccctccgtcgccgtccgttctccctgatgaatatgttttttttctctcattgaagaaagctttgaataaatcgcacaaagcgcgagaacaagcagattcaccataacgatgcttgcgcccgccggagcagagaaagcgtatgaaaccgttattcccgcagtgcagcaagccacggaaatgatcgcggatgcgcagacgaccgaacgaaagcttcggcatatcctcatggcggagagcggcggaagcacgataagcgccgtaataagcattgtgccgattatcttcattccgagaacgaccgtgatcgcgcaaagaagtgcgatcagcattttatagagcccgacacgcattcccgacgatttcgcaaagtcctcgtcaaaggtaagcgcgaacatcttattatacgaaaggacaaaaagtgcgaccgttatcaggctcattatcacataaatcggcacatagcttccgacaagtgcgcttatactgccgaacatatagttgaaaacatctgtatttatcccggtagtaagcgaaacgaccatcacgccgaaggcgaatgctgcggtcgatatcaccgctatcgcgctgtccccgtttattcggctgctttcggaaaggcgcaggagaaagaaagcggcgataatcacaacggggatagtaaaaacgagaggattcgctccgagaaaccgcaggaaagcgctccccgacgaggaaaacaccgccgccgtcgagagcgccccgaagccgacgtgggaaagtccgtctccgatcatggaataccttttcaaaacgaggcttacgccgagaagcgccgagcagagcgaaacaagagctccgacaaggaaagccctctgcatgaacggatacgacagcattgccgcaatataacctgtcatcgatgtctccttaaagaaatatccgcacggcacggagattttccccgaaccgcacggatacattttcaccgcatcttccgaaataacgtcggatgcggaaaatttcaaaccgcgcacggcatcgattccgccgcgcacgactatccgcaaatatgagagttactctcatatttattatacacgataatcggaatttgtcaatgttttttcattttctgccgaaaatcagctgaacgtaacgaactcttcttcgggagccttggcaaggctgaaatcggtaacgtaaagcacgggaccctctcccttgtatgccttgttgtgctcgatctttatctgagccgttacgatcgcccacattcccgtggtaagcgctcccgccttcttccaaacgcagagcagtcccgcaaactgcacatcctcggcgcagcaggtcatgacatggcgtcccgcaaggaacgttcccttcggcagcgatttatcgactccgatgaacgccttgaattttaccgtctttccgtcgtacttcggaagatcatccaaaaggtcggaaaaccaaagcgcataatcactgtccccgatctcgataacgggagcatctatgtcaaaaggaagcggatcgactatatcgtcgggctcgaccctgtcttcgccgtaatcgtacagtatgtcggttatgcgtccgacactgcgcacaatcttgtgaagctccgctttgtccgtgccgtcagtcatgcggttaaacattacggcgtcgcaggttttgagcttatcaacgacaaggcttctcatgttcgcattgtatgacggataagtctgagaatctgcaaacgtgatctcctgaaccgccgcccaatcattggggaaggctctgaaaagatcgtcaatctgccacattccgttgtactcaatgataacgcgcttggcaccgcatctcttgcgcgcggcttcaagccgatccggagtaagacggtcgatactttcaacatccatccgcgttacgcagtcatttgcgaacgccgagaagtcgtaatcctcttccccctcttcgcagacaacaagcaaggtgggagctccgttattgaagcgctcatcctcaagcgatccctgtataaaggttgttttcccggaatcgaggaatccggtaaaaatgaataccgggatatcagttctctccatatgttacaccccgaaagcctgagcaagcttttcctcgttgagcgaggagccgatcacgcacagcttgcccgtaacatcggcagcacccgtgcgtacatccgcctcgccgggaacatagtcaaagtatatccactcgccgtccgtaccctctacgatacccttcgcacgaaggatcgctccgaaatcattcgtttcggtaaaaccgtcgaggatcgcctttatctcatcggaagaatacttcttcgcggtattcacgccccagcttgtgaacacctcgtccgcatgatgatggtggtgatgaccgtggccgtgcccacagcagcagtcgtggtcgtgatgatgttcgtgctcatcgtgatcataatcgtcgtcatggtcatggtcgtgatggcagtgatcatgatcgtggtcatgatgttcatgctcgtcgtgatcgtgatcttcatcatggtcgtggccgcaacagtgatcgtgatcatgatgatgctcgtcctcgccgtgatgatgtccgcactcggggcatatttcctcctccgaaaggagctcctccgcaaaatgatcgccgttctccatggcctcgaggatcttctttccgtcgagcttgtcccacggggtcgtaacaacgatagcctttccgttatgctcacggataagcgaaagcgcagtgtcgagcttttcgggagcgatcgtggaagttctgctgagaattatcgctccggcgttctcgatctggttgtcgtagaattcaccgaagtttttcatatagatgcggcacttggtcgcatctgccacgacagtccgtgaattgatgcggacgctgtcggactcaagcggcagaaccgcacggactacgtcgctgagctttccgactcccgaaggctcgatcacgattctgtccggaccgtactccttgagaacttttttgagagcttcgctgaaatctcccacaaggctgcagcagatgcagccggagttcatctccgtaacctcaatcccggcatccttcataaatccgccgtcgataccgatctcaccgaattcgttttcgatgagcactaccttttcgccggcatatgcctcgccgacaagcttcttgataagtgtcgtctttcctgctccgagaaatccggagataatatcgatttttgtcatttaatacgccttcttttttattttgtaatagtgacacgtcccgcaaccggtactgcaaaccggttaagcgttccgttatcggtaattttgactgtgctgtccgaaaggacatctccggtacagctttcgacctttgcgcggtattcgcccgcggggaaatccacggtgatgccatcgcatcccgaaccgttcacgaaaaccgtctcgccgtgatcggattcgggatatttcattatgatattattcgcaaaagaaaccgcaatataacagccgtcgtcctcggcggatgcctgagaatagagaagctccggattttcagcgtggaatttgccgaacagaagcgtcgaacggtgagccttccaaaattcaagccagcttttcatcatcacattgtgagactcgggaagaaggtacggtcttaccgagatctgcggaaccgcgaacatcgttgaaacgagctgaagcgcagctgcctctgcggtatccgcaggattccacgtcagcatatcagcatgtgcaggtgagcttccgagggtaagtctgagatcgatcgtgcggaccttattcgcaagagtgtcgtttgcgcagtccgccgcgcggaacatattgccgtacttatgcatgagcggtcctatgtatgcctgcctgaactctatgcagatattcggcttcagcgcgataagacgggattttatatcggtcatgaggcggtcaaccgcatcaggcaccgaaacgaaatcctttccgggtgcggcgtcgggattctccgtgcccggctggcggaagctgtcgataaagtcaagcttgaagccgtcgagattccactccttcaccgcgttctcataagtcgaaatgagatattcgcgcacatccgaataacgcgggtcaaatattgcggtatcgccgccgtcgcttaaatatttgcccttgaatctctcatacgcgaggctgtcgtgtccgacgaacggaacgctgtaccaaaggaaatacttcattcccatgtcatggacgcgcttcacatgctcgcgcatatcggggattttctttttgcagacttcccaatctccgcagaatctgtacgaacgtgcgctgtcctccatctgccatccgtcgtcaactatgacggatgagaagccgagcggctcgcacgatgcgagaaccttttcgatctcctctgcatccaccatctggtggaagctgtaccatgtcgaataaacggggcttatgcactcgtcgggcacgcccatgggcgtgtactcgggcatcgactcccaccactttaccacatcggagatcgcgtcctcatagcgcacgtcgcgcatatctatgcggacatcggcgctgtagctgcggagagaagcaatatccgcgtcgaagaatacgatttcgcagagatatcttgaatcctcctcacggagcgcggttctgtattttatgacatttaccgcatcggagcaggcaaaggtctgacggcttttccccgacgaggaaaacataaccgaaagaggtgccgacgcagttgcacttgaggcatcgtgtccgctccagacgcacggtatctgacggttcacgccggacgagggagtccatatgccctgcacatcgacgtgcggaatctcccaataaagtgttatcttcggtggaacgatctccgacgcactctcgaaggcgaggtgcaccgtgtcgataccgccgtcgctcacgatgtcagcacggatatcgtaagccccgtcggctgcgctgattttatagtcattctgaccgtgtaaaagcttttccatctcaaatttatccttttcttactctgatcttgaaaatcagttttttcacattgtccgacttccattttacgccgggtcggtgaacatcgtccggctcaaatatcgcaaaggctcccgccgtgaggtaaagcgacgcgaaagatcccgttgttcttccgcctccggcgcagtctgcttcggtgctgtactccgcctgatctgcggtttcgccaagcgggatccaatctatctcttcgtcgcccgatacgacatactgcagatcggaatattccctgtgcgcttcgaatcctcccgcctctccgggcgcgtacgccactacgtttacgaaaacatttccgtttatttcgtatcttcccggcgcaagcgtttccggatcgttctcaagcagaaaagcgcgcaccgcgccgagctccggctcatacgattcatattttccgagattctctattctgtcggcaatcacttatctatcctccgtaaatcaaaaatcaaactccgtataatccatgcccgacacgatataatgcgcgcaaagctctattccgtgtccgcgcagcctttcggaaagggtgcggcttatcaccctgtcctcggcggacgggatcattcttccgtcgctgtggttgtgggctattatcatcttcggaaagcccgacgaaagtgcagattcctccgcggcgagcgtcacggactgcggcttcagctctattcccgaattcacggtaaatactttttttagaaacatctcgctgtcaagcgcaagaaggcatgaggtctgccgcggctttcccgaaaaccaatgaacaagatattctccgattctttccctttcggtaaacggtcgttcggaaagcgcatcgagcatacagcgtctgcccgtttcgcggacaagcgcgagatattcggcgctcgatttcccaatcccttccactgtctgcaattcctccacggaagccgagaaaactcccgaaagagacccgaatttcgaaataagcctgtgtgctgccggattcgtatcgcgtctcgggatcgcataaaacaggagaagctcgagaacgttatggtcttcaaatgaatcaagcccgttttcctcatagcgttttctcaggcggctgcggtgatctttatgaagctgctcttttttctcctccatacgctcctccgaaatgtcattataatatcgtaacatattacgcccgccctgtcaatttcatcggcgaaaaaattttcaaattcacatattttacatctatctgttgataaatcgaaaataatatgatatcatcatatctaccgaaataaataataaaagaggtctgatatgtcaatacctgttcctgagaaaagaatagccgaattcgaaaaccgaggcttcggaatgttcatccactgggggctttattcccagctcgcacgcggagagtgggcgatggatcttctccatatccctaaagacgaatacgagaagcttgccgacaccttcaccgctgaaaacttcgatgcccgcaagatcgccgcactcgcaaagcgcgccgggatgaagtacatcactctcaccacgcgccatcacgacggcttctccctttacgatacctgcggactgtccgactacgacgctccccactccgccgcgggacgcgaccttataaaggaattcgtcgaggcatgccgtgccgaggacatccttccgatgttctatcacacgacccttgattggcacgttgattccttcaacaacgatttccccgcatatcttcagtatctgcgcgattccgtagagatcctctgctcaaattacggcaagatcggcggactgtggttcgacggaaactggagcaagcaggacgcggattgggaggaagacaagctttacgaggtgatccgccgccatcagcccgatgcgataatcgtaaacaatacggggctgaacgcgcagggacacgccggaaacatcgagcttgacagcgtgaccttcgagcagggacgccccgagccgatgaaccgcgagggcatgccgaaatatctcgccgccgagatgtgccaaacgatgaacgatcattggggctgcggcggagacgatttcaactacaaatccctgcccgagcttatagaaacgctctgcgcctgccgcaaggtcggtgcgaactaccttctcaacgtcggccccgacggaagcggtgcgataacgcagatgcaggaggctctcctctgcggaatcggcagctggatcggatgcaccggagatgctttctacgaagcgaagccatgcggtgtccacggtgtcggcaaggatttcatgcttcgccgcggcgaccgctgctacgcttacatacacggtcttactatccagggcgatgcaagcgttaccgtcgaaaaggcgaataccggctggaagaacttcaacggtgtcgatgcaaagataaagagcgtccgctggaccgacaacggcgaagagctccgctttgagcaggacggctccgacgcgcgcatcttcgcaaccggatttccctacggcacaagccttgtcgtgcgtgttgccgagatcgagacctgctgaagcacgatcaatattaaacgccgttcggaacaaaggctgtttccggacggcgttttttcattttaacggatttcggaaaccgtcagtcgattattccgaagccgcgcagcttttcaaaaaattccgctgtatctgaccgtgcggtatcctcgtcgatgtcgtattcccgaagcaccgccgacaccgcctcttcctcgctcccgagctccggaagcatatcccagatgaaggctccgagctcgttcagaatgaacagcccgttattctccataaccgtctttccgacgggaacaagcacggtgtctccggcgatatccctttttatgagttccttttttatttccatcgatcatctctcccaatctgtattttcgtgtatgtccgcgacggtcagccgatatatctcgtcggtcatgcggcaaacgtattccggaacggcgtcgaagctgcccttctcggacatgcataccgccgcgcacacgctgcacatctcctttttcggacatgacgagcattttgcgggcagtcgtatcgccgcagtcgaccgccgaatcgtatcccacgccttatcaaagccttcgctgagcacgtcaaccgaaggatacggaaacattccgcacggaagcattttgccgtcccacgtcagccagaagctcgtgcttccggcgcggcacagcacgccctcggcggagggatcgacgggacagtcctcacggatcgagactccctttttcatgttttcggcacgctttgcgaattcctcatccgtaagacgcagcctgtcgtactcgacaaagcactctgccgcctcctcggggctcatgcgctcaccgccgttaccttctatgcggatcggcggatacatatacgatgacattttcacatgcacgtcgatatcgcgcgaaatgcgaaatatccgttcgaggtctccgcgattgtacggcgtgatcgacacgttcagccttacgtcgataccgcgccgctttatctcgcggatattctccgtcacccgctcaaatgcggaatttccgcacatacggcagtaggtgtcctcgctcccgccgtaaagcgttatattaattctgcacggcggatcctcggcgaggcggtcgagaatctctccgctgatcagcgaaccgtttgagtttatcgagatcagcagtccgagccttttcataccgtcgtatatctcgaaaaagtcacggcgtacaaacggctcgccgcctgtcagaagcgcgaatatcattcctcggtcgcgcgccttctccgcaattgaaagaagctgcgaagtgctcagctcacccgacaaatccgcgtccgggtgatggacgtagcacatcgggcagttgaaattgcagcgcgatgtgatttcgaaattccccgcgatcggcaggccgagttttctcccttttgaatgaaaatacgttgcggaatacggttccgatccgggcatatcgttttttcctttctccaaagccgcatgtttcggctcatatattctctcggattaagaggcggtgtcagtcaagcgtaaaagcggcggcatccttctgttaagcgacatcaccctgtctgctaagcgcgtcacctgcaaacgccgacaacgcggtcagcgtgctccgtacaactcgcagtaaagcgcatcgaccgccttttcgtccggcgtacacctcagtctgtatacgggcgtttgcgcggcgatcgcctccgctgtcgaataggctttttcaagctccgcgcggttccatgtgttgacgcagcagccctcccatatacggcagaaggcttgtgcgccccttatccgctcgagcgtgacggtcggcgcctgttcgagataaactatcgctctgagcgggagatttacgttcttgcttatccccgagcttcccgaaaacggaagtgagcacacgcgcgagatgccgcccatgctttttatcatcgaacggtcgccgtttatcacgtcggcttcgcgccatttccgccaaagctccgcctgtgtggactttccggtgcccgacggcgcggtgaacagtattccctcgtttcggaatccgatatacgccgaatggaatatgattccgcccgcgttcactgcaagccgctccgccgagacggaattcaggatgagggacggcgaaagtttggagcagaatgacgactttacggtgacgcgaaccgtacttccttctttgcgggtgcagatatacgctccgtcgagcgagttcgcgaccgcgcctatgtaacgcaccgtgttctcgccctcgccgaattccgcgatatccgggcgtgacaccgtcggcgtgccgcacggatcgggaaggctgtccgatatttcatactcataccgaacgacaccgccgctcaccgacgcgagcgcgaacggtgcaagcacgccgtcgtctccgtacatgattttttcatctgcggcaatacacacggcagtgtccgcaacagtgtaatacttttcgataatcactcagccgatccccgcaaaaaccgcttcggtcgcgccggaggtgcagtgcggtgccgaaaccgacacgcttttacccgcatctataccgacatcagccgataccctgtacgttattccgccgtaaaacatgtcgccgcggacgtttttgtaatacagaacgaccgttgcgtcgaggcgttcgcccgacacgttttttatgtgtatctcaccgtcggcgcagctcagctcgatccgatcgggattaagcgtcggctcggttgtgaaaaacgcactctgcgtcatatgcgcgccgtccgcagcgatgccgtcggtgtattttgcgcgcgaggcttcaagcagcagcgccgttctgcccggtgcaagtgtggtcacggtgaactgcgcgccgtccgcgccgggaaggacgagcgttccgtattggagcgttctttcggcagtgttcttcacggtcacggcaaggattccctcaagcttatcgtcgcttccgtcctcgacaaacgcgccgtcaaccgaagtgatcccggtaaggacgatcccgtccccgagatcgacggaaagcgcgggcgcgtcgtccccgtttccgccgttctcaccgctgtccggagttttcgtgctgtcggaggtatcggacgaatccccggagggtgcgggtgttttcgaaccgtcggtgctgccccgcgtgatgtccgcataatccgcagaatcggcggacgagtcggtctgcgaaatgccgcccgtgccgatttgcgaatccggcgcggaggtgccttctctcccggcgaaaagcgaaataatctccgtgatcataataagcgcagcagccgccgacacggcaattgcaatcctcaaacgggggctgatattcttttggtttccgtctttcatctcggtcctccgcattgttaagtatctgcagccgcccccggcggtcattctttcaattaacaaactgtccgcaaaccttgatttgcggacagtttatcagattttaggaattgaagagcttattatcctctgtcggaacatggtagcagtactcatcgctctcggtgaacttcacctcgcatcccgcgatattatcgagaaatgccttgcctacaccggggagctcaagcccgcagactccgtttacatgggtatcgatttttttaccgcatcctgcggcgatgctggtcgtaagcgtaaagctgtcaaacatgatttcgggttttgagtatatctttttcataaaaacacgtccttccttatctgaaccaacgatcggagagtttcttgaaaatatcctcaaggataccggaaatctcgattttttcggttacggttacggtttcggtgatcgcttcggatgcaattccgtctgcgtttaccgcaacaatatcaagcctgagttcgccgaccttcgatgccttaacatcagccgtccaagccaaacggtctccgcgcacggtaagcatcctgcgcattgcgattccgttgacggttactgccgcgacgtccgcggaggtcttgaccgtgacggtcacatatccgccttctcttacgctgcttctgtttacactgactgccatgtactcgggcgtaaacacttcgggagcgttaagaattgcgttaagcttagccactgccttatcggcaattgctctgttcacggcaaagagagcccgtgtcgaagcaccgttcggatcgctcttatacgtcgtctttatgttcgtgatcgagagaatcgcatcgtcggatcccgtattcgtcacgatcacatgtccgctcgtcgggatcgcgtaatagagatcggtcgaagaagttatcgtgcgagttacaatctgtccggttgctgcatcgggcattgaaacggtaactcccctgccgtttgcactgctaagtgcaagctcgatcttgcttacgttatcgtcagcgtttacgtaaaacgcgatcgcatgaccctttgcgaggtaaagctcgttattcggtccgtatatattgtaattgtcaatatctccgtttgcactgtcaccgtcgatgaagatgacgccgggagtatccttatcagactcgattttaccggcactgatcaccagattgcggagttcctcaaacttaggccagccttcgccgtcctgagcgtagtagctgtttccggtgtcaccgagcggattgtaaatgcgaaccgcgtcgatgtagagctcatagttacctctattctgatgatcaaagaaagaattgtaggttgccgtaatctcgacggtgtactcaccgtacggaagattatcgaccttgactcccggaatctgatgcagtgcaccgacggcatcgaaatcaacaatccactttccggtttcatcctttgtatgtccgtagtaggtatctacgagaatgtttctcgaataaccgttagcattggtgatcgaaacaacaagtgttccggtcgtcgatcccgtaaggtttatgagatcaaagcccgtgcccttgaagctgaatgttgcggttgcgtactcgccggttgtgagcgtaaccttatgcacgccgccgttcgagtacgtgctgctgttgttcgcataagcatcgtcgtagccgtaaacggtacttgtattgccgagcttccgaaccgcctgaacagccgcgacgtcgtctgcgcctaatttctcccatttttcatcgaatgtgataaagctgtcattatcctcgtagtaaacgatcgacgcggggataatcgagatcttaaatccggcggtgccggtttgcccgtttctttttcctgttatatttaccgtaagtatttcgatttcgtcaagcatttcggtaagggtataggtaaatgtcttggcagagatatcgaaggtgcttttgccatgcacggcaccttttatcgcaatatcggtaacctcaacatctgacagactctgattaatatctgtcagagaaaccgtaagaggcaatccaaagtcgataacaaacgttgcttcgttgtcaaacgtgtagtaaaggaatacctcttttcccgtactgtcgcgatttacctctacaagcttaaaggttgtatatctgtactgcgccgcaatctccggaatacccttaagatcgccgtttacggtctgagtttttccgttaatgtttgttacggtattgtttattaagccataatctgcaggattatcgttcgcctttgcaaaccccgcatcaaacacggtgcccgagcttacggaaatgttatagccgtaaaattcagtctccgtattgccgctgcgctcaatgtagtgaaccgcaagcgaatcgggggttgctttcgcacggacataataggtgacaagcagaccctgatactgataaatctttacactttcaaggaaaggctctccgccgtacgttatgccggacaccttagcaagctcggaattttccgcatcgttttccgtctttgcccacgcgatcttctcggtgccgccgtaggtgtagctgctcggaacagaaccttgggtaatatacgtcgtgtgactgtcgctgctcggagtaacggttatcatgtagacttcgtattcggaagtctcaacaccggcaattccgtaaacagtgcggtagtatgtaccgtcggtatcctctacgatataaccgttgccgagaggaacgctctgatcggtcgggcagtcaaagcccaccgttttcccggaaaccgggaacgaatccggagtacggtctccggtttcatacttgacggcaaaatcaagcaggcactgatttgcgctgtaagtaatcgggccccagtcaacgatttcggtgcggacctcatcggttatcttagttttctgacgataccagatattcacctggttttttgcgggattgtcggcagcggcgctcacatcggaaatattcacccattcgatgccgtccgcggaataagcccagctgtgatcccaatagcggatatatgtaaattggattcctttatgtgaattgttagtccagccgtcggttgactgagaaacatccgccgagtgataagcgcttttccaataagttacgtcgtatgttttgccgtcccagcttgttgccttgccgtccggagacggaaggatgccgctcagctcaataccgttttcgctgtaaactccgccgtaagtagctttgagtgtatatgtggaacgtcggttgccggcgttgtcggtataggtgaactcggagggagtaccgtcgctccaccccgtcggaacaactccggtatttgtgatccaaagatttatcggaagcaaaacatcctgaagctgctcctccgttaccgtaataatatatttaacgccgtcgataacaacgaaggttgttccggctttctttccggtaaaggtgagtgtggttttgtcaaccggatcggttgtagttttagtcgcaggttgtccgataggattggaataggtgttataccatgaataactgcggtaaaatgttccattgtcgaagtaaaaagtagtcgcattccagctggaggtagttgtcgtcagcccgctgttatacctcaaataattgctgcccgattttaaggtataagcgttgttactagaataactactgctcgtcaaagtccactctgccgcttttgttttatcgttagttgttctaccggtcgaagtaagatacgttccctcagaaacctgaatataatatttgccgttgttggttaccgaagttacgggagtaataacagtttcaccttcaactttagtatagtcagcagttaccgacgcaatagtctcatcatccgtcgtgtatgttccgctgaggttctttccggttatggtaacggtttccgtttgtccctccacaaccgtaatcattttgtcgggaacaccggtttcattaacggttacggaaatcgacttgctctgcgtcctatccgacaggctcgttgcggtaagctcggcagtgccgactccgacggcacttgcggtaacggctgttccgtcagcggaaagtgctcttgcttttgcggaaagcgatatgaccttatcgtttgagctggtccactccgcctcatccgttgcggagagatcatatgattcgccgagtttcatcacaaactgcgaatcggcataatttattgcggaaaaatctacggaaaatgcgggagtggtattcttggtgaaatatgtcgggttagcgtccgccattgccgcgataagctcctgaacatccgcaagggctacatcaacgctcggcgtatcgcaccaaaccgcaaacatcgcaccgacatttgttgagccgaccggaatttcggtatatgttgtgcttgtcgagttatatccgctctttatattctgatactttgttacatcaaacttactgaagttggaaagaacggtcgacttgccgtattcgtcggctttgctcggaacgtaataccacttctgattggtatttatcatcttgtatccggcatttttaatagcatccggagtattgtattcgcttccgttccactgattagaccaatagcacacctgaacagtcttatacagattgcagtccgatcgtttattgtagcatacgaaatcattgaagcagcgcgcaatcatgccctcagcttcgataattccggcgcagtcgttcatatatccgataagctgatcatatgtaaccgttgccgcactcgattcaatataaggattgcgtattccctgtccgtactcatcggctccgaaattgaaaaatttagtcgtgctgtttaaggcaaaccaatcgacataaagtttgagcaatgccttgccgaagccaacagcatccgaattgttcaggttgagagagccttccgagcccgtcagcttatactgtgaaaacagagagcttgaaaggagcgcatccatatgtccgggcatgttgagaagcggaactatctcaatttttttactttgagcataggagataatctccttcatttccgtctcgttcaaggaattcccgttcgggtcattgtaaaagctctcgtttccttccttgatggcagctttgacagcggcactgtcatgaagggtagatccatcgacaacaatatccatgttgtcaagaacaaagcgcagaccgccgtttccgaaagctaattcaagctgattgaagccgttttcatacattgtatcgatcacaccttttatgtaatcgaccgaaaaatatttgcgcccgcagtccaaatgtaccatacggtactgcaaagctgccgcgtccgccgcctgtgccgtgaagctcagcgcgccgaaaggcagcatgcctataaacatgagcacggcaagcagtgctgcaaacagtcttttgcttacgtttgctgttttcataagaaagccatcccttctttaatccttcaaaagtttaaattatccgcattgcgggatgtcggtttgcgccttctcccgctattctataaagccatcgatttcatttaattttatcacgtttgagcgcgaattgcaatagtttccacgcttttttgcgttttgcgaaaaaaatttttgtgcgattttttgccctcggagatgtattttccgtcaatttgcgcggagattcttttttgcgtttcttcatatgcttttctcttgatttcctattaacattgtgatataataggatttaacgaaagtgagggattcagggtgcttgtttctacaaaaggaagatatgcgctgcgcgttatgacggagcttgcctgtcatgcaaaggacgaatttgtcccgctgaaaacgatcgcacggcagcagaacatatccgaaaaataccttgaaagcattatcggggtcttatcaaaggcgggaataatcgacggactgcgcggcaagggcggcggataccgtctgaatcgcgatgcgtcggaatactcggtcggcgagatacttcggcttacggaggggagtctcgctccggtgtcgtgtctcgactgcaagccgaacaaatgcgaacgcgcggcagaatgccgcacgctgccgatgtgggagaagctcgacacgataatcagcgattatctcgaccatgtatcgattgccgatctcctcgattcgtccgcgatcggcgattttcaaatctgaaaagctacatctcattatatatacgccgcgcggcggcgcacagatccaccgaaaggagcttccgttcggaagcggtatcagaaaatgaagataaccgaaataataagcggcgatgcgcctagcctgtcgtttgaggtgttccctccgaaaacgagtgataaattcgagagcgttatgggcgctgccgccgagatcgcaaagctgaagccgagctacatgagcgtaacctacggtgcgggcggcggaacgtccgaatatacgaccgcgatatgcgaagcactgaacagcttcggcgttaccgctcttgcgcatctgacctgcgtatcatcgaacagggggcgcatcgagagcgagcttgaaaagctgcgctcgcacgggatcggcaatattctcgctctgcgaggggacattccggcgggatttgaccgtgagagttcgcactaccgccacgcaagcgagctgatgaaggagatcgcggatttcggcggattctgcatcggcggcgcatgctatcccgaggggcacccggaaagtgcgaacagtgccgacgatatcgagggaatacaacgcaaggtcgatgcgggatgcgaatttctgacgacgcagatgttcttcgacaacaatattctgtataattttctttaccggctttaccgcgcggggatcgacgttccggtggtggcgggagttatgccggtaacgagcgccgcgcagataaagcgactgtgttcgatctcgtcatcggcgcttccgcagaggttcatacggatcgtggaccgttacggcgacgacagcgcagcgatgaagcaggcggggatcgcgtttgcgacggagcagatcatcgatctgtacgcaaacgggatcaatgccgttcatgtgtactcgatgaacaagccggatgttgcggcggcgatcaaggcaaatctctcggagatcgtaaaatgagtgcgctcggttatttctacggagagattcccaaagagaagctcatgctcgacgcaaacgaggcggcggcacgtctgtcggtatcgcgcacatacacaagcgacaccgtggcgcactgtgaaaaggtgcttcgcgccgagctggactgccgttattcgggagttcttcttgaggtgtcgtacccagccgaggaggtcgtcgatctcggattcggcgggatacacagccgcgatctgtacaaaaatctcggcggatgcggcgaagcgttcgtattcgccgtaacgctcggatacggagttgaccgtcttctcagccggctttccgtcatatcgggtgcggaatacttcatcacggacgcactcgcgtccgcgtttgccgaggcggcgtgcgacggtgccgaagccgagatctgcaaagggtgcggcggacgcgcgcgcttcagtccgggatacggcgatctgccgctcgagatacagccgcagatactcgcgtccgttggcgcggcgcgtcggctgaacataacgcttgcgaaaaatctgatgatgacgccgtcgaaatcggtaacggcgataaagggaaaatcggatccgggcacgcgctgacggtgcgcgcccgcacggaggaaaatcggatgaaggatttaagaagcgatctgcgtacaaagcggctttattttgacggggggttcggaaccgtgctccaggggatggggctgaaaagcggcgaagccccggaaacatggaacatcacgcaccccgacgaggtgacgggagttcaccgcgcgtacatcgaagccgggagcaatataataacgacgaacacgttcggcgtgaaccgcgacaaatacgaaaactatgcggagcttatctccgccgcgctcgactgtgccgaaaaggcggtcggcggaagcgaagcgtatatcgcgctcgacatcggtcctaccgggcggatgctcgagccgctcggcgatctttcgtttgaggaggcggtctcgatttttgcgtcaaacgtgcgcgccgccgccgaccgtgccgatctcataataatcgagacgatgaacgactgcctcgaaacgaaggcggcagtcatcgcggcaaaggagaattcgtctctgccgatattcgtaacgaacgtgtatgacagaagcggcaagctgatgaccggagccgatcccgccgcgatgaccgcgatgctcgaggggctcggcgtcgatgcgacaggaatgaactgctcgttcggtcccgacgttatgcttgaaataatcgatcggttcacggaaagctcttccctgccgctcatcgcaaatccgaacgccggactgcccctggtggaggacggaaaaaccgtatatgacatttccgccgaggaattcgccgattacatggtaaggcttgcggaaaaaggggttaccgtgctcggcggatgctgcggcacgacacccgaatacatcgccgcgaccgtaaaaaaaacgtcgtcaataccgtttcgcgcaccggttgaaaaaaacaaaaccgtcgtttcctcgtacacgcatgcggtcgaggtcgccgattcgccgatcctgatcggcgagcgcatcaatccgacgggaaagccgaagctgaaggaggctctgcggagcggggatttcaactacattctgaacgaaggcgtgcgtcagagcgaagccggagcgcatattctcgatgtgaacgtaggtctgcccgagatcgacgaagcggaaacgatgaagaaagccgtgtcggcgctgcaggcggtaacagatacgccgctccagcttgattcgtcaagtcccgcggtgctcgaacgcgcgatgaggatatacaacggaaaagcgctgatcaattccgtaaacggcgaagaggagagcatgaactccgtattcccgctcgtgaagaaatacggcggcacggtcatcgcgctcacgatggacaaatcgggaattcccgaaagcgccgaagcgcgcttggagattgccgagcgaatcgcgcggcgcgccgccgaatacggcataaaaaagaaggacattcttgtcgatccgctttgtctgacggtttcgtcggacagccgcagtgcgctcgtgacgcttcacgcgctgcgccttctccgtgagcgcggattcaagacaagcctcggggtatcgaacatatccttcgggctgcccgagcgcgagaagatcaacacggcgtttttcgcctgcgcgctcgaaaacggtctcaactgcgcgataatgaatccgttttccgcgggcatgaccgacacatactacgctttccgcgcgctccacggaatggacgcatcgtgcgccgattatatcgggtacgccgcatcgtccgctcccgcgccgaaggcatctccgaacgccgcatcaggggaagcacccgatctcgaatacgcagtcataaacggaatgcgcgacagtgccgtcgcggcgtcgctcacgcttcttgaaacggaaacgccgcttgaaataatcaacaaccgcatcgtgcccgctctcgctaaggtgggaaaaagcttcgaagaaaagcgcacataccttccccagcttctcatgagtgcggaaagcgcttccgccgcgtttgagaagataaaagaaaagatgccgcgcggcgaaagctccgacggacgcgatgtaattctcgccacggtcaagggcgacattcacgatatcgggaaaaatatcgtccgcgttcttctcgaaagctacggattcaaggtgtttgatctcgggcgcgacgtcgatcccgaggaggtctgccgccgtgccgcggaaacgggctgccgtctcgtcggactcagcgcgcttatgacgactaccgttccctcgatggaggaaacgatccgcatgcttcacgaaaggtgtccgggcgttacggtaatcgtcggcggtgcggtgctgaacgaagaatacgccgaaatgattcatgccgacaagtactgcgaagatgcaatggacaccgtgcgctttgctcagtcattctattccgacaacgtctgagcggcggcgggcgcgactttttgaagtcacataatacgccgacagtcaaaatatgacccgcagccgtcccgtcatcagacaggacggctttttactgttattttcaacgaaaaataccgcaaatttttttgcattttttcccgaaaagcaattgacaaagtgtccgctgcgtgatataatcatataaacctacaagaaaggtgggaaagatatgcacgatctcttcccgaaactgatccgtttcaacttccgattcggtcgaatgtaccgctgccggggcacccggctctgtatctgactgtgcggagccgctcaaccgtacgcaatccgataaaccgataaataaagtgaatgaaaggatcacagaaaatgagcaactataaatttgaaaccatacaggtacacgcaggtcaggaaaagccggatcccgccacggacgcgcgcgcggtaccgatatacgcaacgacctcatatgtgttcaaggacagcgcgcaggcagcaggacgcttcggacttaccgaatcgggcaacatctacacgcgcctcatgaaccccacctcgtcggtattcgaagagcgcatagccgcgctcgaaggcggagccgcagcgcttgcgacggcatccggatcggcggcgattacatacgccgtacagaatatcgcccgcgccggagatcacatcgtatcctcctcaaacctctacggcggaaccttcaatctcttcgagcatacgctccgcgatcagggacttgacgttacgttcgtcgatccgtccgatcccgagaattttgaaaaggcgatcaaggaaaacaccaagcttgtatatgcggagacgctcggaaatccgaattccgacgtgatagatatcgaggcgatcgccgctgttgcccaccgtcacggaatcccgctgatcgtggacaacacgtttgcaactccgtactgcctccgtccgatcgagcacggtgcggatatcgtggttcactctgcgacgaaattcataggcggtcacggcaccgtaatgggcggagttgttgtagactccggcaaattcgattgggcgcagaacgacaagtttcccggaatatcggagccgaatccctcctaccacggtgttgttttctccgaagcatgcggaaatctcgcgtacatactcaagcttcgcaccacgctcatgagagatcagggtgcgacaatatcgccgttcaactcgttcctgcttctccagggactcgaaacgctctccctccgtgtcgagcgacatgtcgaaaacgcactgaaggtcgttgacttcctcaaaaatcatccgcaggtcgaaatggtaaatcatccctcactcgtcggcggaaagcagaaggagctttacgacagatacttcccgaacggcgccgcgtcgatcttcacctttgatataaagggcggtgccgccgaagccaagaaattcaccgaaagtctcgagctgttttcacttctcgccaatgttgcggacgtgaagagcctcgttatccaccccgcatcaaccactcactcccagctctccgaaagcgagcttctcgaagccggaatacgtccgaccacggttcgtctttcgatcggaacggagcacattgacgacattatcgcagaccttgagcacggtttcgaagccgtaaaataacaaatgtaaagcgggattcccgcatgagcgccgcacagcggcagaacggagacttatcatgtctgaaaaaatatatacctcggcagatcagctcataggaggcactcctcttctcgagctcacacatatcgaaaagaagctttcgcttgaagcgagaatccttgcaaagcttgaatacttcaatcccgccggctcggtcaaggaccgtatcgcaaaggcgatgatcgacgatgcggaagcgaaaggactcctgaacaaggattccgttatcatcgagccgacaagcggcaacacgggaatcggtcttgcgtcggtcgccgcggcgcgcgggtacaggatcatcatcgtcatgcccgaaaccatgtcggttgagcgccgccagctcatgaaggcatacggcgcagagcttgtgctcacggacggaaccaagggaatgaagggcgcgattgccaaagccgatgagcttgcaaaggagatcccgaacgcatttattcccggacagttcgtaaacccggctaatcccgcagctcaccgcgagaccaccggtcccgaaatatggaacgataccaacggcaaggttgacatattcgttgccggcgtcggcacgggcggcactgtcacaggagtcggcgagtatctaaagtcgaaaaatcccgcagtgaagatcgtcgccgtcgagcctgcatcctccgcggttctttcgaccggagttgcgggtgctcacaagattcagggaatcggcgcggggtttgttcccgatgtgcttgacacgtcggtttacgacgagatcatcgcggtaagcaacgaagacgcatttgcagacggcaagcgcgtcggcaaggaggaaggcgttctcgtcggaatatcctccggagccgcacttcacgccgcgatcgagcttgcgaaacgtcccgaaaacaagggaaagaccatcgttgcgcttctccccgacaccggagaccgttatctctcgacaccgctctttgccgactgaacatcagccgcccggaaaccaaggcgcggctccgtaagcgcgcttccccgcggaatgcgataccgcagtatcgtctgcgaataccgcaagtccggtatcgccgccgaatcaaaatcaaatacggcatgcacagggggctgccgcaaagtgagttctgctcgcttgcggcagccctttttgcatatcgtaagcattccttcgcggagcaaaaaaatttttataaaatttttgttttgcgtgcaaccttcggcaaaaaattacgtctatataggtgaaaggagatcatgagatcacgaaaaaggcatcaattcccacggcagaccgcgcgtcgcggacgctccggagcaaaatgcagcatgatctgccgccgtctgaaaagtccgatttaccgcaaagcaaaccgaccccggcgatttttgtaaaactgtacgacaatatgtaaaattacattgtcaacgttttctatggtaatattgtatcgaagacaacagtagaaggaaggtgaaaccgatgcagatttgttgatacggtctgaaaataaagctgtgaccgaaaagataccgcttatccccacatacgattgtcaatccaattttacaaaaaggagataacagttttgaaaaatcacagtaaatcgaaaaaacattcaggatgttaagcattttcgttacaattctcatgactcttcaacttgtatgcgtaggaacaacagcagaagcagagatcgaagccgatgcggcggcggaaattatacctgccgaagcggatgtattaggtcctctcagcataagcactcaaagcatttctgcgggaactacatacttcctgcgaaatgcaaaaagcggactttacctcgatcttcaggcgagcggagttgtgaacggaacacattttcagcagtatccatacggcgatctctccgaaatgtttcttatcacagccttgggcggtgataagtatcagatcagaacgacacttacaaacgcctccggcactatggtgatggacggtcgttcaaactgcgtcgccggagcacaagtcattctttacacttacaacagcagctatacggaacagcagtggaagatcgaaagcaataccgacggatcgtactgcatatccccgatgaagaatacctccctgaacctcaccatcgaaaacggttcaaccgccagccatgccaaagcaaagcttgcagtaaagaattcaaacgatctgagtcagagatggtttatcgaaccctatgcaggcacaagcggtgtcggaagtaccaatgcgaaattttttatccgcaacaagggcagcggaaaatacgttgacctataccgtaatgccgttacgagcggaacgcattttcagcagtatcagttcgcggataattcgtcggcacgcgaaaaattctggatcacatccttcaacaagggatatgtccaaatttcaacaacggaagcctcaggcggcaccatggtaatggacggaagtccgaactgtgttgcgggggctcaggtgatactgaacgaaaacgacggcacaaccgagcagtattggtatttcaggcggaacgacgacggttcgtattggatctcaccgtcaaaaaatgtttatctcaaccttgccgtcgaaaactcatcaacggcaaacaacgcaaagctgaagcttgagtcaagatcgacaggcgacaatcagaaatggtatctggaacctgttgacgaagcaaacttttacttcagatacatgtttgccaatgccaatgaaaacagctatattaccctcggctccggatataaaatgtacagggaaacattgaatgattggcactatgctatcgacataaccggaaaaacttcttttatcagaggaacgccgatcttctcgccgacatcgggaaccgtgatttattcgcaacataacccagaaagcggaaactatgtcgtaatcgaaaccgacaaatgcgtgaaaggcacgggtaaaaaggtaatacttacctttgcacacatgatcgaaaaatctccgttagaggtcggtcaacgtgtactcccaaaaaaattcatagggtatgtaggaagcaccggaaattcaagcggagatcacctccatcacgcggttttcaaaagtcctcccggctccaataccatttacgaaagccaaatcaactgcattaatcctcagagattttatccgaatgtaccttttgccggcgaaacctctaccgcaccataacagtaaccgcactcaacaaatcgaaatatatgatataaaggagtatctcagatgaaaaaagtaatatatgcgctgactgtgctgctcatgatcgggattttagcgggatgcaattcgacagatgtacccgcagcttcggagaaggaaagcaatacggcagatacttccgttgacgtcgatatcggaaagactaccgctgccgaggttggcagtaattccgcgcagataacggaaaaagctcccgagaccgccgccgaaagtaatacagctggaggtgtcggcggagctgttccggactggtacagattaaaatacaatgatgagtacggctccgttgacataaatgattttgaaggtattttcacatcggatgacttcaatcaatggctcattacggaacacggatattcggaaactctgtcctcggcaaatgcggaaatatttgatttcttacctgagctaataagatatttcaatattccaaaagagaaattcccaatcgggggtggttcaggatacacgcaggaaatggcagacgcactctattcaaatgaccaaaataaaataaatgaagtatttgtgtcgccttatgcgatcttcaaaaacggagagatatacactcccgagtggctcgacactcacactctcgaagaattcaacgaggtaggcataactcttgaagatatcgtaaacaagatcgaaaacgattggtgtatatttgattacgagtactactatccggacggcggttccaatgaagatgatcttctccccggaatgtatatggaattattcgtctgcaacatgaagaagctctgcagggacaacggcgtttcctacacagttccgtctaccaattaagtcaagaccgcgcccgcaagggcgcggtcgaataaagccgtaaaggagtatctcagatgaaaaaaataatatatgcgctgactgtgctgctcatgatcgggattttagcgggatgcaattcgacagatgtacccgcgactccggagaaggaaagcaatacggcagatacttccgttgacgtcgacaacggaaaatccgccgttaccgaaatcagtacagaaaaagcgtttccgggagaatcggagaatataagcgatcctaaagctgcaatctacaacaggatgttaaatacaattgattacttcaatgttttatccgcgaaaatggaaacttccatgctgaataatgagattacaacagtggaatacaatacgaatatcaattcgggtgaatcatatcagaaggtatcagtaggtgaaaagacaatgaccgaagcttacggtcagaatgacagcatgatcaatgtaaataacacttccgggcagtatcttgtcatgcgtgggcaaatgttcggcagagatgatgcgccgtacattccgttagagaaaagaatcgtaacggaagacgatggaatgccttgctattactacagaaaaaatataacaaactgttcgtatgcatcatattcaatattccctcaggaatttacgttcagctatctgaaggattttgcactgtgggatattaccgatgatactgcggattatttaggcagaaaatgcgtaaagatagagggcgtgccgtcttcatacattgcggaaaagcataatatcgataatttcacaatgatcgttgattcgcaaacaggcattctgatgcaatttacggggacaaaagacggtgaggtttcccgatatatgaaaattacagacatttctttggaaagcaactcctcgataaagcattttaatgcaaatgaatacagttcgtttgtcgaagtaaaggaatctgccgttaattgacggttcggcaattttcaccggaagagtttcattgattcttttataatccttgccgtaaagcggcgtttccttcaccgttccgccggtcaatcaggattccggcggcagcgcgggcgatccgctcaatcagaaataacaaatcgaagcagacaaaagccgccgacggaaatttccgtcggcggcttttcggtatccgaaaaacgttattctgacacgctgttttgaaagcgcgcacttttcggcgaagcgtcagacccctttattccgcgatgctctcgccgagcgcacggcaggatgcgagtgcgtcgtcatcaggtgcctcattgcagatcacgctgtcgcacgcaaagaccgctccgtctccggtgcagcgctcctcccagcttctcatccactcgccgtctccccagccgtaggagccgaagagtgctatgcgcttgccgccgagcttgccttcgcatgaagcgaacatcggctcgaactcgtcctcctcgagaacctcggcgcccattgcggggcagccgaacgccactgcatcaagcgcgtcgagcatcgatgcgtcgaattcatccgccgtaaacagcgagacctccgcgccctttgcctttgcaccttcaacgactgcgttggccatggcttccgtatttccggtgccgctccaatatataaccgctgccttactcataataatcaaaccttccttttttgtatttcttcaaacagctactgtgagctgttcaacagactttccttttttccactgctcaagatacagtgcggcgcacttccggtaccttccgaaggtggtcatcgcctgctgcgtattcccgtacaccttccagcatccgctgcacttgcatccggacgcgcccttttcgatgaagccgcgcacatcctcgggagggtatccgaggaacagcccgatctcatgcggaaagctttctccgctccgcattctcgatatcagcgaagcgatgcaccgtccgggagcggaacatccgtatccgcttttttcgaggatctcccttgcaagagaattgtcaagatcgcgtttcaggcgcgacgggcggtaaacatacacccatgcttttctttccgtgcgttttacgggaataacgcgaagcccctttgaagcgagcgttcggttaagctcgcggagtctgcggcgaaacgcttcgtcgcagccgaccttaaccacaaacagatttcccgttttcagtcccgcaagagtcggcgcgcagtggcgcacgataagttcgtcagacatggctcagcctcacgaagcatgctcgtcgagaatgtttctgagcgcggatatcgagcttgaatgagaacgcgcaataacggtttccccgccctttgtttcgctcagtgcgcaatggagcattttatgcgacatcgtatttgtaaaaagcacaagcagatcgggatttccgatcttgtttttcaggcttccctgcattttcggaaaaacctttgcacggcacttgtagcttgtgcacagatccttatattctcttaccatacattcatttccgcctataattaccacgctcatattctcttttcacctttctttcgctttctgtttttatttttacccgtttgggagtttattgcgtcgcatcggttagcatatgctaaccaatgggttttatgtaaaccgttccgaagaacggtttacattttcggaggatcgtacaaaaatcttattttccgaaaattccgagaaatccttttttctcgtacggttcgcggctgatctgcagcacggtataccccgtttttccgacggcgtccttcagctcttcatcggaaatatcgttttcggaaataacggtacactcgcccttggtgtgcgaggatgtcaccttcctcacccgaaacgcgccccgtatcgcttcatttacatgtgcttcgcacattccgcacatcattccgtctattttcattgttatctttgtcatttcattttcatcctttacggtttgcgttattcggcgcccttgagggcttcgaccatatcgatctttttattctttgccgcgatcatcacgctgaccgcaagcgacacgccgaatgtaagaattatacttacggcgtacgtcagcggtccgatgaccgtgcgcatttcgtattcggaagcaagaagcttcatcagaacgctgagggtaaggtagccgcccggcaagccgatcagcactccgacaaaagtgatccacagattctggcttatgagaagcttcgctatctttttatccttgaagccgacgaccttcagcgtcgccatctctcggtagcgctcggcgtagctcatcacgccgagattgtaaagcacgaccgtgcagagtatgaccgccgcaaagataagaacgaatatcatgagatccatgatctcggtaaacgtatcaaacgaatcgataatagcctgctttgactgcacgctctttattgcgccgtcggacgggatctccgctttctgcaccggggtataaaccgaatccgccgtgcgggggattccgaggctctcggcatactcatcggtgatcacgatactttcggataccgattggatgattccgtttaccttcatcgaatattcttcgtccgagccgtaaggacttacggtaaaggtatcgcccgcggcaagatcaaattcatccgcaatacgcatacatatgtaagcgccgtcgttttcaagtgaggtgtatcctttcttcaccgaagggaaacggaccgtatcgtgagttattttgtaaatatcgagagacagcgccttttcttcaagctgtacgctgaccgacgcgctcgtatctccgccgtacttctcgcaaagagcgctgcgctcttcatccgtcgcgtcctcgctcagacagatgcgtgaagcgtaatttgtcgcgccgtcataataaacatcgagaaattcgttcatcgtgtctcgcataccgaccgatccgacgactattatcatgcatccgacaatgcctatgagagtcatgagagttctcgatttatgacgcatgatgtcgcgcagattccagcgaataccgaagccgaggcggtggaagaatgccgttttctcgatccgcagctgttttacctttttaggggtatacgggcgaagcgagtccgccgcgcatccggcaagcatctttcgcacggaaaggaatccgatcaccgtaagcagcgcgattatgccgacaaggacgatccagcagaaccacggaagcgaaagcttccacgacggcatatcgagatatgtgcccatcgagccgttcgggttcataatgaaatacgctactccgaagccgaacgcaattccgaacgcggagccgacaagtccgatcatcagggcata

SEQ ID NO: 2069 - DNA, 9978 bp, Unknown
  16S sequences of unknown bacteria
gggggatgcttatgtcagtgggagttgaaagctcccactgacaggtcgcgaagcgactgcgttcatgagcaagtagcgaagcggattgcgaatgtccgctttactcccattgaaaaactttggtcgaaagtgaaggctttcctgcgtaaattcaaggcacgaacgctggatgctcttccgaacgcgatccaatgtgcttttcaagctgtttcgccttctgactgctcaggctggttcaaatcttgtgattatttgcactaattcatgggattgctataaaaagccaaaagatctgtattaaatgatcttttggcttttttaatacaaagtttttatacgaagcttttataccgtccccagccccgccagatccgtataaaatccaggatagctgatctttacgcagtcagcgtcctgaatcttggtctcgccgtctgcggctaaggcagcgacagcgaagctcatcgcgatgcgatgatccagatgcggattgatggtggcgccgtgcagtggtctgccgccgtggataatcattccgtcgtcagtcggttcgacatctgcgcccatacgcttcagattttcggtcatgacagcaatacggtcagactccttgaccttgagctcggcagcgtcctttatgacggttgtcccttctgcaaaggcggcgagcacggcaatgaccggaagctcgtcgatcagggtcgggatcagctccccctctatcgttgtggcatgcaaagaagaggaacggatcagcagatcggcacatggctctgcgccgccggtgtttttatttatgagagtgacatcgccgcccatcgcgcggacgacacgcagcatgccgtcacgggtcggattgatgccgacatttttcaggagtacctcagagcccggtacgagcaatgctgcggcgataaagtaggcggcggaagagatgtcgccgggtacgttgaccttctgtccaatcagccttggatccggaagaaccgtggaagttgtgccctcacattggatatccgcgccaaagtagcgaagcatcagctcggagtgattgcgggatatagcaggctcagtcacagaggtcggagcatctgcatacagtccggcgagcagcacacacgatttgacctgcgcagaggcaaccggtgagaggtaatggatgccatgcagcgggcttcctttgatctgaagcggtgcgcagccgttttcatgaacagaagcgatcgaagcgcccatctgtgaaagcggcgtcatgacacgcttcatcggacgcttctggatcgaagcgtcgccggtgatcgtagaatcaaatggctgtccggcgagaatgccggagagcagccgtacagtcgtgccgctgtttcctgcgtcgatgatgccggacggccgggtgagtccatgcagcccttttccgtgaacgacgacagaagtgccgttttgctcaactaagatgcccatctgtcggaaacagctgatcgtggaaaggcagtctgctccggtgagaaaattttccgcttctgtgatgccttccgagagtgctccgaacatcacactgcggtgcgaaatcgatttgtcgcccgggactgcgagctctccgcgcagcgggccatgtttctgaataaccatgtaactcctttctatcgtacccacacctgataacggtgctgccggagtacgtctgcagcacgcagcgacggctcctcctcatagaattcgatctgaagcacgccctcctcgaattcccggttgtgtacaatgccgatgttcttaatactgatgccgttgaccgcgagcgttgtggcgatcgtggcgatcgctccggattcatcgatgatatcgcagaagacccgatatgtcttcttgatgctgccgagtgaacgggaagaaaaggaatcacggtaattccgggagcgcgcgaacatctgattgatcgcagcgctgttgccggcattcatttcctgccgggattcctcaagtaatgcgacaaaggtgtccatgactctggaaatattgtcgtgattttcaatacagatctgctcccacatctcaggggaagacgacgcgatccgcgtgatgtccttgaaacctccggcagcgagcattttcatcatttcctctctggaatcaaggtcgtgcacggtattgacgagtgcagcggcgatgaggtgcggcagatggctgatggcagcggtcgcatagtcatgctccctgtagtttaagatgaccggaagtgcgccgaactgctgtaccgtctggcgataccagtcgattttctcctgcgccgtatccttcgacggtgtgataatatagtaagcgttttcaaataaaggtgcctgcgcatgggcaaagccggacttttccgagcctgtcatcggatgtccgccgataaatcgtccgtccagccccatttcagaggcggccaggtggatgtctgttttgacactgccgacatcggtaaggatgcagtcaggagagacgatatccttcagaacgcgcagggcggaaatattcgttgcgaccggtgcacataaaaaaatgcagctgcatgtggcaaactgcgggtcatccacggaagaacaggctgcgtcgacagcctgtgccttcagggcttcctcgagtgtcgcgcgggtacgcgtataggcaaggatccggcaggatggatcggtgcgttttaacgcctttgcgaacgagccgccgatcagtccgaggccaataaatccataagtattctgttccataatcagtcgttatcctttccagagcaaacaactctaaagtgtgttcttattttactatccacttcccggtatgtcaacaaaagaatttaacgctttaaaggataaaattgatttaaaaatctgaaaaaataaaacaactatagacagcaagtggtgaattgtactgaattgtgtataaaaaacatactttatatagcgaatgaacctatggcatttgttttgataaataaaaacattgttaaatttgaatgaaatgcttgaaattttcgaaaaattttagtagaatatggacatgtggatttgttgtgaccacggactaactagtattggaggaaaaagctatgaatgtttacacaacagacaaaattcgtaacgtcgtaatcctcggacatggcggagcaggaaagacaagtcttgtggagtctatggcatatctgtcaggcattacgagcagactgggaaatgtagctgagggaaatacgatcagcgattatgataaagaggaaattaagagaaagttttcaatcagcacatctatggtgccgattatctggggcgatacaaagatcaatatccttgatacaccgggctacttcgatttcgtgggagaggcagaagaagctgccgcagctgcagacgcagcgatcatcgtagtcaatggtaagaatggcgtcgaggtcggaacggagaaggcgtgggatctgtgtgagaagtataagcttccgagattcttctatgtttcgaatatggactacgacaatgccagctaccgtgaggttgtggagaagctgactgagctgtacggtaagaagattgcaccgctgttcctcccgatccgtgagaatgagaagttcgtcggttatgtcaacgttgtaaagatggcagccagaagatacgtgaataagaatgaaaaagtagagtgtgagattccggattattccagggagtatttggagcgctatcgcgagaatctgcttgaggcagtggcagagacgagtgaagagtttatggatcgctattttaatggcgatgagttttcggaagcggagatcgtggctgcgctgcatgcgaatgtcggcgactgctcgatcataccggtgacaatgggtgccagcctgaatctgcagggcattgtcattttacttgatgatattgtcagctatatgccgtctccggagtccagaaagatcgccggtgtcaatatgaagacgaaggagatctttgaggcgaattatgatttcgcaaaagcaaagtccgcatttattttcaagacgattgtggatccgtttatcggaaaatattccatgatcaagatcgcatccggtgttatcaagagcgatgataccctttacaatgaggcaagagatgaggaagaccgcatcagcaagctttatgtattcgagggcagcaggccgatagaggtaaaagagctgcatgcaggtgatatcggagcgatcggcaagcttgacgctgcgaccggagacaccctttctacaaaggccaatccgattgcctacggaaagatcgaggtatctactccatatacatacaagagataccgtgcaaagctaaaaggcgaggaagataaggtcgctcaggcactggcaaagatggctcaggaagatctgacgatcaaggtagtcaatgacggtgagaaccgccagacgcttctttacggtatgggtgaccagcatctggacattattgcgagtcagctgcttacaaaatataaagtagatatgacactggagaagccgaaggtagcgttccgcgagacgatccgcaagagctccgatgtagattccaagtacaaaaagcagtccggcggacatggacagtacggacatgtaaagatgcgtttctccccgctgggtgatctcgaggttccatatgagttttcacaggaggtagttggcggtgcggttccgaagaactacttcccggcagtagagaagggtattcaggagtctgtcgtgaaggggcctctggccggatatccggttgttggcgtgaaggcagtgctttacgatggatcgtatcatccggtagattcctccgagatggcattcaagacggcagcgagccaggcatttaagaagggcttcatggaagccagcccggtactgcttgagccgatcgaatccctgaaggtaacggttccggacaaattcaccggcgatgtgatgggcgacctgaataagagaagaggacgcgtgctcggcatgaacccggatcacaaggggaatacaatcgtcgaggcggatatcccgatgtctgagctgtacggctattcgacgcagcttcgctccatgaccggaggcagcggtacttatgagtatgagtttgcacgctacgagcaggctccggcggatgtgcagcaaaaggagatcgaggcacgtcagaaggtggctgaggagtaagcttttataatttgtaaagagacaggggactgtggaagaaatgccgcagtctcctgaatatattttatctacagatacgtcagcaggatttccgccagcatccgatggcctcgcttggtcaggtgtattccatccaccgttatgctccgggtgccgtccttttctgccgcggtatcaaaacgctcctgaacggaaatgcaggaaaggctggcagccggacaatcagcctgcatctgcgcagtccgggcgcgaagcagctgacaaagcgaatgcagtcggggacgccaggtcagcagctcttccggcacagaaaagagaaatggttcgactacgatgatccgatggcagccggaggtgatcagcccgcgcagcagtgagcagaatgcttccgaggcatccgccagtatggaagcggcagccgtttccgtattgctgtgcgccataatatcgccgatgtcattgatgccgccgagcagaaagacggtattgaagcattgccctttccaggtgcgctgccatttccgctcgatgcgggagagtgtgaaaccgtccacaccgccattgataagagaaaaccggttgtcgttgccgtctgccatatattttacatatccggttccaaggttatcttttgtaaaacagtggtcgcagtcggtgatactgtcgcccagaaataaaatttgttgtgccttcatcatatttcctgcctttcgatgcgttctttttctgaagtattgcaaaattgatacgttcagagaaattttacctgatccattccaaaagagcaaccagatgaaaaaaggtacttttattttcgaaaattctgtgatacaatagctagcagagcgatgcgggcagacagcccgtttgctgcgaataactgcataaggaggatagaactatgaagcatattaagacactgaataccaagtctctgcagaatacgctgaagaagggcggatgcggtgagtgccagacatcctgtcagtctgcatgtaagacatcctgtaccgtaggaaatcagacctgcgagcacaaataagagaaacgaaacaaataaactcactgcctgatatcggatgtggccatcagccgcaggcaagacatgccggcggctggcatggccagcccgatatcaggttttttcgtgagttcaaaagagaggagctttgctgtgatccatcagtataaaaataatggatacaacatcgtgctggacgtcaacagtggctctgtacatgtcgtggatgaactcgtctacgatgtgatcgcattgctggaggaaggaaaatccgagcaggagaccgtggaagccttaaagggccgttacccagaggcggagcttttggaagcactcgacgagtgccgggagctgaaggaagccgggactctgtttacagaggatatctacgagaaggcgatctttgattacaaagcgcgtccgactgttgtgaaagcactttgtctgcatattgcacacgactgcaatcttgcctgtaagtactgctttgcggaggagggcgagtatcatggacgccgtgcgctgatgagttatgaggtcggcaagaaggcgctggatttcctgatcgcgaattccgggagtcgtcacaatcttgaggtcgactttttcggcggtgagccgctgatgaactggcaggtcgtaaaggatctggtcgcatatggccgaagccaggaagagccgcacaataaaaaattccgttttacgctgacgaccaacggcgtattgctgaatgatgaggtcatggaattctgtaaccgcgagatggccaatgtggtactcagcattgacggccgtccggaggtacatgactacatgcggccgttccgcaatggcaagggcagctacgatctggtgcttccgaagttccagaagtttgcgaagagccgccagggcaagagctattacgtccgcggtacctttacccataacaatcttgatttttccgaagatgtgctgcaccttgcagatgcgggatttgatcaggtatcggtggagccggttgtcggaccggatacggaagcgtattcgctgaagcaggaggaccttccgacgatcctggagcagtatgacaagctggctgcagagatggtaaaacgggaaaaagagggaagaggctttaccttcttccattttatgattgatctgaccggaggcccttgcgtatacaagcgcttaagcggctgcggttcggggacagagtatctggccgtgacgccatggggagacttctatccgtgtcatcagtttgtcggtcaggaaaagtacctcatgggaaatgtggatgagggtatcagacgtcaggatattgtggacgagtttaagtgctgcaatgtctacacaaaggaaaaatgccggaactgctttgcaaagttctactgcagcggcggatgcgcggcaaattcctacaatttccatggtacgattcaggacgcttatgatcttggctgcgagctccagcgcaagcgcgtggaatgcgcgatcatgatcaaggctgcgttggctgataaggaagagaactgacttgcatatccgccggggatttcccggctgcgataaatattacgcagcggcggatggcaggatgcttccggagagctgcggtaaagaaggagaagtgccatgaacaagaaaaaggcaaaaatcagtcttgtcgtactggcgctggttaccgttttgtttgcatatacggtaatcatcggtatcggcaagacgggtacaggcgctatacggaatattattctgggcctggacctttccggtggtgtgagcattacctatcaggctgtcggagatgaggagccgtctgcagaggacatgaatgataccgtctacaagctgcagcagcgtgtacagggctacagtacagaggctcaggtataccaggaaggctctgaccgaatcaatatcgagattccgggtgtcagcgatgccaatgcgattctcgaagagcttggcaagccgggttctctggagttccgtctgaccgacggcacagtcgtactgaccggtaaccaggtggcaaatgccagcgcaaagcagcagcaggacaacatgggcaaccgcgaatacgtcgtacagctggagctaactgaggacggtacaaaggcatttgcagatgcgacgactgaaaatgtcggaaatgtcattcagatcgtatacgatgacaatgtcatcagcgcaccgcgtgtcaatgaggcgatcaccggcggtacggcgatcatctccggtatggcgagcgccgaagaggctcagaaccttgcttcttcgatccgtatcggttccctgtcccttcagctggaggagatccgttccaacgtggtcggagcacagcttggtgaggatgcgatccgcacaagcctgattgcaggtgcgatcggacttgcgatcgttattattttcatgattattgtctatgcactgccgggtatctgtgcaggtatcgcactggtgatttatacactgatgatgctgctctgcctgaatgcatttgatctgacgctgaccctgcctggtattgcaggtatcatcctgtcgatcggtatggcagtcgatgcgaacgttatcatctatgcacgtatccgtgaggagatcgctgatggtgcatccgtaaaaggcgcgatccgtacaggatttaaaaaagcgctctctgcgatcattgacggtaatgttaccacgctgatcgctgcatttgttctgaatcttcttggtaccggaagtgtcaagggctttgcacagacactggcactcggtattgtgctttccatgtttacggcgctggtagtttccaggctgctcatcacttccttctatgagattggcttcaaggatgagaagtattacggaaaggcaagaaagcgttctgtgatcgactttgtcggcaagtggaagattacctttgcgattgccgtagtctgcattttgtcaggcccggttgcaatggcgatcaattccggcgcaggcaatggcgcactgaacctgagcatggatttccgtggcggtacatcgacaagcgttacgttcaatgaggatctgtctatcagcgacattgattccaaagtaaagccactgttccaggatgtgaccggcgatgcggagattcagtctcagaaggtggcaggctcgaatgatgtctacatcaagacccgtgtgctgtctctggatgagagagaggcgatctccaagtccattcaggatacgtttggtattgatgagaaggcgatttccttcgagacgatttcctcgacagtcagcaatgagatgcgtcaggacgcagtcgttgcagtcattgtcgctgcgatctgcattctgatctatatctggttccggttcaaggatatccgttttgcgggaagcgcggtgctggcactgatgcatgatgtgctcatcgtatttgcctgctatgcgattgtgcggatttctgtcggcagtacattcattgcctgcatgctgacgatcgtgggatattccattaatgcgacgattgttatctttgaccgaatccgtgagaacctcaaaggcatgaaacaggcttccctggaagacgttgtaaatacaagtattacagagacgctgacaagaagtatttatacatcctttacgacctttgtcatggtagctgtactctatgttctcggtgtggcgacgatcaaggagttctcgcttccgctgatcgtaggcgtcgtagccggaggctattcttccgtctgcatcaccggtgcattgtggtatctgctgaaaaagcacagtgccgggaaagcgaattaagagaaatacgttacgcgacaaaagaataaagtaa

SEQ ID NO: 2070 - DNA, 32759 bp, Unknown
  16S sequences of unknown bacteria
tttcattcaagaaaaatctaaattcgtatccagcactgcaagcgacagaaagggggttgtcaagggggaatctgtcccccttgaccgtgttttgcctacttttgcacgaacaaaagtaggcccccgccgggtaggcgtactaactacacctttgcaaaaggctccgcgacgccgacaggcgatcacaaattagacctaaaaatacttttttctacttttcttttttgccttgtaaaaaaagaaaaagccgcatttctgcgacttttctttgtggtggagacgcacgggctcgaaccgtggacctcctgcgtgtgaagcaggcgctctgaccagctgagctacgcctccgatgcctgtatattatacatcaagtcggtggataaggcaatcccttttgtgaaaaaaattattttcccgcgtaggggtggtccggcagggggatgagcagcgaagccaaaaacagcaggcactcaaataccgtaccggtgatgagaagctcccaggggccgatgccctgcggcaccggattgccccgggtgatgaggatattggcgacagcagccccgctgtacaaaaacagcagcagccgcacggtaataccctttacctgccgctgggcgatccacagtaccacagccaccaggccgatgacactgacgataaaggaaataatgaggacggctatttgcagctggccggcgccggacaggtagtacagcactgtgccgatgcccctggccagggcatacagtgcgcagaatcccattaaaatatgcttggcagccatatgttttctcctttggcttggcttagatgaaaagatcccggccgcttggggtcaggtccccgaaggtttccatatccccggtgagcagcgccatggtacccttatacagcagcgccggatcattgaggaagcggcggcggacctgctcacactccttttcggtggggaggaaaagggtcaggctcatcaagtcgctgccgatatcggtgatggtgagggtgatctcgtagccatcccccacctttttcacccgaactttattttcctgctggcggcgcagcagggtaagcacatcatccagggctctttgggcgcgctcccgcacggcggcgggcagcttctgccggaaggtatccgccagcttctcaccctccggggagagggtgtagcggccgttttcggcggggcgcaggtgccccatgcggatcagacgctcggcggcctcggcaaactcgaagtaattgaccagcgactggcgctgcagcacctcattggcctgatccagcgtgaccggctgcccggcctcccggaagatgtagcagatgagcatatggacttcctccggggtggtgacgctgccgggacgcaccccttcggtaaacagattctgttccatggtttcgttcctttttctgcggttattcggtaagaaagcccgcggccgacaccgctgccgtaatgcgggaggtgaattcctccgccaggtgctcgcccagcgcgatgacctcctcctgctccggctttccgcacagcttggcgaagatctcgccctcgctgcggggggtgcggcgggtttcattgagggtatagagggtgaaggcccgggcatcgtggacggtacgagccagctccggggcctgctgctccagctcctccgcaaagcggctatgcgccgactgctccagcaggggattttccacctgctgctccagctcattttctaccagataggagagcagcacccactgctgggcggcgtattctccctccaccggcatccccaaaaagagggcgcaaagattctctcccaggcggtgggcccgctccaggttgccgttctgctgctggcggcggtactcccgggccgccttttccccttcggaaagggccggttcctttattccatgctgttggtagatctttacttcttctgtcaagccgattcctccctttcctctatccggcggcgaagcctcagatctgctccagagcttcggtcagggcttccgccagctgatcggggcagctggtggggcgcatgccgcagcggatgccctgcagacgccggatgacctcttcggccggctggcccacgaccatagcggaaaggcccttggtattgccgttgcagccgccggtgaactggacattgcggatgatgccggtggcctcatccaaattgatatcgatggcacgggagcagacgccccgggtttcgtaatgatactgcattttacggccttctttcggtggatttcctctattataacctttttggcccggcaaaagcaaccgttcgcgggaatttcatttttttgttctcattaagattttcttgtggtataatcaaagctggaattttgccccgctgccgcggctgcggctgggcggggaaaaagcagggacctgggtgcgggccgcaggcccggccgtccgcaggacggccgtagggggccgaaaggcccccagccccggcgcagccggggctgcctgcggcccgtaaggcagggacctgcgccctgtgcaagctatcacaagggaggacagcaaaccatgtcctatgaaattaactttggcccatggggcagcatttttgccgtccccaccgcggtggccgaccgatatttgaaattctgcaccgaggagcagctcaaggtgctgctgctggcgctgcggcaggggcaaggccctgtggataccgccggcattgcggcgcggctgggaatggacgaagcggcggtaaccgactgcctgcaatactggcaggaatcggggctgtttaccgaaagccagaacccacagcccgcgaaggaagcaccaaaagcccccgaaaataacgaaagcgccgtagtgaagacgaccgaaaacggcatcaccaccatccgcagccggggacatctctccccgggggagatcaacaccatgctgcgggaggacaagcagtttgcggcgctggccgccgagctggaagccgcgcggggaagcgtgctttcccccagcgagcgggagattttggcgtatctatttggttcgctggagctgagccccgaatacctgctggtggcagctgcctactgccgggaaaagggcaaaaagaagctgagctatctggaaaagatggtggcgggttggctggaggatggcatagatacctatgaaaaggcagagagccatatccagcggctgaccaaacaggaggacgatgagggccgcatccggcggttgttcgggctgccggagcgggcgctgaccgcccgggaaaaggcctgtgtgaaccgctggtttggggaatacatgaccccggaagcgctgatgaagctggcctatgaccgtgcggtggaggccacgggcaaggtatccttcgcctatattgataaaattttggccgcctgggccgccaagggcattaccacagtggaggccgccgaggccgagcgcaccgccgcccaacgggccgctgcgggggaatattccttcgacattggggaggccatgcgcattatggagcagaacactgacgagtaggagaatcaatcgaaatggaaaacaccgcttatcgcaacgcgatggagctgctggcccggcgccgcagccaggccgaaaaggacgccgccctgcggcgggaggagctttaccggagcctgccgcagctgcgggaatacgatggcaaagccgccgcgctgtgccgccagatgaccactgcggtaataaacggcgagccgatagaggcataccaaaaggggctggagcaggtgcagcgggataaactgcacaccctggcggcagccggcatagaggaggagctgctgcggccacagtacagctgccccctgtgccgggataccggctacacggagggccggcgctgccgctgcctgacccagctgctacaaaaggaagccatggccgccctgccggccggggtgctggcgggctgcgaaggctttgagggctttgacctgagctactacggcgatgcggcggaggccggcggacgctccccgcgggagaccatgagaaatatcctgaaccggtgccgccgctatgccgcggattttagcggaggcagcgggaatctgctgtttatggggcggacgggactgggcaaaacctatctttccgcctgcattgccatggaggtggccgccagaggatatgaggtccgctactacccggcgcaggcgctcattgaccggtttgaacgagtgcgctttaaccgggaggccggggcggatgacctgaccgccatgcgggagatcctctcctgcgacctgctgatcctggacgacctgggggcggaatttgccacggcgtacagccaatcggtgctgtaccaggtcatcaatgaccggatgaccgagggacgggccaccatcatcagcaccaacctggacctgcccgccctgagcaaagcctacaatgaacgcatcctttcccggctcatcggcagctataccatgctgggatttgtcgggcgggatatccgccagcagaagctggcccgccgccgggagggaaacgcatgagccaatttgaacggacggccctgctgctgggggaggaagccatcgaaacactttcccgcaaaaaggtggccatctttggcctggggggcgtgggcagctggtgctgtgaggccctgggccgggccggtgtggggcagctggctctcatcgaccacgataccgtgagtgaaagcaacctgaaccgccagctggtggcgctgcattccaccatagggcagccaaaggccgccgtgatggccgcccggctgcgggatatcaaccctgatattaaagtgacggaatactccctcttttatatgccggaaaccgcggaccaaatcgatctttccgggtttgactgcattgtggacgccatagataccgtcaccgccaagctgcacctgatccagacggccaaggcgctgggggttcccgtcatcagcagtatgggcactggcaataagctgcgccccgacctgctgatggcatgtgacatcagcaagaccaccacctgcccgctggcccgggtgatgcgccgggagctgcgggcccgcggcatagagcacctgcgggtggtgtattccaccgaaccgcccagaacgcccaaaaatcgcacagccgcccccgcaccggggcagccccgccccaaggatacccccggcagcagcccgtgggtgcccagcagcgccgggctgctgatcgccagtgaggtgatagcacggctgctgggagaggcggagtggtgaaagagaaaatgaaccgattgaattttgtagaggtaaccgaaaatgaagtgtttggttttattagccggctgcggacttggtgatggctcatgcatcgaagaagtaattctgacatatacagcgcttgacaagtatggatgtgattacacccctgttgcggaagagctctctgttccatcggttaaccacctgacggagcagctagcagaaaagcggaatattcttttagaagctgcccgcatcggcagaggccacataaaagatatccgtgagattgattttgaagaatacggtgcgttaattatccccggcgggatcggtttgctgcgcaattataagaattctaatgcgatagaggcgtgcgtcactcattttatcagcaaaaagaagcccatcgctaccatgtgcgctggaattgattttctgcggagcttttggggaaacggtctgctggcatctgaaatgaaagaactgactgcggaagaattctgttttgacgctgacaataatatctattacactcccgcctttaggaaaaccggcagctgttatacggcgctatcaggtattgattccatgatctatgcgttaagtcaagcccaagctactttctaaaatttataataaaaaatccccgaccggcggtgttccgctgatcgggaatcgtcattttactgtaatcttacttttccagtgtgccctggctctttttcttgaggtactcgttgatgaagccatcaagatcgccgtccataacggcggtgatgttgccggtctcgtagttggtgcggtgatccttgaccatggtgtagggcataaacacataggagcggatctggctgccccaggcgatctccttctgcacgcccttgatgtcctcgatcttatccagatgctcacgctccttgatctccaccagcttactgcgcagcatattcatggcgacctcacggttctggtgctggctgcgctctacctgacacgccaccacgataccggtgggcaggtgggtcaggcgcacggcgctggaggtcttattgaccttctgcccgcccgcgccgctggcccggtacacatccatctggatgtcctcctcgcggatctcgatattgacatccttgtcgatctccggcatgacctccagcgaggcaaaggaggtctgacggcggccgctggcatcgaagggagaaacacgcaccagacggtgcacgccgttttcggatttgaggaagccgtaggcgttcattccctcgatgaggatggaggcgcttttgatgcccgcttcgtcgccgtcgaggtagtccagtattttataggcgtagccgtggcgctccgcccagcgggtgtacatgcggtacagcatctgcgcccaatcctgtgcctcggtgccgccggcccccgcgtggaaagtgaggatggcatttttgctgtcatattccccggtgagcagggtggtcagacgcacctccgccatgcgggtctgcagctgctcggtatcggcggcggcttcctcgtacacgctttcatcgccggcctcctccgccagctcgatgagggtcagggtgtcctcgtacagggcctgcagcttattgtaggtttccacgctggctttaagctgagcggtgcgctggagcaccttctggctgttttccatgtcatcccaaaagctgggctccgcggccttgcgctccagctcagcgatctcgatgcccagcttatcaatgttgagagattgttttaattcccggagctccggctccatgccctggagcttcaggcgcagttcttcaaattgcagcatattcttttaacctttcctgtatatagtcttatgttattacaaatcgtattatatctacatcttatttactccccgtattttatgttgcacttattcattatccgatttattttatcataattatgggctcttgtaaaatgattcccggaaatttgccaaaaaaagcattaaaaattcgatttgttcaccgaaagtccattgaattgcccccgggggtatactataatattcggtagagttccgataaggaggacaatttttgtgaaatacaccggtatcccctgcgcggcctgcggcaaaaagtttaccgcggaagacgatgtggtcgtctgcccggagtgcggcacgccctaccaccgcgcctgctataaagaactgggccactgtattaatgaggcccgccatgccgagggctatgtgtggcagccgcccaaggccgctccggggccttccgtaccactggaggagcagccgcatgccccccagaacaagacggacggcgaaggctatgtgatgtgcagccgctgcggcaccgtgaaccctgccggacaggagcgctgcgacctgtgcggctacccgctgaaggagaccggcgaacgcatcccggctggggaccgcgagaccgaggacggcgggacctttgcggaatatgtgcgcgaccagtacaatgtgaaccccaatgaaaagctgggcgatgaactgactgcccgggaggtggccgcctatgtgggacccaatgccctaaacttcctatacaaattccgggcgatgctgcagcgcaagaccgctgtgagctttaacctgggggcgttcctgttcaccgggctgtactgcttctaccgcaagatgtatgccctgggcggcattctgctggccataaaggccgcctgctatatcccctttgccatcaattatatcccctacttccaggagctgatggccgcgggggccaccaccctcagcgagtttatgcacatcaataccctttccccctactaccaggcgctggtttccacctccgccattgtgcagtacggcgggctggtgctcagtgtgctttgctccctgttcttcaattatttctacctcaagaagatcacccagcaggtccgcatccagcgctaccgcggccacgcagcggccggtacccagcagtactaccagaacctttcccgcatgggcggcaccagttggctgctggtattcctcatcgtcatcgggctgctttcggtctcttctgtcgtcacttccctttttgtgatataaaaaagtgcgaaaataaagcaaaaaccgcaggtccggggtgttgacttgcggtttttttattggtataattcctatgttgtgctaaattttcatggcatgactccttccccctgcccggtgcagggggcgaaagtccataaggaggtgtaaagtatggcaaacctgaccaagagctatgagacagtattcgtactgagcaacaagctgaccgaggaagccaccgccgagctggtgaagaagtttaccgatctgattgctgccaacggcaccatcgattccatcgatgagtggggcaagcgcagactggcttacgaaatcgactacgagcaggaaggctactatgttctcgtcaacttcactgctccccacgagttccctgccgagctggatcgtatctacaagatcactgaaggcgtgatccgttctctcatcattgcaaaagagaactaaggagatgatgtaatgtttaacaaagccattctcatcggtcgcctgaccgcagacccggagctgaagcagacccaaagcgggatctctgtatgcagcttcagcatcgctgtggaccgccgtttttccggccgggacagcgagcgcaagactgactttatcaacatcacttcctggcgtcagcaggcagaattcgtctgccgctacttccacaagggcgatgtcatcggggtggagggttctatccagacccgcaactacgaggacaaaaacggcaacaagcgcaccgccaccgagatcgtgaccgataatgtattctttaccggcgcacgctccagcaatgccggttccggcaatggcggcagctatagcaataacagctatggcgataacagctacgccgcccccgcccccgcacagcccgcctataccagcggcgctgccagcgactttgaggaagtggaaagcgataacgacctgcccttctgatcccatcgaaaactgtttcatcattctaataaggaggtttgaaccatggctatggagcgtaccgaaagacccgagagacccatgaaccgcgaccgtcgtccccgcagaaaggtttgtgctttctgtgccgataagatcgagatgatcgattataaagacacccagcgtctgcgccgctacctgtccgagcgtggaaagatcgttccccgccgcgtgaccggtacctgcgcccgccatcagcgtcagctgaccactgcgatcaagcgtgcccgtcatctggccctgctgccctatgtcaccgactaaggctgcctgcggttaaaagcacacgaacgccctgcccctgcggcggggtgtttttgcgttttgtccggcttatgggcccgtgcttgactttcacccccccttatgtataatgagataaaggaaagatcttccttgccgcagctttttgcaaaagcatgttgcattttgcggcgctcgttcgttatacatagtgtaagcctaacaccaatgacaccaacgggaggaaaccacatgaaaaagctgacctggatcctggcgctgaccctgtgccttgccctgctgctgaccgcctgcggcgaaaagcccgcccccacccccgatcccgaccccgatcccgtgaccgatcccgtcaccgaccctgtgaccgaccctgtgaccgaccccgtcaccgagccggacaatactcccattgaccccgatgtgcagaagtactttgagtacttccagaacccctataataacgccgatatctttttgctgtatcccgccgccaaccaaaaggaagccgccggcagccgtgccgcctatgtgctggtaaagctggccgctgaggaaatggctgccggaaaagaagtgacctactcctaccccaaggcagaatatgaccgggccgccatggaatacctgggtgagcccatcacccagtatgaaacccgtaataccaccctgacgcaggatggaaatgtggaatctaccggctggggcggcaacatccccgactttatggtgctgacccacctggagcagctgggggaaaaccactacaagggggttttctccgtctacggcaacggctatgggcagggcggcgatccggctgaagcctacgaggactgctgcaatcggttaatgcatggcaacattctgcccaccgattacctgatgggcacccgcacgctggagtgggaggaatgggaaagtccgctgctgggtttgcagctgcggtatctctcctgcgaattcacccccgccaactaaaacaaaacgcgcccgccatacggcgggcgtttttgcgcttattttatcacatcgcagagcttcatcggcagcatcttttgcaggtcgccgggggaaagctgcacctgatagccgatcttccccgcgctgacatagatgctctcgcagtctgcggcgctctcgtgcagcacggtggggaacggttttttcatgccgatgggactgcacccgccgtggatatagccggtaaggggcagcagctccttctgcggcagcatgacgatgcttttctcccccaccgccttggcggcttttttcagatccagctcctccgccacgggaataacaaagacatagtgcccgccggaggcaccggttgtcaccagcgtcttaaagacccgctccggcggctcaccaagggcggctgccacctctaccccgcttaccgccccggtggccaggtaatcgtgcggagtgtagagcagctttttctgctccagcaggcgcatcacattggttttttcggttttatcctttgccataactatttctcccccaaaaagccggctgccgccggtctcaaatcatcggttattgtcttcctcccgctgctttttgatcttctcctgccagcacttgtagcacatggccacatagctttcgttgccgcccaaaaagacctgctcgccctcggtgacgatgcgcccgcccgcaatacgggcattgacggtggccttgtgcccgcaggcgcagacggttttgatctcggtgagggagtctgcgacctcaaaaaggcggcggctgccggggaacaggtgggtcaaaaagtcggtgcgcagcccgaagcagatgaccggcatatcccgctcatccaccagcgtgcgcagctggtcgatctgctctggtgtgaagaactggcactcatcggcaatgatgacatccatgccggggtgctggtcaaatttatcgatgatattatcctccggcaggatgatatccgccttttttgccaagccgatgcgggatttgatgatatcggcgccgtcacgggtatccaccgagggcttgatgagccagacggtcatgcccagctcctcgtagttgaacttggtaatgagcgcctgggcggatttggagctgcccattgccccgtatttgaagtacagctttgccattttcgcgtcctcctccgttttggtgccagccaccggctcccccctcccccacctctaccccgggcaggggatctctgtctccattatagcacaagccgaaaaaaagcgccatcccatgggggacagcgcttttactaaaatttcggcttattccttgacaagctccttgacggaggccgccagacccgccattccctgaatctcgctgggaatgatgatcttggtcgcctggccgtcggccgccttcataaagctctcgtaggccttcagcgtcagcacttccttgctggggcaggcctcgttcagcaggcggatggcatcggcctgcgccttctgtaccagcatgatggactcggcttcgccctggccctcgcggatcttcttctccttctcggcttccgccagcaggatggccgcctgcttttcggcctcggcgttcaggatctggctttccttcttaccttcggcaatgaggatctggctgcgcttttcaccctcggcgcgcaggatcgcctcacggcgctcacgctcggcacgcatctgcttctccatggcgtcctggatatcacgcggcggaacgatgttcttgagctccacgcggtttaccttgatgccccacttatcggtggcctggtccagcgcggcggtaatgcggctgttgatgacatcgcgggaggtcaaggtgtggtccagctccatatcaccgatgatattacgcagggtggtggcggtcaggctctcgatggcgagaatgggccgctccacgccgtaggtatacagcttggcatcggtcacctggtagaatacgatggtatcgatctgcatggtgacattatccttggtgataaccggttggggtgcaaagtccatcacctgctccttcagcgagatgcgcttcgccacacggtccaccagcggcaccttaaagtgcaggccagtctcccaggtggtgtagtaggtacccaggcgctcaatgacgaactcggtcgcctgcggaaccacgcggatattggtaaccaacaggataatgatgagcacgagcagaataataatgattggcatataaattagtcctccttttctctgatgggggaaaccatcagtttaacacctacgatagatcttacctttactttagcgccctccggcagcttactgccatcggtggtgcgggcgctccagtccatgccttccaccttgatgcgtccggtcccggcctcatcgtcgatgggttctaccacctgcccgatggcgccgatgacgctatcggcattggtaggggtctttttcacccgcagcaccttttttacaaacttgcgggtaaaggccagcgttaccccggagatcaccacaaatacaacaatctgcaccgggatggaaccacccaggatcgccgcgatggccgcggccaccgcccccaggcagaaccagatgctcaccatctgtaccgtggcggcttctatgatgagcatgaccagcgccacagccagccagatgagcggctgggcataggccgccagaaaaacttggattccattcatcggcagcgctcctttctctcgccttcggctcccttcgcctttggcagtttcattatatcatattgcggtatctccccgcaagatgccatgtatcattccccttcaaactgtgcgcggataaagcggtacacatcctccggttcccgggccacggcggcacaatccagaccctccatgctgccctcctcagcaaagccaaatccataggtcagcggtacaaaggccaccccggcttccctggcgccctcaccatcgtaccggctgtcgccgaaaagcaccgcatcctctgtccccggccagtccagcagccgcatcgcctcccggatggtatccgccttggtagggcaggcctcgctgcggcccaccagcgcgtcaaattccggcgccaggtcatagacctccagcgtagccgccaccatgcggtccatcttcagggaggtcaccgcgcatttgccgcccttttccctgatcagtgccagtgactcccggatataggggtacagccgcgacttcgcgatacagttttcctcggtatagatgcgccggtagatctccgcccataccttggccgtccggggctccagcccgtaataggtctccatcgaccactccagcggcggcccgatgaacttctccagcgttttctgcggcaggggctccgcccccacctcccgctccatccggcgcaacgcctccagaatgcccggtgaggtatccaccagcgtgccgtccaaatcaaatagaaacagtcggtaactcattttttgctctccactcgcttatttttcgggccgcggcactcggccgttctctgcaagccgcaggcatacggcccgcagggcaccccgtccctctgggacggggtagagggcggctccgccaccccctcgcccggcctgcggccgggcggccctgcgggctggcgctcttggcaggtacccgcgccctgccagctaaaccatcggcggctcctctgccgaagaaccgccggttttcgccttttcagcgcacttttttcagaattttcggcctaaaccagttgcggtaggccagggtgatgttcttcaccgcgccatcgtaaatgacaaaaaacacattggcaaaggccagcagcaccagcaccgagtacttgccaaaatccccgaattcctccaaaatctcggtgatgccaaatacattgacgatgacccagtaggccgccaccaccgccgcgttaaaaatcaccagccgcaccacccagctcagcaccttggggcggatcttggcaaaggtctcctgcaaaatgggatagtacccaaaaaacgcgataaacagcagcgccgcttccttgatgggcactacaaaaacagataaaagcgaaactgccgcaaagacgatcagcgccgtggaaagcccattttcctcccgcacggcaatcagcaccagtccagccagcgccggcagtgcgtagtaggaaaatgggatcatccccgtagcaaacatcagcgcgatgcacatgccggtagcaataccgcccagcgccacctgtccactctttttctgcatcagcagccacctcccatgcattggcagcaggcattggcacagtacagcgaagcgcacacctcgcacatactggtgccgcccgcctgggcatagccccgctgctgttgggtcagctggttcagcgcctggcggtactccatgttgctgggctccatggcgcacgcagtgttcaggtaggtcacggcgttatccagccagcccttgcggtagtttactattcccttcaggtagttccattcggcggtgcgggcgctggcggaaatcccatccagcagctcctcggcatcgcccagccggttcaggttgatgagcctgcgaatatccgcgaactgagaggaaccaccgtagttctgctggtacccgccgtaattccgctggtagccgccatagctctgctgatatcccccgccgtagctttgctgtccgtagccgctgccgccgcttttgcgctgccgctggatctcatcgtacgcctcgttgatctccttcatcttttcggtcgcaaggtcggaaagcgggttattcacatagttatccgggtgatatttccgggccagccggcggtaggcgtccttcacctcatcgtcggtcgcgttcggacttactcccagcaccttgtagggatctgtcatttttctcgtttcctcctttgctttgggggcagttgcagttcttccaccgtctggggcagtcccagccggatgatattctccagtatgggtccaaagtgccgcagctccagcaggtccagcgcggcccccatctccccgatggtcaacagcaggctggctctggcgtggcgcttcagcgcctccggttcatcctcacactgtaaaaaggggttaaaatccccgtgctttttatctttttcccagtcgtccagcgcatccgccatgtaaatataccgccccagcagataccccagccgctccagcacccggcgctcgcccggctcctcactcagcaggctcagcatcgccgccgtcattttggcggtcggctcgcacagctcgtccaggttggtatccccggcggcctccagcgctcgctggcggtccatctccccggcaaataccgcatccactgtgggggttttttccgccacccggcggtactgccgccgcagcatggcccgcagcagccggccgccgcaccggccaaagaatcccccatcggcaatggtatccgccgccttataccacaggctcaggatggccatatccgccgctcggttcagcgcctcgttttcctcgcagtgccggcagcgccgcagcgggttcaccccgcagcttctccggcggaattcgggcacttcctcccgcagggccatctccagcgtggcgtaaaaggtaaagtcatagctcagcgtcagccgggccagcggtccaaagcgccttcccagggtgcggcacagcccgcagtagatgccccggtaggcttcccattcgcacaggcgcagctgcggcgtgcaggttttgatataaccgaacatcccgccgcctccccgctgtacttttcccctttatcataccgcagtatgataaagattgcttgaacaatatgtaaatataaaagcagtatagcagatttttggctgcaagacaatctcccccgccccccgcgaaagcaaaaaagtccggatttctccgaactttttctcatttcttttgcaaagcagggcaagacctctccgcgcctatttttgccgcagaagtcagttgccgcactcgatactgatcttggtaaacaggtccagaatatcgtccacactcatgtgcttcttttcctccccggcggcatccagcaccaggtggcccttatccatcatcagcaggcggctgccgtactccacggcatagcgcaggttgtgggtcaccattatggccgtcaggcccttttcccgcaccacacggtcggtcagcgccataatggtatcggcggtcttggggtcaagggcagcggtgtgctcatccaggatgagaaaatcaatgggcgtcatggtggccatcagcagggccacggcctgccgctgcccgccggaaagcgcccccatcttaatatccatcttgtcctccagccccagccccagggaagccagctgctcccggtagctttcccgccgggcgtggttcgcgccccggctcaggtcataggccttgcctttgttatccgccagcgagagattctcgaacatggtcaggttgggactggtacccagagcggggttctggtacacccggccaaagcggcggtaccgcacaaattccttcttgtgcagcatgctttcgccgtcaatgatgacatcgccgccctggattggaatgctgccgcagatgatattcagcagggaggtcttgccgctgccgttgctgcccacgatggaaacgaactcgcccgcttccaccgaaaggttaaagtcccggaacaggcaggcctcagtgatctcgccggggttatatattttggtgatatttttaagctccagcacggtcggcgcctcctttccggccgctcaggttcccggtgataagaatgaccaggaacagcgccgcggtgataaatttcagcatattgccgggcagccccagcaggatcgcgatttggatgcaggccttatacaggatgctgccgatgaccacggcggccgtccccttcacaaagctcatgcggcggaacagcgtggtaccgatgatgaccgccgccaaaccgaataccatttgtccggtgcccatcgtcgcgctgaaggagcgtccctcctggcagacaatgcacccggaaagcgccaccaaagcgttcgcgatcaccagaccgagaattttcatgctgcccttatccacagccagggtggtcaccagggtatcgttatcgcccaccgcccgcagcagcaggccgttcttggtggaaaaataccactccagcaccagcccgatgagcaccaccagcaccagcgaaacaatgagcttgcggtacaaaagcggaacgctgcccagcagcgccatcaccggggcggaggtgtaaatggtatcaatggcccgctccaccatcaggttggagccggcgatctgcaaattgatggaatacagcgccgtcatggtgatgatgccggccagcaggtccctcaccttggcccttacatggataagccccgtacaaagccccgccagcgccccgatcacaagggcaatgggcagcgtcagccaggcgttcaccccgtgggtcagcagcacggcggtcacggcagcccccagcggaaagctgccgtccaccgtcaggtcggggaaatccaggatcttataggtgatgaagatgccataggataaaatggcgtagatgaggccctgggtcagggtcccggcgcaggtctccagtatcacattcagcatggtgtactccttgcggtcaaatcaaaaattcaaagcaaacatcaggcgttggcgtcaatggcgcggccggccagctcctccggcagggtcaggcccatctcggtcagggcagtgtagttcacatacagtccgtactcgctgatggtctcatagggcatctcctcacaggtggcctcgcccttcagcaccttggcggccatttggccggtctggcggcccagctcatagtaatcaatgccgatggaggccacacagcccttcttcacctgctctatctcgctgccgtaaacggggatgctcttggcgttggtcttttccagaatagccggcagcacacccaccacattgttatcggtcaggttgctcatgcagtccacaccgcgggccagcagggtatcgcaggcctgcaccacctcggattgcgcggtcacgcccaccgcctcgatggtaaagccgtaggccggggccttttcctcgtactcggcaatggcggaaacggagttcggctcgctggtggtatacagaataccgatggtcttggcctcaggctgcagcgcgcggatcagctccagctggccctccacggccaatttatcgctggtgccggtcacattgccggtatccagcttggcctgtaccgggtcggtaatggcggtaaaaatgaccgggatgtctttattctcagcggcggcgtagcaggccgtggcgctgagggtggcaatgccgcacatcagggccacattgttggcgctaaagctctcggcgatctgcttggtgatgttatcatcaaacccggcgttctggtagtcgatggtatagtcggtgccttccaccaggccggcgtccttcagcccctgcagaaagccctcccggcagttatccaggctttcgtgctcgccgtactggctgatgccgatgaccggggcttttttctcgccgcaggcggcaaagcagaatacgaacattacggcaaaaataagggcaaaaacttttttcaggttggttttcatggggttatctccttttcatggtcagtagtgattttattgatttcgtttttccaggggcgggcaccatcgccgtcccggcagtattctctctttcatcgcgctcgctcctttcccggtaaaataaaaaatcccatcccaagaaaaactcttgggacaggactgaaaatcagctctgcggtaccacccgtcattgatgctttgcagcatccgctctgttcctacacacatgatgtaagccgggatggataacggggccggtttcccgtcggctgctactggcgcattctctgcgtgttcggccgccctcacgagtccattcgccgctcctcccgttaccgcgcttgcaccctccgcggctcgctatcaacgaaaactgaccggttactcttctcgatcacaggttttttatttgtggctattataggccatgccacctcatttgtcaatacaaaattttgcaagttttcattcaattttaaggttcattcttttctccatatccctcaaagatatgtccggaagccggcaaactctctcctgcggcaatccatcccgccaaaaaagcattgcgggtagcggcaaacaattcattggcaattgtgtcgtattccgcactgtccagatactcaccaaatgccttttcaaaattattatccatcatcatttatccctcccactttttacattctatcacagatttgacgaaaatacaatctaatttaagtatttaatcatattagattggataaattattatcaaaaacctctaaaataataggcagaggtggtgtatatggataagcattataatgactatgtgcaaattgggctgaacatcatgcgctaccgtaaagaagcggggtacacccaactgcaacttgccgaaatgactggttacagtcatcaacatattcaacgggtagaaaccgccagcagcaaaccaacggtcggcctgctgctggatgtttctcaagctctccatgttcccatcgagcgccttttagaaatcagacctgtcaaataatcggagaaccctgcatgggttctcttttttacttttactcctcatgctgatagctttccgtctttttgcctttggcggcagcatcgtacatcccgttggctgccagcgccacaatgaccgcgttcagcaggcacagggtcaccccctgcaccgtcaccggctgtccgccaaagatctccgccccgatcagcagcaccacggcgataacataggccaccagctggctgctccatttgcccagcggcgtccctttcaaaaactgcgtgatgagggtcaccatcatcaccgcgccggcatagccgcccagtgcctcccaggttacaaattcactcatactcatgctcctttctccagctcctctatgcggcggcaggcagcggcatagtcccgctcgtgctccgcaaattttttctccagttcatattgccgttctatcacggaattgtgttggttcaccttcttttccagctgctccagccggtaggcgataagggcggtggcccggcggttggcaaaataggtgccgctcaggctgcccaccagcgccagccccgccactatgatctcctgatccatgttcacacctcccagtctatcttatgcgcccagcacaaaggccggtgcaatgcccaggtcggcattcggggcctcgtagtaggcagtgccgtccttgttcacatggcaaaagccggcccaccccgccgccgggctgcggcaccaatcccgggccgtagctgtggtgcggttgtggcgcattttggctgggctgccggcggcatagtaggcatactgctgctggaagctctgctctccctcattggccatggtgcgggccccgtagtactcccactccgagagcaggaacagccactcctgggtagcggtcaccgcggcggcctccatggaattgccggtgttatcggtgtatttggtgcagggcttcatcaccgcccgcagttcctccggcagcagggccagcagcgtcccctccttgggggctagcacatcagcgctgtcgctgcccaggatctcctgccgcatatggcagccctgccagccgccttcactggtggcggtggtgttcatggtaaaggccccggccaggtcgctgaagctgccgtggcgtttatccaccagggccaccggggtcgcccccaggcgcgccagctggaagtggattcggccgctgccctccagggcggcattgtggtcaaagcccaggatgatggccccgatggtcagatcggtgacggtgagcaggccggccgtgccgctgatggtcagctctttcacatcccccggcgaccacagccgggcagctatcccggccgctgccgccgcggcgatctcggcccaggaattttccgccagggtggtggaatacagcggcagggaaagacttctctgccccgggacagccagcgtgccaaagccctttttgccccccagtacagcggtaaagctccagcggccccggcggggcagcttcatggcgcaaaggccgttggcatcggcggtggcggtcagggtaaggctgcccagggcggccgtgacgactgccccggccccggtggtgactgtcaccgggcagtggggtctccccagccagatggggctggcatagacggtgctcatgcggcggccccctttcggttttttgtgttgtgtttcatcggtttcctctctccggcctcgtggccgggtcgtttgattttgccggatgggacggctcccccctgccgcggcaggccgttcccccggctgaagctgcgccaaaagcccggttgacaaggcggcagccaaagtccgtttggcttttgattcggcacttcatcggttttctctctccggcattccgccggtcatttggttttcgccgggtgggacggctcccccccgccgcggcaggccgttcccccggctgggacggtttcgaaagctcatgttcgtgtggattaaaagcacttgacaagggcagctttttgcggtatgatagagatggaaaccgcttgaacaagcgaaaaatcatacaaaacagagcgtttggggaaagtcccactttccattgtagctcatgttttgcgtgatttcaagtgttttctcacgatttgtgagtttttgtatatttagccaaaatgaggagagaaaatatggatattatgctgcaaagaattctatccctgatcccggaccggcatggggcggatgcggaatttgcccggtcgcttggctacaaaagcggcaatgtggtggccgactggcgggccggacggagcggctcctaccggggaaagctgcgggagatcgctgaaaaatacaatgtgacagtggactggctgtgcggcaattcgccgcaaatagaaaagcccgccctcccggcggaggacggactgggtggggagagcctgggggcgctgctggcccggctgaccccggcggaaaagcagcgggtaagggactttgcggctgggctgctggccgcccggaatggttgaccggcggcagttttcttctcggtttctctcctgggataaggggctgccggctgctttccacggttttattgtagcagatgatgagtcccataatccggactgaaagtccatgcgcgcgtacatatacacgcatgtagcgcgcgggtacgggcgggtgcacacgcgtgcgcgagaggaaaaatgtaaaaagttttggcgccggcctttttcaaaaggcaggtcgctcgccgcagcgagcgaaataccattcgtgcattagctcaaaaatatcagctagatatttttgcggaaagcatcccacacagactggccccatagctctccggagggcgctctaccgggggtgaatggacaaaacgacccggtgtagtcgttttggacagaggggctgctctgcaagagagagcggcccctctgttttgatttaatcagatttttctttcaccgaacaggggaaaatagcctattccgcatttaagctggggcagactggtcctttatgcaggctctgtgctccccaacgcaccaaaaagaaaaagacggccggtaatatctggacaagcctgcgccttcggagggaaagatagtgtgaaagaaaaccgtcagggttgtctttcgcgtttcatcaggacacagactggtcctttgcgcaggctttgtgctccccaacgcaccaaaaagaaaaagacggccggtaatatctggacaagcctgcgccttcggagggaaagatagtgtgaaagaaaaccgtcagggttgtctttcgcgtttcatcagggcacagactggccctttatgcaggctttgtgctccccaccgcaccaaaaagaaaaagacaccccaccgcattctttgtgattccttcatacgaaaaaacagtatcatattcttttggcgaattttccgcttcgcaaggaaggggttgtgtgaagggggaaccatagcgggtttccccttcgcgtttcattagggcgcagactggttctttgcacaggctttctgctccccagtgcaccaaaaagaaaaagacgcccaaaggcgtctttttctttttggtgcggaagatgggacttgaacccacacgtcatggacacacgcacctcaaacgtgcctgtctgccgattccagcacttccgcatagcgctttattattataccatcttattccctgttgtcaagacggtttctcgtcaaactccatcaaaaataaggataaaatttagggggcaaagggggttgacatttttgaatcattacgaggtgttttagggccttgcctgccggaggcacggttttccacacccatttagtgggatattgtcctcaaaagcccttgattgtcacaattttgacacaaattctggcttttccaccccgcaaatgtggaaaacccggtggaaagtgtgaaatactttccgtatagcagcctttacaaatcgggggcgcggtgttgcattttttcccaaaaaacgatatactgaaaagcgaaaaatcaccccgcaaggaggccgccatgcccacacttaccgatcccgccgtcatcaaggagctgctgcagcgccatgggttttccttttcccgcgcgctggggcagaattttatcatcaaccccggcgtatgccccaaaatggcggagctgggcggcgccgcccccggtgtgggggtgctggagatcggaccgggctttggcgtgctgacggcagagctgtgccgccgggcggaaaaggtggtggcgatcgagctggatgaccggctgccgcccatcctggcggagacactggcggaatttaagaatgtgaccatagtgcagggggatgcgatggtgctggacctgccggcgctctttgcggagcactttgccgggatgccggtggtggtgtgcgccaacctgccctactatatcacctcgcccatcatcatgcggctgctggaggggccactgcccattcgctcgctgacggtgatggtgcaaaaggaggccgcggtgcgcattacggcggcgccgggcacccgggaatgcggggctatcagcgcggcggtgtggtattacagcacgccgaagctgctgttcccggtctcacgggggtcttttctgccggccccggcggtggatagcgcggtgatccggctggacctgccgcaggaactgccggaggacctgccgccgcgggaggacttctttgcagtggtgcgggccgggtttggccagcggcgcaaaacgatgctcaattccctttccgccgggctgcggtgggagaaagacgccacccgtgcactgctgacggcggcgggtattgccgaaaatgcccgggcggagcaggtgacgctggagcagtggaaggcgctgacgcgggcgtacttttctatgaagaaaagcaggtaaaagacctatttaagccaagatagtggtcgcctgacggcggggcgaggccttttacaaggcttggcgagcaccgctgccgcggggggcaggttggtagtcgccttcggcgtcgcggagattttgtagggtgcaaagccagcacgcctacccggcgggggcctacttttgttcgtgcaaaagtaggcaaaacacgcttggggctgtgccccaagaccccctaacgctcaagctgcggctggatacgaacgatgtaaacatcgtccgtacggcgccgcagatacgctctcaaggtgcctgcggcgcattttattttggatacagcagagaccgaattaaaataaacaccttataagcgtcgtctagccccagatccgggaggctgtaggccttccggtcggggcgtaccgacgcgttgggtctttagggcggagccctaaatgacttttggttacttttcttcacagaaaagtaaccccccgccgggcaggcgtgcagtttatgcctttgcaaaaggctccgccccgccgacaggcgagatgatactttggcatgatttgtgccatcaatcctccggttcgctccgctcaccacctccctttgcacaagggaggctatgggacggtgccctccccttgcacaggggagactatgggttggggtgagatgggtttggccgggaaaagaaaaaactccccgtatggggagctttttctatgtacgcttattcttcctgcggttcccccttggggtggttcaccaggtaggagagggtcagcaggctatcgcccaggtggacattgaccgaaggatattcctcatacttcagcttaaaatcgtagctggagaaattccagaaggaccggataccggattccaccagtgtttccgccatctgttcggcggcatcccggggaatacacaccaccgccatgtgcgggccgcgctgacggcaaaattccggcagggtggcaatatcctgcactgtcaggccattgggaagcacctgaccgatcttctccggggatttatcgaaggccccaatcagctcaaagccgcggtcccggaacaggtcgtcctcccggataaggctttggccgcgggtgccgcagccgatgagaatggccgggatctttttttcgacgcccaggatagcgccgatctctttatacaatagctccacattgtagccatagccctgctggccaaagccaccgaagcagtttaggtcctgacggatctgactggcggtgaccttcatctgcgcggccagctccttggaggagatacgggtcacgccgctgtgcagcagcatccccaaatagcggtagtaccgcggcaggcgccggatcaccgaaatggaaaccgttttttcgttcatgctcgctcacctcgtattatcctgcggcacggtggggcatacgcggggtgccgctttacctatatgataccgctttttcggccgttcgtcaactttttatctaattttggggaggcacctgcttatgcacaattgcaaacatttcgtgaaaatttctcactttcgtttctttttgcggtgggatttgttataatgaaaataaaagtacccgctcctgggcggagcgctatgcaaaaataacataaaggagcgttgacccagttggtgactacccgcaagccacaaaaactgcatcctaccgtgctggtattggtgaccgaccagcttagctgcgaccgtttgatcctggccgggagagccctagccgatgaacaccagtgcgtactggaggtacagaatatcgcgcggtttggcaatgtgccggaccccgccgctatagagcacctgtaccgcaccagcctgaatgccggcgcccgcatgaccgtgcattacagtgaagaccctgaacgcagcctggtgcagctgctggcggatagtctgccccactatgtagtgaccggtatgcccggcggcggcagcgacctgctgccccggctgtggactcgctttgagtacctgaccttttacaccgtggaccctgccggcgatgcgcaggaggtgaccgcggtggaccgcgcgctggtgtaagtgcaataaaaccgaggaggacaaaagaggtatggagaagagaacctttactctggattccagcgatggcaaaagcaagctttcgggctttttattcctgccggaaggacacccccgcgctgtggtccagatctgccacggcatgtgcgagtacatcctgcggtacgaggagctggcccagcacctgaccgacgccggttatgccgtttgcggtattgatcacctggggcacggctccaccgcccgtctgaacaatgaaatgctgggctactttggcgaaaaaggcgcctggaacaacctggtggaggatcaggagatcgagcggaaggccataagcgcccactttgccgggctgccttacttcctgctgggacacagcatgggctcctttgtggcgcggctgtacgccgcccgctacggaaaaaacctccaggcgctgctcatcagcggcaccgccgggaagaaccccgccgccggtcccggcaaggcgctggttgccttgatttcgctgctcggcggcaagaaggggacctccaagctgctgtatatgctgaccaccggcaacaacaataaacagaccgagcaaaagaccttggtggactggatctgccacgacgaggaggtctgccgcaagtatatcaaggaccccttgtgcagctttatctttaccaatagcggctacggcgagctgctggagctggtggaccgctgcaaccgtcccgaatggtatgccgccatccccaaggacctgcccgtgtggctgtacgccggggatgaggacgccgtaggcaataacggcaagggcgtcaccgaggtgtacgagggcctgaaggcccagggactaaaggaggtcaccatcaccctgtaccacggtgcccgccatgaggtgcacaatgaggcactgaaggaggagctgttccgggatatcattgattacctggacagccacatgcccaaggccgaatgacccaccgaaaagtacaaatccccgtcttttggcggggatttttgtttcatgaaacattttgccttcacttgacaagagctcatatgcttttgggagcacacaaaaggcggcacagccaccagtactgcgccgccttttgcgggatgatctatcggaaaagtgtgtggtatgtatgggttacgcctctaccttgtttttctccgcatgcatgatgggcagccactcggtaaacgcaatgataagcgaaacaaagatacagatagggctgagcacgatgcagttgataaattccttacgagctgcgatgtacgcctgggtatgcataatgatatcctcctcataaacctctcggggttttggtttggtaccattatacggctgtccaacgctaatttttcggaaaaaaactctcccacataaatcttagcgaataatttatctttctgtcccggcacagcatggtataatgggttggaacattataaatggataggaggtgaacggcatgatccccaaaaaagaatgggcgcgggacaccctgcggatgctgcttctattgggggcagcggtggccgtatgcagcgtgctttcccgcgtgcacgatgacaacaacccctttgccgttctcatctttgtgctggctgtcgccatagtggcactggtcaccaacggctatgtgtggggtgttctggcctcggtcatcggggtgttctgcgtcaattacatgttcacctaccccttttggagctttgatatgagcatcacgggttacccgctcaccttcgtggtcatgctggtggtctcggtggtcatcagcacccttaccactcgggtaaagcaaaccgaacgcctgcggtatgagatcgaaagcgaaaagctgcgggcggatcttttgcgggcgctttcccacgatctgcgcacaccgctcgcctccattgagggtgccgacagcctgctgctggagcagcccgacctgagcgaagcggagcgccgtaccctgctggagcagatccgtcaggagacccggtggctgacccgcatcaccgaaaatatgctctcggtcacccgtatggccggggaacaggtaagcctgcaccgcaccgatgaggtggtggaggagattgtggacagcgccgtgatgaagctgcggcgcagccgcaatgccctgccggtcacggtcatccgcccgcaggagatcctgaccgccccgatggatgccaccttgatggagcaagtcattctgaaccttttggaaaacgcggtgaaccacgccgagggcgctacccgcatccgggtggagatcgccgggcagggggataccgtgatgatcgctgtggaggatgacggcgcgggcttccctccagagctgctcccccagctttttgaccgcaagctgctgccgcagccgcgctcctgcgctgatggccgacggggactgggactggggctcacgctatgcagcgccatcataaaagcacacggcggccgcatgaccgccgaaaaccgccccgagggtggagcgcgggtatgcctgtggctgcctgccggaaccgaagatgaggaggaaaccgaaggatgaaacactgtgataagatcatgatcgtagaggatgacgccggcatccggcactacctgcaaagcaccttgagcaacgcgggctatgataccgtcgccgtgggggatggccgctcggcgctggcgttggcggcctcccactgtcccgattgcgtcctgctggacctgggcctgcccgatatggatggcattggcatcattcaaagcatccgcaaatggagcagtgttcccatcattgtcatttctgcccgcatgaccgaggacgacaaggccggcgcactggatcttggtgcggatgattacctcaccaagccctttggcaccgtggagctgctggcgcgcatccgcacggcgctgcgccacacccgcaaggcctgcggcggcgaggagctgcgggagggccagtacatcgtgggggatcttgtcattgactacaataagcaccgggcctacctgggcggcgaggacgccggcctgacccccagtgagtttaagatcctggcgctgctgggccgctatgccgggcgggtgcttacctaccagcagatgctgcgggagctgtggggccccgcggccaacccccgggataataagctgctgcgggtccatatggccaacctccgccgcaagctggagaaaaatcccgaagaaccccggtacctctttaccgaggtgggcgtgggctaccgcctggcggagggggaaggcaccgaaccgctggagtcagattccaccgaggaaaccgaagaataaaaaaaatcccctgtccacccgcgtgggtctggacaggggattttacctttgcttgacaaggacacacacgcttttcggagtttttgcgcgggagaaatggcgtccgaagaagcgcggagcggcaggcaggctggcgcctgtcaacgcgacgcacaaagtcggacggtatttatatccgcaaaagccgtatctgctcttgccaagcgaaggtatattcatcacagtggcgggaagaattcattctcccgccgttttgcgtaggtctgctccagcatggcacggtgggagcaaaacgccgcgtcggcgaaatatttggccccggtggggcatccctttacacaggcctggcacttgatgcagatgccgccgcattcctccggggtctctcttgggatggaccccatggggcaaagctccgcgcaaagcccgcaccgggcgcatttcagggggtcggtcagcggcttcgccttcaaaaagcgcactggttccccatccagtcccagcggggtgtagtagggcccaatcggctcccggccgggcaccgtgacggggatggggtgttccctcccccgcagcgtcagcgccgttttgcgggcaaattccgccgcagccgcacggtcctccccgttcggccggccatgggccagcgccggcgcaaaggcatgctcgcccaccattgccgccgcagccgccgggcaaaagccgttcccggaaagcacctcgcacagctccttcagggcgtcatcatagccgcggttgccgtacagcaccaccgccacggccgccgcgcccccgccggtaaagcgtccccgcaaaaagggcagcagcacattgggcagccgccccgcgtaggtcgggctcccccagaatatcagatctccttcgccaaaggcatagttttgttcccgtgccgggggcagggtgtagtccagctcccgcaccggcagggccagcgcttccccggccgcttcggccatcgcccgcagcacccgccgggtactgccgcaggcactaaagtacaccgcccacacgctttcaaaacgcataaatttccctcactcggcaaaaagcgccgcgtccatttcccgcaggtcgggggcaatcagcggggtaaattccatcttctccagaatatcccttcgcaggtccaccccgggggcgatctcgcacagcagcaggccctccggcgtcaggcggaacaccgcgcgctcggtgatatacagcacctgctgggtccccttttggttggagtactccccggaaaaggtgatatgccccaccgcctgccggaacttgcggatattgccgtcctttatgatgcgcagccggccgccttccagccggatctcgctttccccggcggtaaagctgcccataaagcacgccttcttcgctccctgcgagatattgatgaacccgccgggcccggggatcttctccccaaagcggctcacattcacattgccctcccggtcaaattccgccccgcccaggcacgccacatcaatgccgccgccatcatacaggtcaaagatatccggctgctttatcatggcatcggcattgtaggcggcgccggtcagcaggccgccctgcggcgccccgcctatcgtcccggattcaatgctgagcgtcacccgctccagccgtttttcctcggccagtacattggtgataagggtaggcaccccgatcccgaaattaacaaagtcaccgtcctttatttccgcggcggcccggcgggccatcacctttttgatgtccggcggcaccggcggcagcccctccagcgggatgcgcacccgcccggtaaaggcctccacccagcgctcctcggtgacaaactgctgccgggagttttcctcccgccccaccacgatgtaatccaccaggcagccaggcaccaccacatccttggcgttcatggtgtgggcgggcaccaattgatccacctgggccagcaccagcccgccgctgttgtgggcggcggcggccatctcgtactgctccagcaggaaggcctccttttccatgctgatgttcccatcggcatcggcagtgctgcccttgatgatgcagacatccagcgggaacgccgggaaaaagagctgctcctgcccggccagctccaccagctgcaccacttcctcgccgctttcccaggccttttggttcatgcggcagccatcccgccgcgggtccacaaaggtcctgagccccactgaggtcagtacccccggctttttgccggcgatggcccgcatcatgtgggacatgaccccctgcggagccataaacagcgcaaaatccccccggctg

SEQ ID NO: 2071 - DNA, 32759 bp, Unknown
  16S sequences of unknown bacteria
ggtgcgacagccaaagttaattgttcgactgcacgaaaccggtaagccggaactccgcacttacatagtaagtgcaaggggcaggcgtctgaacctctctgcgttccccctgaaaagggcgccccacgcgaagtggaataattaaatcggaaagacgaagtctttctactattccctcacttgaatcttaagtgaaacttcatcgggggaagtctcttagaaggctacagtcgtctaaggaaaaagaaatacgccttatttctttattattttctttctcagttccaccatgcctgacagaactgtccgtcgatgtaggagaaaatagcgtagtcgagaactacaagctggagtgtgtgccattcgtcgtatgcaaggctcttgtcaagtccgtcatcattgtaagcgtcggtagttcccgcattgaatgtctgccagcatccctttgtgtttgaccaaccgccgcagttgtagagaacataggagggtgtgtcaaggtttatagcgccgagaattgtagctccttcagctcctgcaacaggcataacgtccatcgagtaaatgtagtttctccatgtcgtgtcgccgaagtaggagataacgcccgtcatggaagagtctgtctgatggagagtgccgtcttcccactcaaataccgcgggatcgcctgtgtatgtaccgccggagtatgtagcaaggtcgtgcttgaggtcgtcgagagaggacgcgtcgtcgaaggtgttttcgtaaagaacgcttccgtcagtgaaggatacgaccttgaggttgtcgacatacgcttccgttgaccagtgaccgaagcctgccgcgcctgcaaatacattagccggagcttcgccgccaagctggaatatctgctcgccgtttacaaagcctctgaccatgtccgcgcctacgtttacggaaactgtgtattcctcgccgtagttcagcgtcatcggaatcttgtccgtgtcggtctcattgccgtcaacaaagcactgtacgcatgctacggtattgccccatccgccaacgttgaaaacatagtagttgttctcgtcggtatatgcgaagaatactctgagagcttccgcgccctcgttggctgttccctttaccgtaaggttgtagttgccccaacgggagtctccggcaaggagtgtcgcgcctgtggaggatgtgtcggtgaatgtaacgccgccctctcccagtgaccattcgtcggtctttgaggaatcccatgagccgccgccagttgtagcgaatgtccagccgtcgagattttcaaactttgtgtcaagcagtgtctttctgtccgcgttgtttactaccttcacggaagaatatgttacgcttgtagagtatgtaccaacgccgacgcttcccgtgtacttgttagccgggtcgggagtgtagacatactcgtcctttttttcttcttcggtctttccctcaggtgcggcagtttcagcctgagtttcgccctcggtttcagctgtcgtttcggttcctgtagtttcgggtgtgttttctgtgccggttgtttcaactccgccgcccgagcaggaagcaaagctcatagccacaagcaccgcgcacaggataagtgacaatgtttttttcatgttgtcctccgttaataatgttgtttatatctgaaacagccatacgctcggctgaatcaatctattttatccgttttgaataccattccgttctctcgcgaatgaagttcttcaggtattctatgtcgtcgtcccaactttcacagccgcagtcgacaaaatactgttttttgttcacaatgtagttcatctccgcgctttctctgatgtactcagcgtaggagtccaccttgtccggcagtgcgtcgaaaagctcgcggagtccgccgtttttgtagtattcttcaagagaagctttgaacgaagtgttgaaatacagcttgccgagccatcccctgtcgtcggagtgccagccttttttcatgaggttttctcccccgccccagattccgaacgtattgtccatatcccacacgggtcccgcgtagagcttttcctcatcggttatgtagtagaaatagttgcttccgatgaacgtgtcgttgttgcgcgataagtcttgcagccaccagtatttcacccacgaatcctcgtcaagcacatcgcgccagccgtcggagtcttttttccacacggctttttcgatgtttttcatggcgcgctctatctcgccgagcttttcgtagctctcgttgttgtgcatggtgaagtgatatccgcgcggagtttcggctacccactgctcgttcatgtagtagtggtcaagctctaagagaaaatcgctgtccttgtcgatgttcacccggctctccccgacttctaccttttccgagagagaatacgagcccttgtactccccgtcaatgaacacgtccaccggctcgatatcgggggtatatgcaagtcccatgtcgtccgcgaggtcgtaaagcacctggtctcgcaggagggaagcgtccattacgttggcgagcaggagataattcttcgcttttcccatgccgagcagatccgttttcttctcaagcgtgagctgatacggcttcttctgctgattccacgtccagtttccgcgcccgcgcatcttcatcgtgccggaggttgagtagtcgttttcctttgagcggtactccgttttccaccctctcgccgccgccgtcttgtcagataccgtgagcgtcatgtctccgcagcagtaggttgagtgagaggcgtcggagttcacttctttcatgctcccgtcggtgacgtttatcatgagcgagggaacggacgactgcatcgcgactacgtcatagtaaacgccgccggaatacacgccgtagtttgtgtcggagttaaagttcagcgtgtatactcccgtttcgcatccgtccgagtggagagctcttaccgcaaccgcgcctttgtccaccctgcacggcagaaagagatagaatacgcctttcttttcgcttttgtacgcttttatgtcgtatccgtcgggcagtcccgcgttgtcctcggcatatacggtgatagtctcgaccgagccgaaagcagcgtcaaaggagtcggcgtacattgtggacactgcttcggcgcgcgatgttctctcgaccttgccgttctttgagactgagttggtgtttcccttattaaagttcaccgcgtcagcccatgccggtttttcaagcgaatactcgcccgttgtctcccgagtgtccgctgtttcggtctcgttctcgtgttcgtcgagatgtacgtcagccgagcatgagagcagacacaggcacaaaagcatggctgtcaattcttttcccgttgttttgtttctcatatactcctctgacgcgccgaaaatcgttgatttaaagcatttaatatagtgtagataaacagttatcgtttttttgaacaattaacatttttctctacactttattttataccattttgccgcataaaaactcgcctttttcttgaaatttatggacataatttgtctttttgtgtctcatcttattgacatgcgcaaattgaccttttataattgaattgcattgaataatcgtttaaccagccgtccgacgctcctttacgcggggctgaaatcttaattaaaataaggagaatgctatgaaaaaagcaactaaacttctctctttgcttctcgcagggcttttgcttgcatcatgctcgaacgccgcaggaggacaaaacgaaacctctcctgccgataccgtcgcgctgccaagctcatccgaatccgccgtcgaaagcgagtctgaaacgacctacatccccgacgacctcaaggatgaagacttcggcggttacgctttccgtattctctcctgtgttttctacaataaggagcttgcaacatacatcacatacgatgagctgaccggcgtacccgtagacgacgcgctttacaactccaagacaaacattgaggacagattcaaggtcggcatctcgtggatcgaaaccggcaacgaatccgcaggtctaaccgccgcgaagaacgccataaacgccggagagacgcgtttgacattctcatcggacacgatacaaacaccgtaggactcggaaaaagcggacttcttcgcaacatgtacgacctcgacgagttcaactttgagaagccgtggtggccgaacaatgcggtcgaatcgtggactgtcgccgggaaaatgttcgccgcgtcaagctacatctcctactgcggtattcactggacacgcgccatgactgtcaacaaggactgggcggaagagctgcaaatggaaataccgtatgaagcggttcgcgagggcaaatggacgcttgacatgctgaacacgctgacagaggatgtttcatacgacgtcgacggcaacggaaaaatgaacgaaaaggacaaggtcggctttacatccggtactcagacatggtactgcttacaggagggcgttgatctccccatataccgcagagacgacagcggcagtatatacctcgaccttgacgttgaccgtgcggacaagtttctcgagataatgcgcacactcacacagaaggacagatacgtgtcaagcggcgacttcggtgtaaagatgtttgaaaacggaaacgctctctttgcttacacacaggtcggcgacgcttacgactactacagaataagcgacgttcgctacggcttcctcccgacgcccaagctcgacgaggcacaggaaaactacatcaactgctgtaccgacgttccgtgggctatcccgaagactgtaatgggcgaacagcagcacgtagtcggcacaatctgcgaggctatgagcgcgtacaactacaatcacgttctccccgtatacctcgaaggcgcgctgaaatcccgtgcggcagattccgcggacgacactgaaatgctccagataatagcagacacaagaaccatcggcttcgcttacggctacggtctccagataaacaacatcctcggagatattcttgataacggtcagggcgcggcgtcatacttcaagtcaaaagaaaaaatcgcagagaaagctctcaataaaatgataagcaatttcgaggacatggattaattataataaaatcaaagagagaaactgctcacttatgtgaacggtttctttttttgtgaacaatacctacatacacagttttatcttttttccgtattacagcatttcagttaaaatatttaacctaagctattgactttttccgtcattaatgctatactaagtgtgaattagataacaaaagttcacacttttagaaccttattaacatttgtatagatttatttttacaggagaaatgcagaatatgaaaaagaacacaaaggtgcttgcgctcatactcgcggctatgatgacactttcctcttttgcttcctgctcggataagggaacaaacggcggaaatgacagcgaaacaaccggcggagacgctgcagccacggaaacaacttcttccggcgaagaaactacaggcgaaaccgaagaagaaagaatcaagcccgacattcccgcaaccgcagactacggcggagacgagattaacttcctcttctggcagctcagcgcctggatgggaacggtaagacagtgcagagacatttactccgagggtatcacgggcgaagctatcaacgacgcagtttacaaccgtaatatcaaaatcgaggatgcgtacaaagtaaaaatcgcgctcgagatgatggacctcgacaaaatctccaccgctatctctcaggaagtaaacggcggcacaaatacatacgacgtaatgtaccccagactttacgatgctccctcgctttatcagaaggcttacttccataatataaagaagattccgaacatcgacctcgaaaagccctggtgggactccaactccgttgaagctatcacctgctccggttatcttcccgctgtagctacgtccatcaacgtaaacgacaaggacgctaccgcagcagttgctttcaacaaaactatcgcctccaacgcacagcttgaggatatttattccctcgttcgcgaaggcaaatggacctacgataagctctccaccctcgccgaagctgcatatcaggacctcaacggcgacggcactatgactcccgacgacgacctctacggacttctcggcggaaacgatgttatggcggcattcttctacggctccggctccagtcttgtaacacatgacgaaacaggcgcgttcgctctcacattcggctccgagagagacatcaacgccgccacaaaggttgttgaaatgatgaatcagaaatggttcatgaaccaccacaccatcgccaacaccgacgacacatactaccgccagctgtttgaaagcggacacgggctcttcttctggatgcgccttgacgacgtaaccaacatgagagcgggagaggctgacttcggtatcattcccactccgaaatacgaggaatcacaggacgcatactacagcatggtttctcagcacaccaccggtcttctctccgtgccgatcactctcacaggcgacaagctctccgaggtaggtatggttcttgaagctctcgcggctgaatcacactacaccctcattcccgaatacatcgaaacatcccttaaaacaaagaactcccgtgacgcggaaagcgccgatatgctcgacattatcataaacaaccgcgtattcgacccgatgctcatatataacttcggcggtttcgctgacgcatttatggatctcggcaagaacaacaacacggatatcgcttcctttataaagggcaagcagaagcttgttgacaagatgataaagaagacgacggaagctctcgaagcagctgacgcagaggcataaagctcgtttgtaattatatttgaaatctccttaacttcataatcggcaaggcgggtctgaataaggctcgttttgtcgtttttcaaggattctttacagaaagcgggaattgcggacataattttatattgacacatcatttgacaaatgttataataatccggcgacgataaacgtttaattaaaaactataataataatttgtaaaaggacggtaaatcatggcaaaactcaaaagaaccatggctatgctcatcgcgcttttaatgcttgttcccaccctcgcgtcttgctccgacaacactcccgccgagacaaaggaaacgacagctcagcaggaaacctctcagactgcggaatcaaccgacgcgtcatccgatgagagcgaaacagaggacgaacgcattaagccgaacattcccgaatccgctgatttcggcggcgacgatataacattcctacactggtacaatcccgcgtggaccgagacggtacgtcagagccgcgatatttacgcagaaggcattacaggcgaagctatcaacgacgcagtgtacaaccgtaacgtaaagatagaggacgcatacaaggtaaaaatcgcgcttcagcttgaacagagcaccgacattgcgtccatggtaggtcagcaggttacagcaggagacagcacctacgacgttgtatatcagcttctctccgcagctcccgcgctcattcagaagtcctacttccacaacctcttcaacgttccgaacatcgaccttgaaaagccgtggtgggatcagaactccatctcttccctctccacaatgggcattcttcctctcgtttccacatcaatcaacgtaaacgacaaggacgctaccgcagctctcgctttcaacaagactatcgccgaaaacaatcagcttgaagacctctacaccctcgttcgcgaaggcaaatggacttacgacaagctcaccgaaatggctgaggctacagctaacgactcaaacggtgacggcactatgacccccgacgacgtttacggcttcctcggcggacgtgacgttatcgactccctctaccacggctccggttcacagttcatcacaaagaacgaaaacgacgagttcgtattcaccttcggcacggagcgcgacgttgacgttatctcaaagggtattgacatcgtaaacagcgtatggtacttcaaccaccatgcatggaaggatcagagcgatatcctctaccgtcagatttttgaaacaggtcacggactcttcttctggatgcgccttgacgacgttaccaacatgagagccggcgacgcagacttcggtattatcccgattccgaaatacgaagaagctcaggacaagtactacagccttgtttcacagcacaccaccggtcttatgtccattccgattacctgcgcaggcgacgatctttccatggtaggcatggttcttgaagctctcgcggctgaatcccactacactctcattcccgaatacatcgaaacttctcttaaaacaaagaactcccgtgatgcggaaagcgcggatatgcttgacattattctgggcaaccgtgtgttcgacccgatgaacgtctacagcttcgctaacttcggagacgccataatggacgcagcagacgcgaacaacaaggatatggcttccctcatcaaatcaaaggaaaagctcgtaaacaagagcatcgaaaaggttctgaaggctgtctcggctgtcgaataatttcggcaagttataataaattaacatcacaaggcggaatattgcaccaatatgggcgtgttccgtcttgtttattttgtaatgtcaacaaaacttacatcttgacgctgattttacattcactatattgacttttgccgctcagggtattatcatgtagcattagaaatcaacaaaaacaaaagcaattaacacaggagacaaaatgaaaaaatcaaccaaagccgtatctctcgcgctggtcatgctcatgcttctttcatcctgcgcgggcggaaacgagaataacgtcgagacactgccctcaaccgacacaacaaagcccgtagttaccgaagacacaacagcagcttccgagagtgaaagcgaaacagaggaagaaaaaatcctccccgacattccggcaagcgcagactacggagacgacgaggtgcttttccttgtatgggacagagccggatgggctgaaaccgtaagaagattccgcgacatcacagcggacgagataaccggcgaggcgatcaacgacaccgtattcaaccgaaacctcaagatagaggacgcatacaaggtaaaaatcggacttgaaagagttcccgacaacacgatagtaaagacaatcaacaccgaaatcaccgcgggcgagacaaactacgacgtggtttacccgagacttaacgaagcgtcctcgctcttcaccggcgcgcagctccacaacctccacaaggtaaactacatcgacctcacaaagccgtggtgggaccagaactgtgttgaatcactcacgacaaaaggatatctcccctgcgccgcctccgcactcaacgtaaacgacaaggacgcgaccgcagccatcgccttcaacaagaccatcgcctcgaacaaccagatcgaagacctctacactgtagttcgcgagggaaaatggacatacgacaagctctcctccattgccgaaaccgttatgcaggatctcaacggagacggagttatgacgcccgaagaggacatttacggcttcctcggcgcacgtgacgttacagaatcgttctactacggctcgggcggacaaatggtatcaaagaacagcgacggcgtgtttgagcttaccttcggctcggaaagagacatcaacgtcaccgagaagataatagacctcatgaatcagccatggtttatgaaccaccacctcatcgcaaatcaggacgacaactactaccgtcagcttttcgagcagggctacggactgttcttctggatgagacttgacgaggtcacaaatatgcgtgcaagcgacgccgacttcggtattcttcccattccgaaatacgaggaagcgcaggacaaatattacagcatggtttcccgctacatcaccggacttccgtcaattccgatcaccctcacgggagaaaagctcgatgaagtcggacttgtgcttgaagctctctcagcggagtcgtactacaccctcattcccgagtacatcgagacttccctcaagacaaagaactcccgtgacgcagaaagcgccgatatgcttgacataatcataaacaaccgcgtattcgacccgatgcacatctacaacttcggcggcttctcctccgactacctcagcctcggagacaccgccgacaagaacattgcttcatggctcaagagcaagcagaagctcgttcagaagactatcgaccgcaccgtacagaacatagaagacgccgaataacctttataataaaaatcccgcagaattccacccagccgcattgtaggtcgggcagtcctgcgggatttttttgcatgaaacaaaaaacggcttccgtaccgtagtacagaaaccgcagttttgcgtttgtcagatgagttccttgaccttggaagccttgccgactctctctctgatgtagtagagctttgcgcgtcgaactttacccttacggataacttcaaccttagctacgttgggagaatggagggggaaggtcttttcaacaccgcatccgtatgctacgcggcgaactgtgaatgtttcggagataccgccgccgtgacgagcgataactgttccctcatacatctggattctttcacgggtaccttctttgatacggttgtgtacgcgaactgtgtcgccgatgttgaaggagggtactgtttccttcagctgctcacttgcaaaaacttcgagcttgttcattgttactcttcctttcttgaatcataggcattcgtgctgagtcatgcagaggactgcccgtttgcgcgttcttatcctgaacacgtgcggaaattattataccacacttccacccctttggcaataggattgtcgaaatttattttccgtgacgggcaatgtttacagaatatttacttttaaaaatattgtaaattatttcccgtcgagttgtaaataatgcagacgcggtattgacaattcgtttttttccttgacggggtgcgtttttcgtggtataatcgtatactgatatagcttcgccctttgcggcatattaggcaattcttaccttatatatagcaatatccatacaattcatgccgaaaagggcacagtcaacagaatggagtgatagctcgatggtcaaacctcaaaaggttggaaaaaacatacgaatgagtttctccaagatagatgagccgctggaaatgcccagccttatcgagatacagaaggagtcattcaactggttcctcgaaaaaggacttatggaagttctcgaggacgtatcccccataaccgactactcaggcaacctctttatagatttcgtcggttattctctcgacgcgaagcctaaataccctgtcgaggaatgcaaggagagagacgttaactacgcagctcccctcaaagtagacgttcgtctcacaaacaagctcaccggcgaagtaaagcagtcgtccatcttcatgggagatttcccgataatgacggacaagggtaccttcgttatcaacggcgctgagcgtgtcatcgtgtctcagattgtccgttcccccggaatctactacgacagcgcaatggacaagtcaggtaagcgcatctacacctctaccgtaatcccctaccgcggcgcatggctcgaatatgagactgacgccaacgatatattctacgttcgtatagacaaaaacaggaaaatccccgtaacaatcctcatccgcgctctcggaatccagacaaaggaagagattgaagaagtattcggcgccgaaacaaagctcgcggtaactctcgaaaaggaaacctgcgaacagagagccatcgaaaacaagacttcaatccgtgacgaagcgctgaaggaaatctacacaaagctccgtccgggcgaacccgctatcgttgaatccgcggagattctcatgaactccctgttcttcgatcccaagagatacgacctctatcccgtaggacgccacaagtacgacaaaaagctcgctcttgcagcgcgtatctccggacagacgctctcccgccccgttatcaaccctctcacaggcgagcttctctttgaagaaggacatcacctcacaacagacgaggctctcacaatcgaacgcgccggcgtatgcgaggtttacctctcacttgaggacggaacggaagtaaagctgttctcaaacggtgcggtagaccccgaatacatcctcggctacgacctccacgactcgggcgttgcggaaaagtgccgtcttgacgttctccaggaaatcatcgaaaactgcggcggcgacgaggctcagatccgtgcggaagctaagaagcgcattgcagagctttgcccgaagcacatcacaagagaagatattctttcgtccatcaactacctccttgctctctcccacgacatcggaacaatcgacgacatcgaccacctcggcaaccgtcgactccgcagcgtaggcgagcttttacagaaccagctcagaatcggtctcgcccgcatggacaagatcatcaaggagagaatgaacatccaggacaacgaatccctctctccccagactcttataaacatccgccccgtagtaacggctatcagagaattcttcggctcatccccgctctcacagttcatggaccagaacaacccgcttgcagagcttactcataagagacgtctctccgcactcggtcccggcggtctttcacgtgacagagcttcctttgaagtccgcgacgttcactacacgcactacggaagaatgtgcccgatcgagactcccgaaggtccgaacatcggtcttatctcctacctcgcaacatacgcaaagatatccaagtacggctttatcgaagctccttaccgcaaggtcgttcacgaaactctcgaagacggcaccgtacgccacagagtaacgaacgaaatcgagtacatgacagccgacatcgaggacaactacatcgtagctcaggcaaacgaacccctcgacgaaaactcctgcttcgtcaacaagaaggtaacggcaagagaacgcggagaaatcatgtcgatagaccccgcaaaggtttccctcatggacgtcagcccgaagatggtcgtttccgtcgctacggcctgcatcccgttccttgaaaacgacgacaactcccgcgcgctcatgggttcaaacatgcagaagcaggcagttccgctccttgtaacagactctcctatcgttggtacgggtatggaatacaaggctgcaagagactccggcgtgtgcgttgtctgcgaaaactccggctgggccgaaagcgttaccgcggatgaaatcgtagttcactgcgacgacggacacaaggacacctaccgccttatcaagttcaagagaagcaaccagggtacctgcgtaaaccagcgtcccatcatcaatcagggcgagcgagtagaagccggtcagattatagccgacggcccttccacatcacagggtgaaatcgctctcggtaagaacgccctcatcggattcatgacatgggaaggctacaactacgaggacgccgtacttcttaacgaacgccttgtacgagacgacgtatatacatcaatccatatagaagaatattcacacgaagcgcgcgacacaaagctcggtccggaagaaatcacacgtgaaattccgaacgtaggcgaagacgcgctgaaagaccttgacgccgacggtatcgtaaagaagggtaccgaagtcagagcaaacgacatcctcgtaggtaaggtaacaccgaagggcgaaaccgagcttacggctgaggaaagactgctccgcgctatcttcggcgaaaaggcaagagaagtccgcgacacatcccttaaagtaccgcatggcgagcagggcatcgtagtcgacgttaaggtattctcacgcgaagccggcgacgaacttcctccgggagtaaacaaggtcgtcagagtatacatcgcgcagaagagaaaaatctccgtcggcgacaagatggcaggccgtcacggtaacaagggtgtcgtttcgagaatactcccgccggaggatatgcctttccttcccgacggaacaccgcttgacatcgtgctcaatcccttgggcgtaccttcccgaatgaacatcggacaggtgcttgaagtacatctcggaatcgcggcaaagaagctcggctggaaaatcatgactcccgtattcgacggcgcaacggaggctgacatttccgaatgccttaagctcgcgggacttgacagaaacgtgcttcccaacgaaaacgtagccggcaagaacatcttcgaggaaaccatagaccccgcaaccggaatccgcgacctcagacctatcacgggcgaggaaaaggaggacaaggcgcacctcgaagagcttagacaggcaggcaagctcaagatagtcgacggcaagaccattctctacgacggacgtacaggcgtaccgtttgacaacccggtcacagtcggcatcatgtactacctcaagctccaccacctcgtagacgataagatccacgcgcgttccaccggaccttattctctcgtaacgcagcagcctctcggcggtaaagctcagttcggcggtcagcgtttcggagaaatggaagtttgggcgcttgaagcatacggcgcggcttacactctccaggaaatcctgacagtaaagtccgacgacgtaacaggacgtgttaaggcttacgaagctatagtcaagggtcagaacatcccgactcccggcgtacccgaagcgttcaaggttcttgttaaggaactccagtcactcggacttgacatcaaggttctgggtgaggacggaaacgaagtagagctttctactctcaatgacgacgacatagaagctccgaacatcgtatccgacgaaaatgacgtaaccgaagacgacgttggagaatccgttgaaacagacgacctctacaagtcttatcaggacgaaaacctcgatgacgctgaagagccggacgacgacgttctgttcgctgccgaccgcggtgaatacgacttcggcgacgatatggacgatgatttttaattaaataataaggatggctttaatacaagctgtcctatcggtgaaatacgtttctttgcttctttctttactcaaagaaagtcgaaaatttcaagagaaggtacactgttaatggaacgcaatgtttttgattctataaaaataggtctggcgtctccggaaatgataagaagctggtcgcacggtgaagtaaaaaagcccgaaacgatcaactaccgcaccctcaaggcagaaagagacggtctcttctgtgagagaatcttcggtcctacaaaggactgggagtgcctctgcggaaagtataagagaatccgtcacaaaggcaaggtctgcgaaaagtgcggcgtcgaggttactcagaagaaggtcagaagagaaagaatgggtcatatcgagcttgccgctcccgtgtcccatatctggtacttcagagccatcccttcaagaatgggtcttctcctcgatatttccccgagacttctcgaaaaggtactttatttcgcgtcgtacatcgtaattgatcccggcacgacacccctcgccaagtaccagctcctcaaagagagcgaatacagacaggcaagggaaaaatatgaaaacgacttccgcgtaggcatgggagctgccgctatcaaggagcttctcgccgagcttgatataaacgcactgtccgagcagcttaaagaagagctcgagcaggcaagcggtcagaaaaaggtaagaatcgtcaagagacttgaagttgtagaagcattccgcaagtcaggcaacaagcccgagtggatgattctcgacgtagttcccgtaatcccgccggaaatccgtcctatggtacagctcgacggcggcagattcgcggcttccgacctcaacgacctctacagacgtgttatcaaccgtaacaacagacttaagagactgatggagcttcacgcgccggacatcattatccgcaacgaaaagcgtatgctccaggaagcagtagacgcgctcatcgacaacggcagacgcggcaagcctgttacaggaccctccaaccgtcctctcaaatccctctccgaaatgctcagaggtaagcagggacgcttccgtcagaaccttctcggtaaacgtgtcgactactccggccgttccgttatcgtcgtcggtcctgacctcaagatttaccagtgcggtcttcctaaggaaatggcgctcgagctgttcaagcccttcgtaatgaagagacttgttgaaaccggcaaggctgccaacgtcaaggaagctaagaaaaaggtagaaaagatccatcccgacgtatgggattcactcgaaaacgtaatcaaatctcatcccgtacttctcaaccgtgcgccgaccctccaccgtctgtcaattcaggcgttcgagccggttctcgttgagggtaaggcaataaagctccatcctctcgtttgtaaagccttcaacgcggacttcgacggcgaccagatgcctgtacacgttccgctttccgcagaggctcaggctgaggcaagattcctcatgctctccgcgaacaacctcttaaagcctgtcgacggacgcgctatcaccgttccttcacaggatatggtcctcggttcgttctatcttaccctcgacaagcccggcgagctcggcgatacaggagatccggatcacccgaagatgttccgcgacttcgacgaagctgtcatggcttacgaaaacggacttctcggactccacgcgcctattgaaatcatgatgaccaaggtaattgacggcgtggaaaagacaggcagagtgcgcggtactctcggtaagttcatcttcaaccgtcccatcccgcaggacctcggctatgtagacagaagcatccccggcaacgaattcaagcttgaaatcgacttcaacacaagctccggtaagctcggcgatatcgtcgacaggtgtatcaaataccacggattcgccaccaccgcagcagtgctcgacgaaatcaaggctatgggttacaagtactccacaagaggctccatttccatctccgttgccgatatcacaatcccgccggaaaaatacacactcatcgcgcaggctgaaaagaacgttgaagttatccagaagcgttacaaccgaggcgaacttaccgaagacgaacgctacaaatccgtcataaagctctgggaaaagacaacggacgacgtagtcgcagctcttcaggcggacttcgacagatacaacccgattaagatgatgtcggactccggtgcccgtggttctatgacacagatgcgtcagctcgccggtatgcgtggtcttatgttcgcgacaaacggacgtacaatcgaaatcccgattaagtcaaacttccgtgaaggtctttcaatcctcgaatacttcatggcagcaaaaggcgcgcgtaaatccctttccgataccgctcttaaaaccgccgactcaggttatcttaccagacgacttgtcgacgttgcacaggacgttatcataagagaagaggactgcggctccaagcacggtatctgggtatccgccatcactgtcggcaacaccgcagtcgaacccctcaaggacagacttgtcggacgctactgcataggcgacattgtaaatcccgaaacaggcgaagtaattgttgaagacaaccacatgatttccgaggctcaggctaaggccgttgttgcggcaggtatcgaaaaggtacacatccgtaccgtcctccagtgctgctcacactacggcgtctgcgcacactgctacggctccgaccttgccaacgacaaacccgtcaacgtcggcgaatccgtcggtatcatcgcggctcagtccatcggcgaacccggcacacagcttacgatgcgtacattccatacgggcggcgtcgcagctgctaacattacacagggtcttccccgtgtcgaggagctgtttgaagcaagaaagccgaagaagactgccatcgtagcagaagcctccggttctatctcaatcgagcttgtcaagagaacgcacaatataacaatcaaaccagacgacggctccgaagagcttgtataccagatcccgttcggtacaaatatcgtagttgaagacggtcagcacgttgacgcgggagctgctctcaccgagggcgacatgaacccggcggatattctccgtatcagcggtatcgacgcggtttacgactacatccttctcgaagttcagaaggtttaccgcagccagggtatcaatatcaacgacaagcacgttgaggttatcgctcgtcagatgacaagaaagataaagataacggacgagggcgacacaccgcttctctccggctcgacagtaaacctcagcgaattctactacgagaacgacctgctcgacaagcgcattgcagagggtgagattggtctgaagaaggctgaaggcgaacctgtgcttctcggtatcacaaaggcttcccttctcacagagtccttcctctccgccgcttccttccaggagactacaaaggtcctcaccgaagccgcaatcaagggaaagaccgaccacctgctcgcgctcaaggaaaacgttcttatcggacgccttatccccgccggaacaggtatggacagataccgcaatatcaaagttgagcgtacaaaccccgccgactctccgatatacaacctcgacttctccgcgcttgaagaggaagactccaagtcagccgctcccacggaagatgaggacgacgcatttgattcagccgatgagcagtccatggacaacgaggactacatcgagcacgaacacgacgaggataccgaaaacgactttgacgacgatatcgctctcgaggacgacgacgcggacacagacgactcggacgaagagtaagtcttacggtacgcagagtaagtcttatagttaaaattccttccattaatataaaaggatctcaccgttttacgcggcgcggtcctttttattttcatgtgttttacataattcaaaaatctccaataaatccgcggattgtgaatttttcttgtgcaagtgggagaatattatctgtaaggagaaaaaccgcttgacaaatgagttttatgatgatagaataaggtatacgcaaaatttggggttctttgcttacgccaattttcgcgtctgattttatgatacgttcagcttcggctgtttgtatataaacatttattaccaaagaaaaggaggacaacaatgcctacatttaaccagctcgttaagcagggcagaaccgacaagacctacaagtcaaaggctccggtacttcagcagggcttcaatactctgaagaaccgtcccacagatcagagctctccccagaagcgcggcgtatgcacaaaggttacaacaatgggtccgaaaaagcctaactccgctcttcgtaagatcgccagagtaagacttacaaacggtatggaagctaccacttacattcccggtatcggacataaccttcaggaacactccgtagtgctcatccgcggcggaagagttcgtgacctgcctggtgtacgttaccacatcatccgcggcacactcgatgcacagggtgttgcaaaccgtaagcagagccgttctaagtacggtgctaagcgtccgaagaagtaatcggacaaatctcgaataagacgtttgtgtattgtcccatataagtaataaatgtttatatgaccgactttcacatacggaagtaatactttcgagtacctatgaattcatatttttaatgaaggagggaagttacagtgtcaagaagaggtcagatatctaaaagagacgttcttccggatccgctttacaattccaagctcgtaacaaagcttatcaacaatgtaatgtacgacggtaagaagggcgttgctcagaagatcgtttacgacgcattcgcagaagttgaagaaaaactcggtcagaacccgcttgaagcattccaggaagctcttgagaatgttatgcctgttctcgaagttaaggctcgtcgtgtaggcggctccaactatcaggttcctatggaagtaagacccgaacgccgtcagactctcggtctccgttggcttgttggctattccagaacaagaagcgaacgcacaatgagcgcacgtctcgcagctgaaatcatcgacgccaagaattccacgggcggagctttcaagaagaaagaagaaacccacagaatggcagacgcaaacaaggcttttgcgcatttcaagtattaattttcaccccatattgtttttcgacagcatacacctattaacgaaggagaataattagaatatgccaagggaatattcacttgagcgtaccagaaatatcggcatcatggctcacatcgacgccggtaaaactaccaccacggagcgcatactgttctacaccggtaagactcataagataggcgagactcacgaaggtacagccgttatggacttcatggaacaggaacaggagagaggtattaccatcacctccgcagctacaacctgcttctggaaaaatacgcgaatcaatatcatcgacactcccggacacgttgactttactgtggaagttgagcgctctctcagagttcttgacggatccgtaactgtattctgcgctaagggaggcgttgaacctcagtctgaaaccgtttggagacaagctaacaagtacagcgttccgagaatggcttacgtcaataagatggatatcatgggcgcaaacttctatcgtgttgttgaacagatgaaggaacgtctcaaagccaacgctattccgattcagctccctatcggtgcagaagacacattccgcggtatcatcgacctgatgaacatggaatccgacatctattatgatgacctcggtaaggacatgagagttgaacctattccggctgatatgcaggaaaaggctaaggaataccacgacgcaatggtagaagctatcgcagaaaccgacgaagaactcttcgaaaagtactgcgaaggtgatgagatttccgttcccgagcttaaggcagccctcagaaaggctactatcgcaaacaagatagttcccgttatctgcggtacttcctataagaataagggcgtacagaagctcctcgacgctatcatcgactacatgcccgctccgacagatattccttccatcaagggcgttaaccccgagacaggcgaggaagaattccgtcactcctcagatgatgagccgttctcagctctcgcattcaagatcatgaccgacccttacgtcggaaagctctgcttcttcagagtatattccggtaagatcgaaaccggcatgaccgcttataaccccacaaagcgcgctcgcgaacgcttcggtcgtatcctccagatgcacgctaatgaccgtaaggacattgattgctgctatgcaggtgatatcgcagccgtagtaagcgttaagaatacaacaacaggcgatacgttctgtgacgaaaaggctccgatagttcttgaatccatggaattcccggaacccgttatcagagtcgctatcgaacctaagactaaagccggcgaagaaaagatgggtatcgccctctccaagctcgccgaagaagacccgaccttccgtacctacaccgatggcgacacaggtcagaccatcatcgcaggtatgggtgagctccacctcgagattatcgttgaccgacttctccgtgagttcaaggttgaggcaaacgttggtcgtcctcaggttgcgtacaaggaaacaatccgcaagtccgctacctccgacctcaagtatgcacgtcagtccggcggtaaaggtcagtacggtcacgttaagatcgagatctccccgaacgaacccggcgcaggctttgtatttgaaaatacagtcgtcggcggcgctattccgaaagaatacattcccgctgtcgaagccggcgttaagagcgcaatggaatccggcgttcttgcaggctacaatgtagttgacgttaaggtaaacctctacgacggttcttaccacgaagtcgactcatcagaaatggcattcaagatcgcaggctctatggcattcaaggacgctatggcgaaggctgaccccgttcttaccgagcctatcatgaaggttgttgttacaactcctgaagaatatatgggcgacgttatcggtgacatcaacacccgccgcggacaggtcaactccatggagatgatctacggcgcataccagatcaacgcattcgtaccgctctccgaaatgttcggttactctacagcactccgttcacgtactcagggacgcggtaactattcaatggaacccgatcacttcgcagaagttccgaagagcatccgcgataagatcgaaaagaaaaactaattaattaaaaaatattttaggaggattattccaatggcaaaggcacattttgagcgtaccaagccccatgtaaacattggtaccatcggtcacgttgaccacggcaagacaactcttaccgctgctatcacaaaggttctttctctcgcaaacggcaatatcgaattcctcgcatacgaccagatcgataacgctcccgaagaaaaggctcgtggtatcacaatcaacaccagacacgttgaatacgaaacagctaccagacactatgctcacgttgactgccccggccacgccgactacgttaagaacatgatcaccggcgctgctcagatggacggtgctatccttgttgttgctgcttccgacggtcctatgcagcagactcgtgaacacatccttctcgcccgtcaggttggcgttcctgcaatcgttgtattcatgaacaagtgcgacctcgttgacgacgaagaacttctcgacctcgttgaaatggaaatccgtgaactcctctccgagtacgacttcccgggcgacgatgttccgattatccgcggttccgctcgtgtagctctcgaatccacatccacagatcctaacgctcccgaatatgcttgcatccacgagctcatggacgctgttgactcctacattcctactcctgaccgtaaggcagaccagcccttccttatgcctgttgaagacgtattctccatcacaggtcgtggtacagttgctacaggtagagtagaacgtggtacagttaagatggctgatacagttgaaatcgttggtctttccgaagaaaagaagtccacagttatcaccggtatcgaaatgttccgtaagctcctcgactccgctgaagccggcgacaacgttggtcttcttctccgcggtatcgacaagaagggtattgaaagaggacaggttctctgcaagcccggcacaattcacccccacacaaagtttgtaggtcaggtttacgttcttaccgaaaaggaaggcggccgtcagaagcccttcttctccggttacagaccgcagttctacttcagaacaactgacgttaccggtacaatcactcttcctgaaggaacagatatgtgccgtcccggcgataacgttgacatgaaggttgaactcatcacacctatcgctattgaaaagggtcttcgttttgctatccgtgaaggcggcagaactgttggttccggtgtcgttatcgaaatcgacggctaatagctgattttatcaaagctggctgggttcgcgctcggtcagctttgttctttaaaacaaaaaatttcgggaaacggtgaaattccttaccggcggtgatcgggtattccgtaagtccgcgaacgtttttaacgccgaacaggtgcgattcctgtaccgacggttagcttggcatataattagactaaattttatgtacagtctgccaagcatcgaatttggctcttgtagtttgtgcggagcgttagtcagcttctgccaaattccgaggttggttctttgcttgaggcgagtatatactaaatttgatagtatttagcttatggctgtttactaaaaatgcagtttaacttaatttaagtgttttttgtcaagcgaaagtccggatgtgagaagaaatagcgttattgcgcgatcccgtcattttacaaatgtaatttggcgggattattgcttctcccataacatattattatttatagggagtaattaccatgtctaaaaccacttataagtctgacaaaatcaaaactatcgttgctgtcggagttttttccgcttttgcttacgtctgctgcgtacttttccacttccgcgcttccttcctttcgtttgatttgaaggattccgtcatgacggtcggcgcaatgctgttcggtcctgtgtacggtcttgcgatgtccgttatcgtggggcttatcgagttcgtcaccatcagctcaacgggcgtctacgggcttatcatgaacgtgcttgccagtgcggttttcgtctgcgtcggcagcttcatctactcacgcaagagaacaatgaccggcgcgctcctcggtatgctggcttcggtcgtctccatgaccgcggttatgatggtcgctaacctcatcatcacgccgttctacatgggagtttccacgtccgacgtagtgcagctcattccgacgcttcttctgccgttcaacctcacgaagagtatcttcaacgcgtccatcgtcttcctcatctacaaacccgtgtctaaggcaataaggctcgcgggatttgtcagcgtcagcgtagcgaaggggcaggaagctcccatcggagttatccccggcaaaagcgaaaatggcaagaagtcggtttcctacataatcacggtagttgtcgcggctttggtggcagttctgtcgctcgtctacttcatagtaaagctcggtggctcgttctcgataaagtaaggatttgatatacgccctactttatcgtgcgattatataaatttttctaaaaaacctattgcaatagtccgcggaatgtggtataatatatccgctaaaaatttaatacaacttatcaagagtggctgagagactggctctgtgacgcccggcaacctatccgagattatctcatgtgacaaggtgccaattcctgacagatgagtaattctgtaaacaacaatgttctcgttctgtcttggatgagaacattttttatacctcagccgatgaaaggatactatgaaaagacttttcacttccgaatccgttaccgaaggacatcccgacaaaatttgcgaccagatttccgaccgcatacttgacgagatgctgaagaacgatcccatgtcccgagttgcctgcgaaacctgctgcacgaccggtcttgttatggtcatgggcgagataacaacaagcagctacgttgacattcagtccatcgtccgcaagactgtgcttgatataggctacgacagagcaaagtacggcttcgacggctccacctgcgctgtcataaactcaatacacgagcagtcccccgatatcgctctcggcgtcgacaactcccttgagtcaaaggaaggcatcgaaaccgacgagttcaacacaggcgcgggcgaccagggacttatgttcggctatgcctgcgacgaaactcccgagcttatgcccctccccatctccctcgcgcacaaaatggcaaagaagctgaccgaagtccgcaagaacggcactcttccctacctcagacccgacggaaaaactcaggtgacggtagaatacgacgacgacaagccggtacgcattgacaccgtggttgtttcttcccagcacgaccccgacacttccctcgacaaaatccgcgaggacatcatccgcgaggttatcagacccactctccccgaggaaatgctcgacgacgacaccaagatttacgtcaacccgacaggcagattcgttatcggcggtcctatgggcgacagcggactgaccggcagaaagattatcgttgacacctacggcggatattcacgtcacggcggcggcgcgttctccggcaaggacccgacaaaggttgacagaagcgcgtcctacatggctcgttacatcgcgaagaacgttgtagcctccggaatcgcaaaccgctgcgaagttcagcttgcttacgctatcggcgttgctcatcccgtttccgtcctcgttgacaccttcggcacaggcaagattgacgactccgttctcgccgatttcatccgtgaaaaggtcgatatgcgtcctgccgctattatcagccgcttcgacttgcgcagacctatctacggagatctcgccgcttacggtcacatgggtcgcgaggatctcaatattccgtgggaaaagcgcgacttcgccgaggaaatcaaggcttcgttcaatttttaattcatctgaataatatcgcccgcactgcttgagttttcacttaggctgtgcgggcttttgttattttacgattacttgctgatatttatcaaatctttcttttggtattgacttcttatatgaaatttggtacactatttatactaatattagtattatacactcaaactatttttgtaattgaaaggaatggatattttatgaaaaattttatctcgttatcccttgcgcttatcctcgcggtattatctcttttatcctgctccgacaaggggaacgccaaatccgaaaccgatccggttgagtccacacagcagtctgcttcaaatacggaatcggagtccgaaaccgaagccgagaagaccgtaaccgacactgtgcgagaaaaatactcctcctacagctacgacggctatgagtacaaggttctcgctcccggtccaaacgcacatttcgcatacgacgaggtcggagctgacgtaaacgaggtttgggttgaagaatcggacggaactccgctcaacgatgcaatattcgcacgcaatctcgctacggaagacctgctcggcatcaaagtcactccaatttttgccgacaacgatgagaacatacgcaaccaagtcaaaaccgaggtcactgccggcactacagactacgacaccgtcctcaaccgcatggactacataggtccgcaggctgagtcgggactttatttaaacctcatggatcacctcgacacctcaaatccgtggtgggacaaaaacattgtcgagacgttcactatgtttaactccaagctctactggataaccggcgacatcaatgtgttcgacgacttcgcggtggaggtgctgttcacgaacaagtccatcctcgagcagaacggctttgagcttccctacaaggacgtgcttgaaggcaaatggaccattgacagaatgtaccagattgcaaaagcgtgcgaaaaggacctcgacggcgacggaaagatgacggttggcaaggatgtaatcggtcacatcgaaggaaacgaccacatcaagcattggatatacgcgatgggcgagaaatcctgcgacatcgacaaagacggcaaccttgaagtgaacatcctcaccgaaagccacattagtgcgattgacacacttttcagctacatggttgagaagcagatgacatacacgggagcatggcaagattttctcaaaggcggaatagttttctgcggcgcaatgctcggtccgataaactctctgcgcgagatggaagacgacttcggcgttatccccatggcgaaaaaggacgaagctcaggagcgatacggcaactacgtctcaaacggatggacgacggcttacgctatccccatgacgaacaaggaccccgacagaacgggaattatcctcgaagttctctgcggattctccaccgacacagttcgttccgcgctttacgacgttctctttgccgctaagctcgtgcgcgataccgaatccgttgaaatgctgaacattatctttgacacgaaatcctacgactgggcggtcgacttctcgtggggcggaaacttcgcgaacctctacaacggaatctacaacacaaagaacaacacctacgtctccggcgctacaaaatcacagaagattataaacaagatgctcgacagagttatcgaagacttcaagaatctcgaatattaactaaagcttttcttacatcatccgcttctcgcttgtgttcatgcgcggctgttcagacacaggtgaggggcgttttttctttttatttgacttttcggcggttttggggtataattatctcattaagccgcggaggaacagcatgaacaacgatattagaactgaagagcaagagactgtgtcgggtatagtcgactccataatttaccagaacgaggacaacggctacgtggtttttgaaatggaggacacctcgggctaccctgtcaccgtcacgggcattataccgtatctcaccgacggggacaagctgacagtcacgggaaaatgggtcaaccacaagacctacggaaagcagtttgaagctcagacctacgaaaaaactcttccggcggaggagagcgacattctgcgttatctctcgtcgggtgcggtcaagggaatcggcccgaaaactgcacaaaagatagtggagcagttcggcacagacgcgttcaaggtaatagaggaacatcccgactggctagccgaagttcccggaatcacgcgcaagaaagccgagacaatctccgaaaacttcaaatccatatccggcgcacgtgcggttatgatgttctgccgcgaccttttcactccgcagaccgccatgaagatatacaaaaaatggggcggagctgctgtcgacaagatacgcgcgaatccgtacaggctgtgcgaggacttccgcgggatatcattcagtcgtgcggacggcatcgcaatgagcatgggacttgaccccgcttcatcggagaggatcattcatggggcagtgtacgttctccgcgcggaatccgcaagatcgggacacacctgcctgccgctcgacgacctcatccgctgcacctgcgatctgttgttcggcggagactccggtaaaatcgcgaatattacatctgtcatagaagaagcgctgaccaagctgacacttgttccggtgaagaagggcggaatacgctacatatacgagccgagaacctacaccgccgagctttacattgccgagaagctgaaaaagatagacaagctctgtccgaggatgaacgtaagcgacgcgcggctgatgatagagaaatgcgaagctcagtcgggtataaagtacgcggaagctcaaaggcaggcgttgttcactgcaatgtccgagggagttatggtgctcacgggcggtcccggaacaggaaaaacgaccattataaagggacttatctcgattttctcctcgcttgactttgaggttgcgcttgccgctcctacgggacgtgccgccaaaaggatgagtgaagcgacctctcacgaggctaaaaccatccacagacttctcgaaatggacgcggcttcctccgacattgaaggcggtgcgaagttcctcagagacgagaacaacacccttgacgcggacgccgtgataatagacgagtcctcgatgattgacgtgtacctcatggaagccttgctcaaagcgataaagaacggcgcgagactgattcttataggcgactccgatcagctcccctcggtaggatgcggaaatgtgctcggcgacgtgatagactcgggaatttacccgacagtgcggcttagcgagatattcaggcagtccgagagcagtcttatcataacgaacgcccaccgcataaacgacggacaaatgccgatacttgacaagcgcgactccgacttcttctttctcccgcgagagaccgaggaaggaattgccgcgaccgtcaccgacctgttctgtaaccgtctcccgaaaagctacggcgaggacatgataacgaaaactcaggtgataactccgtctcggaaaggactgtcgggaacggacaacctcaacgcaatgatacagtcggtgctcaatccggcggacaagggcaaaaaagagaaaaaatcccgcgatgttgtctttcgcgtcggcgacagaatcatgcagaccaagaataactacacgatagagtgggaaagcgacgacggaaaaaccggcatggggatatacaacggggacatcggcgtgataaacgacattgacacggacgagaacacgcttgaggtacaattcgacgacagacgctgcacacttgacttcaccgctctcgacgagatagaccacgcctacgccattacagtccacaagagccagggaagcgaatacagcgcggttatcattcccctgtactcatgtgcgccgatgctcctttcgcggaatctgctttacactgcggtcacgagaggcgcgagaatggttatccttgtgggaaagctgtccgttctcggagctatgatacaaaacgcccgccacgtcacgcgctgcaccatgctgaaggattttattataaagctgagcgaagagtgagctaaaatatttcagaaataaaccaaaaacggaaggaaacgatacgcattgtaccgaagccttccgttttttgctgtcattattcatttcttgtcttgtcgtttttgaaaatttccgagaatcgtttcgcgcagtccattatttccgtccgctcgtccgcatcgaatttgtcaagcgaatggattatttcggcgattatcatgcttttccgctccccgaagtaatttactccttcgggagttatcgaaagtcttatctgccgtctgttgttctcgtcgtgtgagcggacaacatagccctgcccttccatcaaatcgacaagctttgtcagctgctgctttgttatgttcatttgcttggcacaggcggacatggtaagcagctcgtctttgttcgattccaaaatattcagcagataaaatccgtgagaatgaaatcttatctcatttttttcgacgatgtgacggcgtatcatggcgtagtagtcaagcataaatgtaagaaaattttccgctagctcgcggtcataggaatcattcaagggtcaaccctccatattcagtctccaaagaatatgtcgatgatttttccggcaaacgccccgaatatgaatatgagccatgtgtagctccaaccgccgaatgcgaagctgatgaagaagtacgctataacaatcgcaagccacatcatgttggatataccgccgcgcagcacctttttcaggggtgttcctcggttgtatttttttaccatattcataagcgtctgaccaatggaaccccataggaagatgagccatgtataccaccagccgccgaaacggagcgaaaacgcaagatacacaaacacgacaagaagccacagtgcggagcttattttgtctataaccttcgcgttgtccttgtagctgtcgcggttctgtcttccgcgctgttcgtcctcggtaatcggcagtgagtcgagcattttcttgatttcgtcgacattttttaaaacatcgcggtatgcgtcaagctcgctcattcccgcctttacccgttcgttatacgccttttcaatatcctcggtcaaatcgtcgcacgcagcagcggcagcagcacttcccgcctcgtcgcacagctttttgaccgttcgtttgatttctctgtccatctgaagttccctttgagtacctgccgcacagctctcgacccaagccgcacgacttttatgttgatttaaaatataaattaaatccagtgtaaaattatcccgcaaggctggcggatttccacatgagtccgtagtcgttgtagacgtaggtgtcgtcggggaggaagagcgcgtcttctatgttaatgtctccgttaccgacctgcattgtggaattatatttgcctctgtacgccgctacatggacgtgaatgccgctcgcgataccgtagttgccggagtcgtagaaatattcgccctgagtcagcgcctgtccgacggaaatatccgatatgtcgttgtcatgcatgaagcacagcgtcatataatcgtatgtgccgtcggcgtatcttaccttagatgtgctctctatccaaacggcgttgcaagccagctcggacgcgtcttttcgcacgacctttgcgttgaacggtgcgtagactgctctttccgccggctgaatatcaagcgcgttctgcgtcatgtgggagaattcgtcaaatgcgccctgcgttacaagaagggacttcgccacaaacaccgccatctcttcacccgaggagttcatcgtaccctctctggtgaactgccacgccgcagatcccgccccgagagctacttcactgccgttggagcttccggtagttccgagagagcgtttgtcggcagcggattctatcttccacgtgccgtcagccgagccgattatgttaaactctaccgcgttagctcccgttgactgatacagtcctacatttatcgagcctgcgcttttattcacgccgaggactctgccgtagccgtttcgtgaagctgcggagtagatgtagtatgttccgcgctctgtcctctctatacggaaggtctgggtgatgtcgtcgctcgcgtcccacagagttacgcctacgccctcatagtcgctgttcatacccgacgccgcaacgttgagcagctttccgcttccgaccgactttatcttatagtaa

SEQ ID NO: 2072 - DNA, 3621 bp, Unknown
  16S sequences of unknown bacteria
ttaaccgcacaaaatcagcgtacaaatcgcctgaacgattactttcggtttttaacctaaattcccgtcaaaattaacctatacgcgctagaaaaaggcttaaacaagcggttttctcaaaaaatacgagagaaaagattgattttttatcggaatatgatataattgggctatactttatagaatgagtgatagtatggctttggacaaatcgatattggtagatatcccagagcgcggaatagcgtataaaaaggtgtcgggaaaaacttatgtgtattatgtaacggcgacctaccgaaataaaaagggacaacctacctgcgaccgttcctcaataggaagattggacgaggaaacgggtaagcttatccctaaccgcaactattatgaaatatatttgaacaagcccgtccctccaaagaacggaatttttgaatacggtgtttatgacgtgtttgaaaagatatgcggaaagttagggcttaaaaggcttcttaaaagatacttccccgaaaactatatcgaaatacttacagcggcacagtatatgctctccgagggcaatgttatgtattacataagcgactataccgaaacccataccaccgcgctaaagggtgttttgagcgacgaaaaatgcagtaaaatgttagcaagcttaagacaggaggatatgctgctgtttttcagggaatggatgaagcacaaaaaatccgacgagtatgttgcgtacgatgtcacaagcgtttcttcatacagtaaaaatatcaccgagcttgaatggggctataaccgagacaaggaaaaactgccccaaataaatattggaatgtattacggggaagaaacaaagctacccctctattaccgcgtatatccgggaagtatatcggataaagctcatctgaaatatatgattgcggataataattttataaacggacagaaaacccgttttgtaatggacaggggattttacagcgcggataatctaaggtatctcacagagagaggctaccgatttgtcattgctctgcctacaagccttaaatactgcaccgagcttattaaaaagcacggcggagaggttgctaatcactccgagtatcacttaggttcgggactgccttacggaaaaagctatgaggaaacagctttaggctttagaatgaaggtacatcttttttacgacccgcaaaaggcgcttaaagaaaccgaggctctatattctctgattgacgcgcaggagaatgatttaagaaatatggaggagccgcccgataaaaagctgcactacgaccgttatttctttataaaccgttcaaaggacggaaagcttgcctacagacgaaacaataaggcgattgacgaacagctatccctttgcggctatttcctgattgccgagacggattttaaaaagacaacggcggagatattggaaatataccgcaaccgtgacgtagtagaaaaaagctttgacagccttaaaaacgaacttgatatgaagcgtttgcacacatggacgggcgaaacaacgcagggtaagctgtttgtttcgtttatttcgcttattgtgcgaagctatttgctgaaccgcttatccgattatatgcgcaaaaacggctttacgcttagaaaaatactgacccaattagataaaatgaaatgcttcgccccaaattccgcacattctccccgcccgttaaacccgcaaacaaaaacccagcgcgaaatctatacttctctcgctcttgataccgatgaatgtataggataatttcggtgggaatttaggttatgagcgaaaatattgtatgcaaaacagcggttgtagcaaatatcacggaaatatcgacaaaacagctttgtgagttttcggataaacagatattaagactttcggggagaccgcagccatttttggagtattctccggaaacgctctatgagcttgtcgagagcattaaagaacacggtataataaatcctgttacggtaagagaagcaaaaaacggtaagtatgaaatactgtcgggcagaaaccgtgtacgggctgcaaagaaattaggaataagatccgttcccgctattattaaggaaaatatctcagatgatgaagccgccttaataatgcttgacagcaatctgcggcagcggcaagggcttagatacagcgaaaaagcctatgcttaccgtatggagatggaaatactcaataggcagggaaagcgaaccgaccttgacttaacctcgtgcaccgggtgcacaaagttagattcgttaagtaatgcgggtcaaaaaaacaatgaaagccgcagaacggttgcatatctaataagacttacatatttattgcccggacttttagagctcgtcgattgcgaaaaactaccgtttaaggcaggtacggagctttcctatcttcctgtggacgcctaaagctatatattgaaaaatatcgcgggcagatgcaagataaatttatctcaggctcaaaggcttaaaaagcttaataaggacggtaagcttacagaggaagcaataaccgctgtattttcccgggatgaaaagaaatccgaaagcgaagtgaaattcacagttagtaaaaagctttttatacggtgccctgaattgcttaatgacaattcaaagctgtagatgttgtttcttgaatttattaaagaatatattgaaaggcaggcgtcgtgaaatgaaaaagattctctttattattactcttgcctcattcgttttaatcagcgggtgcaaagctaccaataccgaaacggctgagttttcttctcaaatatcctcatcagtatcaggttcccagataacggagtttgaagctgaaagcaatttagcccaagaaagctcttcggaacttagtgcaacagttgcacaaggttacgaaacggtcagtgaagttaattcaaaacctgcggcgcaaagccaagagactaaaaccgaaagctcggcggcagaaattaatccgtcggtcgggaaatcgaataatcttccaaatccctctgtcggaaatgaaatagataattccgattcaacgctttcaggcggttcgggcaatgcaatacaaaatgcaaccgccgcagatacaagggaggttgcagacaaggttatattttaccttaataaagcgagagccggaataggaagcggcgagctttcaaagcttttgggtcttacaagatacgccgaatacagaagcggtcagctaatatccaactttgcccatgaccccggcgattggaataaggcggctgaggctacggcaaatatatcgatttgtccgaaagcggaggagctccgcaaggatattacgatataggcgcaagggaggctattgcaatggcgggtattgtcgggagttcggatagaattgccgaaacattagcgcagataataattgacagtccgaggcattggtcatatgtcggttcgaatgaaatgaaatatatcggcgttggcgtgagctgtaattcggatatgtggtacgcggctattatggttacaaacacaacagattatgaaaactgaataggttttaattccaagcttcgattcttcatttgaagagtcggggctttttttatttat

SEQ ID NO: 2073 - DNA, 6776 bp, Unknown
  16S sequences of unknown bacteria
caggcggtcgacggcggcggcgggatagagtgtatcggaaattgtccgcacatcccacggcccctcgtgccaaaatgacacgatacccacggcccctcggttcatgtcgacggtggtgctgaagaaccttcctcgggcttcacgctctgctcccccgccgcagtgcaccaccagcgaacgcgcgtcggacgcggcacagtgcgaaacgcccgcctctgcccgagcgactctgccagcaccccagctccgggaacaatcgaatccgcccgcgcgggccgctccaccagttcgagcttgccctcgtgcgacaggcacttgatgcggtactcgagcttggatgccgcagagcgcccgtgcgtctgccagaccatctcgagcgccacgactttgcgcgcacgcgtgtacttggcaccgggaacgcgctgagagaggtgctcgcgcaggcgccgggcgacatctgtcgcgatgcccgtgtacagcgagtcgtcctcgcatcgcacaatgtagacgtagtagacgtcgtcgcccacgaggcgctagcccttcgtgttggaatcggactcgagctcggcgaacttggccttcatggtgggattaccgcgtgtgaggcgcttgacggtgagcttttccgccttgtcgttggcaaggcggagctgccgctccgacgacgtgagcgcgtcgcgcactttctgcaggtgcgtgatggtcttgtcgatctcgtcgatggcggtctcgaacttgcggcttgccgtctcgaagttcttgccgaacttctccttgaaatcgttcaggctgttctcgaagttggtgacgtcgatgttttgctgctggatctcggcgagctgatggcggtactcgttggcgttgcgcgccgcgttgcgcaggatggtgatgatcgggatgaagaactgcggcctgatgacgtacatcttgggatagcggtacgagacgtcgacgatgcccgtgttgtacagctcgctgtcgggctcgagcaagctgaccagcaccgcgtactcgcagtgcttgttggtgcggtcgcggtcgagcttcttgaaatggtcctcgttgcgcttgtggtgcgtggcctcttcctcttcgtttttcatctcgaacataatcgagataacctcgttgccgtcggcatcgagctcgcggaagatgtagtcgcccttggtgccctcgacgttggtggtgtccttctcgaagtacgcgttttgaaaggccgtcgcgcggagcttgttgaactctatctcgcagtgctgctcgagcgactcgccgagcatcttggtgttgaggcgggcgcgcatgtcgcgcacgcgctctatctcgcgttcgcggtccgcgatgatcgcgtccttgaccctgagcttttcctcgagctctgacttgtgggcgacttgcaggcgggcgttttcggtcttctcctgctcgaggcgcgccttgagctcgtcacgctcgcgctcgaccttgacctgcgcgtctttgaaatggtccgtggccttggagacggcgagctccgtcttggcctcaaaggtgctcgtctgctgctcgagctgctcttgcagtctggcgatggtctgctcacgctcggcgatgtcgtgctgaagcctgctctccgcatcttgccgggcaagttttgccgcggcgtcgcgctgggagatctctgccgtgagctcgacgatgcgcgcatcgcgcgccgcgagttccgcctgcatctggcccttggtcttggcctcgacgagctctgcggtctggcgctgctgctggtcgagctgcttggcaaactcggcgtcgcgcacctggcgtgcgatctccgcataacccgcctcgtccatctgaaagacggtgtgacatttgggacattcgatttcgttcatggcgttggacctttcaaccgcgtcgacgctgacgtgctgcagcctagcacgcggcactgacacggtttacttgtcggcacactggcgcgcgcggcgcctgcgcaggcgctcgtgctttgccgcacgctcgcgcgcgaggcgctccgggccgtacttgccctggatgatgccgacgccgaccatgaccccgaccacgccgagcgcaaggacgagcatgcccggcccggggagcacgagcatggccacgcccgcgagcgcgacgagcacgcccgcgacgatgacgagcacgccgaaagcggggtgcggctgccgcctgtccagatgcgcctccatcttgcgcaggttcttcctgaccaggacgaacaggcggataaaccacttcttgagtctggtgaaaacgtccatatcgcgcactgccctgccgagcccctagctatttgacgaccatgacgggcaggtcgacggacctgagcacggcagaggagacgctgccgagcgccgcgcggatggcgcccagtccgcgacgccccatgacgatgcaatcgaccttctgctccttcgcgtagtcggcaatgacctcgtgcggacgcccgttcttgatgacgatctggatgtcgacgttgtcaggcacggagttgaagaactcctggatctggtcttggatgacgtgcttttggctctcggcgtagttcttgcgcgtctcgtccttggcagcctcgctcacctcgggaacgcccgccatgcgcgccgccacctcgaacgtcgtgtcgtcgaagctcatgggaggggcaacctccaagacggtgacgtgcgcgggttcgtcgccctttgccatctcgagcgccgcatgcagcgcatgctgcgattggaccgagccatcaaaaggaacaagcacatgggtaaacatggtgaacctccaaaaaaatgagggcagtaatctactgccctcattgtaccagccgaattctcacggctcggctacaggaaaaacacgattgagtcgatgatgaacagcgggatcaggatgccgcacgaccacttcatgtacccgaagaagctcggcatctgcacgcccgccttctccgcgatgttcttcaccatgaagttgggggcgttgccgatgtaggtgaccgcgcccatgaagacggcaccggcggagatcgcgaggagcatgggaaccgccacgtcgccgactgcggtcgcaaggtactgcatgccgtctgcgccgagcgagcccgccgccgtcatgaacacgacataggtgggcgagttgtcgaggaacgacgagagcgcgccggtggcccagaagaacttgagcggcgagtcgatgccgatgctggcgccgtaggtgcgcaggatggcgagcgccgggatcatcgtgatgaagatgccgatgaacagcttggccacctcggagatggggccccactcgaagttgttgcgctcgcgcaggtccttgctcgtggtcgcccacgaaagccccatcgcgatgaagatcagcacgacctgcacgatatagtcgatgccgacgtgcgtgccgaacacgctgatgccgtaggtcttgcccgtcgccgggtcgatgaacgcgtccatctgggggatggcgccgttcaggatgacggccacgatgatgagcgccaggaagaagaagttgtgccagccctcgatgcgaatcggcacgcggttgtcggccgtcgcctcgagttgcatagcctcgaggccttccctgccctcgttcatgatcatgcggcggtcgatgagggcgaacacgacgagcagcaggatggtgttgagcagcaggatcggccagatgtgctgcagcgtccagaagaacggaacgccacgcaggtagccgaggaacagcggcgggtcgcccagcggcgtcaggcagccgcccatgttggcgaccatgaagatgaagaacacgacgatgtgcaccttgcgcttgcgccacaggttggcacgaagcaacgggcggatgagcagcatggccgcgccggtcgtgccgacccagctggcgaggaacgtgccgatgagcagcaagatgacgttgttcttcgtcgtgccgacgatggtaccgcgcacgagaatgccgccggagacgacgaacaggcccagcagtagcacgatgaacgggatgtagtcgccgacgatggtctcggcgagctgctcagcgctcgtctcggggccaaaaccgatggtgaagggcacaaggaacacgagcgcccagaacgcggcggcgaggagctggtgtttctcccaccactcgcctttcaccagcggcatgatagcgatcgacaggagcatgcccacaaaggggatgatgctccagatcggcagcatttgtccaagttccatatgttacctattcgtatgtagaaaaccgtcgatttcgaaatagagactttagcacgaatgccttattcataccgcggtgtcgacgcgcgagcaggtcaagcgcgtggtatttgtcgatagatgtgcataaaagcacaggcgcccccgcctttccgcagcaaaatcgccgcggcaaggcggaggcgcccagtcgtacatgaagcaaaagcgcttggaggcgtctagttgtagcgacgcccgatgaccatgatgttcgagctccggttggagaagatccagtggctccgcacgtagatcgcctcatcttgctttctgaacagccttgaaaaccacatgccaatcaccctgatgtccgcaagtgtgccgattgcccgcgccggacggcaaaaccgccttgtccgaacgccgacatcgagaaagctccccgatgccgaaaaccgcgcgtccctcccctcggtgcgactcgacgccatgccgtctatctacatgatgaaagtcgcgaccagacggtcaggccctatcgcggccgtccggagcgtccgggacgaccaggtcgaacggaatgcggttctgggcgacgagctgcttggtcgccatcacgacgaaggtgttgaagttcaggcccagcgcctcgagcttctcgctcgcctctctcttgaggccgtcgtccatccgtattgtcgtcgacttcatcataagcttgtgccttagggtgcgtttaatctgtgttgtatgtctatgtggtatatattcggctcatttattatatctgctgtattgctatttacaatctggattcgccgcttttcgccataaaaaagcgcccctcgaaaggggcgccacacaaatggagattgctttgcggctagaccgggcagctaccaggagagcagctcgtagccgtcttccgtcacgacgacctgcacttcccactgcgccgtgggcaggccgtctttggtgcggacggtccaaccgttcggatcgttcatgtcgatggccgcatcgcccaggttgaccatgggctcgatggtgaagcagatgcccggcaccaagatggggccggtgcccgcctcggcagtaaagctcacgaacgggtcctcgtggaactcgtggccgatgccgtgcccgccaaactccgcgaccacggaaaagccggcatccgtcgccaccttgttgaccgcggcagagacatcgcccaggtgaatccatggcttgatggcggacctcaccgtccagatgcgggaaggcggcctcgacggcggccttggtcgtgtcgacgaggcgcttccactcgctgtcgaccgtgccgatgcagaacatgcgcgaggagtcggagaagtagccattgcggatggtcgacatgtcgacgttgacgatgtcgccctccttcaagatatcgtgctcgttgggaatgccgtggcacacgacttcgttgatggacgtgcacacgctcttgggaaagccctcgtagttgaggtcagccgggatggcgtcgtgctcgatgcagtagtcgtagacccacttgtcgatctctgccgtcgagacgccttctttgatgtgcgcggcgacgtagtcgagcgagccgacgttgacctgtgccgagtacttgatgccctcgatgtccttggggcccttgagcaggtcgcgcgggaggacctcctcgccctcttcccacagctcctgcatgcgctggtcgttgtgcagatggcacttcttgtacttcttgccgctgccgcaccagcaatcgtcgttgcggccggggctttcgattccgtcgaacatatgctctcgcatcctcaagtcgagttggttttttgccatgatagtgcaagtgtccagcccgccacgtgcaacgttgccaatcggatttctattcttggcatggtcatgcctcgcgattatctatggccatttccaggcacggcgcgaccagccccggcacttgctggtattctgcacttgcaacccaaaccatacgaaggagtggacatgattgacgagaactgcatcttctgcaagatcggcgcaggcgagatccccacgaagaaggtgtacgaagacgagcacgtcatcgcgttcgacgacatggagccgctgatgcccgtgcacacgctcatcattccgaaggaccactactccgacatcgcggacaacgtgccggaagagacgcttggccacgtgttcggcgccgtgcagaaggtcgccgagatcaagggcctcaaaaacgggttcaggttgctcgtcaacacgggcgacgacgcgagccagagcgtgaagcacttccacgtgcacctgtttggcggcggctggatgccgcgtccgaacgaccaggactggggcccgcattccaccaacgccgacaagtactatgacgagaacggccgtcatctcgacttttacgacaagaacggccgcctgatcgagttcggcaacgagggcgacgaggagtaaggctctcctgcgtacgcatttggcacgaggggccgggatgtgcggactcagaatgagacagtttggagttcgcatgggaaagaagaggta

SEQ ID NO: 2074 - DNA, 7627 bp, Unknown
  16S sequences of unknown bacteria
ccgcgttatcgaccgccccatgcgacccctcttccccaaggacatgagaaatgacgtttccatcgtcaccaccgtcatgtcggtcgatcccgactgcccccccgagaccatcgcgatgatcggcgcttccattgccgtcaccatttccaaaattcccttcaacggacctatcagcggcgtgagcgtgggcatggttgacggacagtttgtcatcaatcccaccgccgagcagcagaaaaagtcccgcatggccgtcaccgtcgcctccaccgacaaaaaagtcgccatgatcgaggccggtgccgatcaggtcaccgacgaagaaatgttcgacgccattatgttcggccacaaggccaaccagcaggtcatcgaattcatcaagaaaatcagagaagaggtcggcgttcccaagatggaattcccctcaaacgatccttctcacgaaatgtatgaagatgtggaagccattgcaatcgacaaggttcgccttgccctcgacaccgacgacaagcgcgtccgcgacgaggctctgctccccatttatgccgaggttcacgaaaaactcgacgaaaaatatcccgaggaaatcgaaaagcttgacgattgcctctacaaactgcagaaatttgtggttcgccgctggcttcttgacgacggcaagcgtgtcgacggccgcggaatcgatgaaatgcgtcctctcgccgccgaagtcggtttgcttccccgcgttcacggtaccggccttttcaccagaggccagactcaggttctgaccaccgtcaccctcggtcagatcagagacgctcagattctcgacggtcttgacgacgaggaaaccaagcgttatatgcatcagtataacttcccctcctactcggtgggcgaaacccgtcccagccgcggtcccggccgccgcgagatcggtcacggcgcccttgccgaacgagctctcgttccggtaattcccgacgagaaggagttcccctataccctccgtcttgtttccgaggttctgtcctccaacggctccacctcccaggcttccatctgcggttccacccttgctcttatggatgccggcgtgcccattaaggctcccgttgccggtatttcctgcggtcttatcaccgagggcgaccgtttcatgaccatggtcgacattcagggtcttgaggacttcttcggcgacatggactttaaggttgccggaaccaaggaaggcatcactgccattcagatggaccttaagatcgacggtctgactcccgaaatcattaaagaggcacttgccaagacacacaaggcccgtaactatatcatcgacgaggtcatgctcaaggccattcccgccccccgcgaggagctttccaaatacgctcccaagatgctttccaccaaaatcgacgtggacaagatccgcgaggtcatcggttcgggcggaaaggtcattcagaagatctgtgccgactgcaacgttaacatcgacattgaagaggacggaatggtttacattcaggcaatcgacatcaacgactgcaaacgtgctctccagattgtcgaaaccattgccaaggatcccgaaatcggcgcaatctataagggcaaggtcacaagaatcatgtccttcggcgcattcgtggaaattgctcccggtaaggaaggccttgtacacatcagccaccttgacgtaaaacgcgtcgactcggtggaatcggttgttcaggtcggcgacgaggtcatcgttcaggttcttgaaatagacgatcagggccgtatcaatctttcgagaagaaacgctctcatcgaaatcgaaggcgccgttcccgaaaacgaggtcagcgacacccgccgtcctccccgccgccgcgaccacggcgaccgcaacggcgatcgcagaagaagataagccttcttaaatcccacataaacaaaagcggacatctctttaagaaatgtccgctttctgtatgcccaaatccgctaactcagtagcaaatacgcaagctgcctttgtttttttccacggcctttcggatttcgccgtcgaggccggaatcggaaaatatttcggtgaagtccgaaagatttccgtactttatcatgttttttttcataaatttactgccgtcggcaagaagatattttttttcgctgttcctcatgacgcatttttttaccgcgctctcactttcttcacccgaggaaactccgaacacggggtcgattgccgaggctccaaaaaatgatttgtcgaattttaaggccgagagatattccgcggtggaatagtcgagactcccgccatagcgctctctgtagagcccgggcgcgatataaagctttatgcgacgatttgcaaggcactcgtttataatcggcaccgagccggtaaccgccgtgaagcttatctccgacacaaatcgaagcataagtgtgaccgttgcggaggtgtcaaaataaacgacatcgttttccgaaataaattcggccgccgccgaggcaatggctcttttgacgggataaagcttttccttgcgatcgaaataaccctgaaagcccccgccgtagggacgtatacgggcgccgccgtgaaaaagcgacacgattccctgttgctcaagaaggtgaaaatcccgtcgaacggtcatgtccgacactccgaacagctcggcggcctgcctggccgttatctgccctttttcccttatgatacggcaaagcttttcccgacgggaaattcccgacagttcgttttgcagctccaagtcggttttccctcccacaaatgtttatttaaacatcattttctttattatagcagaaaagagaacataaatcaacatatttttgcgttgttttttgtgttataattattttgtcaaaaggaggcaggattatgagcaacaaaaacataaaatacaaggcgattttcaccgaccttgacggcacccttctgaactcgcaaaagacgataacccaaaaacccttgaagccgtcaaatactgcataaaaaacggtgttgcccttgttctttcttcatcgagaaatcttgagggaatcaagcacataccgaagaaatacggcatcgactgttacatttcggctctcggcggcggacttatagttgacaaagaccgaaaaataatttttgaaaaaggtatgacggcgaaaaccgcccaaagagtggtgaattttatcgaaaccgagcttccctttgttacatggaacatcttcacggcagaggaattgatcgtaaaaaacagagttgtaaaagaacagaacatcgttaaagcctacgctaaaaacggcagggcggccgacatagactgcggcgtttcggcggacaaaatgctttgtatgtgcagcccgtcggatacgaaaagaacggcggaggtgctttcaaaagaatttgacgaccttgcggtcgttcagtcctccgacattctgatagaaatcaaccccaaagggttaaccaagggactcggtgttaaaaagatatgcggacatttgggcatagatttaagccaaacaatcgcattcggagacaatttcaacgattttgagatgcttaaaacggcgggtccggcgtttgccatggaaaactcccccgcagaatttaaaaagaattttgagcatattgccccgtcaaacgacagcgacggaatatacaaaatcttgtgcggtttggggccgtgtcggttatgatttaaaacaaaaggactcccgatgaaaatcaggggtccttgttaattatcaggcttagccgagggtggtaacggtggcatactgatttacgaaatcgaagtaggtataggcgtcgatatactcgtaatccgcatccttgttaaccttgacataatcggtataggcgtcgataaatctcttaataccgataggcgactggcagatggttctgtaagccgagaagcccttcatggagcggtcgtaggaagccatgttcttaaagaccttgaccatgttgggattgctgaagtcaaccttttctgcgttggagtttttgccctcctcgtcggtaaaggtaacctcattgaagagatatgcataaacggtgtcgccgtaaaccgcaagacgcttggagctgtcgttgtggaaagcaccgacaggggagaactggctgtaagccgagaacacctcgttggaaaggcgggtcttatcaatgataaatccggttatgttcatatcaaacaggtcataatactgcttgttgtattcgacccactttgcccagccttcgttgtaatcgcgggtggcctttgtttcttcgtttttaccgaagttattgggcatggtgtagcccgcgccctcaccggccgcgatataatcgttttcaccgatatgggaatatacatagtcccaaacaacgggaatacgctgagaaaggttggggttgaagcaccaaagcatcgggacggtcgcgttggttccgtctctccaataatcggcaacatacttcttcatccatgcggaggagtcatagtctccgatgtagagggtgaaatatgttttggaggcgtcgtatttgacctccttggaaggcttggtattgttcttgaattcggcgagagtggtgcggtatttgtagagcagcgagccgttactcatggcgcagggagaagccgcatcggcctccatggcaaggttatagcttgtgctgtactggcaatagagccactcgatttcattcggagcaagacgtcctcttgcttcaccaccggtggggttataggtggtgtatttctcccaccagggggggaatccgagaacctgacctatttcgccgtttgcacggttgtatcttgcctccatgattttgatcatggtggcgtgatcggtaccggcgggctgctcgggatcgtcgcagacgacttccttacggtcggggttggggttcaggtcaaatgcaaaagcatgacgtgcaatgatatagtcaacattcagagtagaaacgtcggttgcaaaatcttccttataatattcgcttccgggaacgacgttgagaccgtcgagtatgtaggcgacatatttggaagagcatctgttcatatacttgtcaagagcccaaagatatgcgtcgcatttcttacttcccgagctcataacatcggtgtcggggattttggttccctcaacgccggtgaacttgtcgcaaaggttaagcttaacttcaacgccgagagcggcaagcttttcataaacggctccgccttccataacgggcagatagccgtcggtgccgcagactgttacggcaacattggcggttgcgggaacatcgggatcccagagaaccatgccgcagctcttgagctgctctttgaaggtctcataaaaatcgtccatgttggcaagctgcttggtctttttaagaatggaggtggcaccgccgtttctcatctgcttaagccagaaaccgtcggactggtcattggaaagcatgaacatggtggtgtgctcgttgtccataccgtaggaacggttgataagtccctgaaggctggcaaccagacgaacctcttcggccgacatgttggcaactcctccgttgcgggtggagagaacgtaaaccatttcacgattaaggttggaaatgtctacaacaaagctgttgtcggcagtctcgtcaagagtgtaggcaccgttgtcgagaatggtgtcgttaacctcgggggcagacattttaaattcgtttatcttgcccacggcatactgcaaaatcagcatagcgtcggtaacggtgacatcggttccgcccgaaactcttgcaagatttttttgggtatcatcaagctcgatcattttaaccgaagcctgaagaaccataagcgcatcgtcaaccgttacgccgtccttctgattaacgtttccgtatccgatgtcggcagaagccgtcacggcaccgaaaatcgaaaagacgatcataacagcaaggattgttgctactattcttttcataattgtcctcctagagatgatatgttgacatcggtattatatcacataaggaaataaaaataaagaggtttttgtaaaaaattctgtgtattattttgatttttgctcataattacacaaaaaaacggaccgcagaaaaatcctgcggcccgaattcatgattttttactttcccgcaccctcggtgccctggccggactgtctgatgagattgaagaaattgtaggggtcgacatagacatattccttgtttgcgccctggttttcggcatagtcgatatagccgtccaccacctcttttattgtggagggggactgaacgacggttcgataggcagagaagttgaagctgctcataacgccgcggtcatagctgtacatggaagcatatccggtcttggggtcaacgttgaaaggaacctcgttgaagagataaacatagggaacgccgtcctgaagagcaagagcctgcttgcggttgcttcccgaatttgtgaaggaacccacgggagacagcttgttgaactgctccatgatttcgggatttatgcccttgacctcaaccgagccgcttgtggaattgatgataaagccggttatatcgatgtcaaagagctgataatatttcttgctgtaatcaatccagacgtcccagccctctttggtgtctctcagatctcccgtttccttgttttcgatgaaatatccgggcatggtatatcccgcaccctctccggccacgatataatcgttgtcggtcttgttttcatagatatagtcccaaacaacgggtatacggttggaaaggttgggattgaaggcccacatgagcggcagagtgcctcttgccgagtccttccaaaaatcgtagacatatttcttcatccacgccgaggaatcgtagtctccgacatatatggtgaagtagcgcttgctgctgtcaaaggtcagcatgtcctcttcttttgtgtcggtgtttttatattcggtggcggtggcgcggtatttatacataagcgagccgttactcatggagcagggatgagccgcgtcggcctccatggccatgttatagcttgttatatattcgcagaacagccattcaagctgaggtccgccgagctttccgttgtggccggtgtcaccgggagtgtcaacggtgtattttatccaccaggggggaaatcccatcatctgacccattttgccgtttgcgcgttcatagcgcttttgcagaatcatgataaaggtgtcgtgatcggtgcccttgggctgggtcacatcgtcgcacacggtgtcgtcgggattggggttaaggtcaaagcagaatgcatggcgcgcgatgagataatcgaagttctcgatgcagttatattcggcataatttctcttggaccaatagttgtcgggaatggtcacgccgccgtcgagaatatatcccacatagtaggccgagcatctgtccatatacttttcgagagcccagcgatatgcgtcgtttttggcgcttcccgagctgtcgaggtcggtgtcgggaattttggtaccgagggtgccggtgaatttttcaaaaagcgaaagcttttcctcggcgccgagctcggcaagctttgtctccaccgcgctgcccttgagaaccgggatgataaaa

SEQ ID NO: 2075 - DNA, 32759 bp, Unknown
  16S sequences of unknown bacteria
cgaggcaattatagcaaagattgtattcaacggttatgttgtcggtgttccagtccacatctatacccatcgcatcaaaccgcgaacctgctgcatatatatcataaacgacattgtatcggcagacagaatattcacttgtgatatacataataccgcattgaccgtcaatcccgccgcgctccgttgcgattcctgtctgataaacaaggtttctgtccatggtgcaattcacaccgcccataatatacatacctatctgaccgatatgatgaacggtattgccgtctatgtggatatccgaaatctttttgcgtgccgtgcggttataatcgtcattgtcgggaactgttccgcttgcaattataccgacacgtccgaagtaactgacatcgtttttgagaatatgtacgccggtaagactttctttgacagtaccgtcccatccgccaacacttatgccgtatgcgttcgagtccgcgtcgggatattcgccgctgaaatcataggcacgaagaacattgttgacgatgtaaatgtcgtgataactttcttctcttgccactccgacaccgtaacctatgccggtcacgcgcgtttcgttgtgtgcggaacttgacgcataagcattcacctgcaaatctcttatgacgacacccgacgagttctgaacatttataatgtttcctcctcgcaggatctcgtttccgttcgttataacgggtcgttcgtcaccgtcgccgtatgatgcaaaagttatgggattctcttttgttccgtcaaggtttgaataggacaaactacctgtgaacgtatcgcctttcctgaaaagcacggaatcgcccgctttgagcgaaagcgaagacgcttttgaaagtgtttttatcggggtttcgggtgtcaacccgtcgtttgtgtcgtcgccctccgagctgacataatacacggtaccgccctttgacacgggatacaactgttcttccccgaggtttttatccgtaaacgcatatacggctgaagcctctttgcccgcaaggtcgctgtaaccttttttattgcctatattcactctgattttcattccctcgccgtaaataccctggttcgattcgggctgaacgataatgaaaaagtcgcctgtatacggtacgtcatattcaaaagtgttgctttccgtctgacctatcatattgcgatatgacgcggattcattatatcctactttgtaaatgttgtaatgccatacatcggacatatcgccagctatattcagcagcaacttgccgttttcataagtgcaggtaacgcccttgacttttgacggtgcatcatcgcttctcatctcataagtcgaaccgaggtcgcgtttctgccacgatgaaaacggagagcccgcgcccgccttatatacctgtgcgccctcttcaaaattcaaatacttctttgcagttcggtcggaagccttgaacgaagtgtcaggcgaaacggaatagtatttgttctcggcaattttataaaattgaacggaagaatttatatttacccagaagtatgtcgagggatcgacgtccgctttcaatactatatggttaccgacaaattcgcaaccggtgaattttttattgccgccctcatggaaggctctgaatgcgggagccgatctggttgtctgatatataaggttatcataaatatgggcaccgaacacatcgcctcccaaattacccaatgtgagtgaccctgtatggtttgtggcaccgaggttgccttccaatcggttatgcgctatcgtactgttcagatttgacagagttccgataccgctgccgaggcaatttgatatgtaattatattcaagcgttatataatcggtcttccagtcaatgtcaaatcccattccgtcaatgcctgcgcccgcgtcataagcatcgtatataatattgtaccttgcggaggaatattcactttttatatacatcataccgcactgaccgtccataaaagcgcgttccttgactatacttgtctgataaacgaggtttctgtccattgtgcagttcttgccgccgcagatatacatgcctatctgaccgatatggtgaacggtattaccgtcaatgtgaacgcccttgtaacatttgcggatgtttttggaataagtgtcgtcatcatcggaatcctgtgaatagtcacctctcatttgtataccgttaagtccgacataacttacatcattgttaagaatatatatatccgtcgcataatccaatgttctatttgcccaaacataaccggtaattccgtaaatgtaagaatccgtgtcgggatattcgcccgtaatatcatgtccccgaataatattgtttacgatataaatatcaagattcggattgtctattgcttttttgtattcataagcaatacctcttactgcaggactgccatgagcagaacttgacgcataagcctctatcttaaaatctcttacaacaacaccgcgggagttataaatgccgacaatatctccgcctcgcaaagtttcattcccgtttgtaaatatgggacgattgtcaccctctccgtaagacgctatcgttatcggattctcttttgaaccttcaagatccgaataatgcaagttgccgacaaacgtatcgccttttctgaaaagcacggaatcgccctctttgagcgaaagcgaagacgctttcgaaagggtttttatcggtgtttcgggcgttaagccgtcgtttaagtcgtcgccgtccgcgctgacaaaatacatagtaccgccttttgacacggggtacaaccgttccgcctcgagactttcatcaacaaatgaatactcggcggaagcgccctgtcccgcaaggtctatgtactcgacatttctgacgattacggaacagcccgaaagcagccccgccatacagcagaccgcaagcacggcggcaatcaatacgataagttttctcttcatgtttttctcccgaacctaaaatgttctgtcaatggggtgaggttattttactgtttaattgttttttatcttatatatccgcaagaccgctttatgtgcctctgtcacgcgaaaactttcgatcgctttttgaatagttttattgtgcgtccatatgtcgagttttttgcctgctatgaaaggcagcgtttcttcgtaattctttgcaagcgcggttgcaaaataccacgcaacacccattctgacgtaatattcatcggaacgtatcgcggcgatttgctcggcatattcgactttgaaattctctccgagaaagaattgcataaacatatttacgccgcaccgaacggtatatgttttatccgatttgagccatgcggttgcttttgccgcaagcacttcaagattttttgcaagatttttcgggcttatcgcgtcgcaggtcgcccaattatcgacaaacggcagaaaagcgtcgagacggtcaataatcgcggcgggatctttcaagttggagataagaagcccgtggagcgtattttcttccagataaacgtgaggtaacgagtccagaaattcggtctcgacctcgcttgctcgcagtccttttgcataagcgcgaagaagcggagcgcggacgccgataattttttcgggcgctgtggtgggtatgagttttcgtgtaaactcggcgaacttatcatctttcatcgcaagcagatccgctctgactttttccgttgaaaccataggtttctccttatatcactaagtatcactattatacaataaaaacatcggaaagtcaatataattacgacatattaaataaggcaaaagcataaacattatcaaaggtcaggctgagcatacacagccgaagttaggagttttggaaaaatgaagaaatacatatctttcattctgacttttatattcgtgtttgcgctgcacatcaaagcgacgtttgcgatctcggcgcagagcgcgataacggtcaacgcggttacgggaaacgtcatatacgaaaaaaacgcggacgcgaaacttccgcctgcaagcacgacaaaaataatgacagcgataatcgcgatagaagaagccgaccccgaaaaggtctgcacggtatcggaacgggcggcaaatgagggcggctcgcaactcggtctgataaaaggcgaaaaaataaaaatgaaagacctactttccatgctgatgctccgttccgcaaacgacgcggctgttgtgattgctgaaaatgttgcgggatcctcggaaaaatttgccgaaaaaatgaatgagaaggcggcggcgctcggactgacgtcaacgcatttcgtcaaccccaacggaatgcccgcggacggacactacacaacggcacgggagttggcaaagatagccgtatatgcactagacaacacagcgttcagaaatcttgtttcgtcaaagagccgacatcttgaatacgggaacataacgataacaaactcaaacagactgctttcgtcctacgacggcgcgataggcgttaaaacgggtttcaccaaggcggcggggcgctgtcttgtttccgcggcggaaagggacggcacggtgcttgtaaacgtcacgctgaacgacccgaacgactggcgcgaccatgcggcgatgtttgacctcggcttttcggtttcaagtcgatatgtgctttacaagcagggcgaatacacgataagacgcgacgcgctgaacggcgacggacaaataatctttgccaatgcggaaacgatatatgcatattcctgcgcggggaaaacggttgaaccgaaaataacggaaaacctgcttccctgttactttgcgccttacgaaaaaggaacaaaaggcggagaacttgtcctcgattacggcgggagcgttcaaaagatagaactttatgccgtaaacgacgtgggagaactcgaagaggagaaatcgggaacggagagatttatatattatctttcgcaacttttcaaaaaggtcttgccataatgaaaattttggtgtataatgtaagttgtgattaagtatatctgaaaaggacgcattaaatttgagaattcataaattcatagcggagagcggctattgctcacggcgtgcggctgaggaacttgtccgtgagggcaaggtctttgtcaacaaaaaacccgcaataatcggtcaggacgttgacccggaacgagacagcgttttctgcgacggacacagactgcatctgaaagttgcgaacaagagatattttatcttttacaagccgagaggcgttataacagccatgaaagcacaggacgacagaagcgttgtggcagaccttatcggaggaataaagggacgcgtttaccccgtgggaagactggacagagactccgagggactgctgcttttgacagatgacggcgagaccgcgcaaaaacttactcatccgtcgcatgagatagaaaaaacatacagagtaacggtcaagggcgacccgtcggacgaacagttggatacgctccgcaacggcgtaacgcttgacgacgaagatgtaacacagcctgcgcaggtcgagatacatgcacagaaagacggaaaaacggttcttcacataaccattcacgagggcaaaaacaggcagataagaagaatgtgcgacgccgtggggcttgaaatccatctgctgaaacgaatcgctgtcggaaatctttcgctcgggcatttacagccgggagaatacagaccgctgacgacaaaagaaacggaagaattgcttacgtcggtcggcataaatcccgcaacaaaaataattaaaaagccgcaggacgtcaaaaaaagcgaccccgcggcgcagaaatacgcgcaaagacagagaaaatcgacgaaatctgtttatgagaaacgctttctcaaacagttcggcgacaagaaaaagaaaaagtaaaacaaagggtgatacaaatgcagaaaacttacaaaatgaacattgcgggacttgaaagagaattgcctctctgccccgtcagcgacagtctcgacatcgcggcgtttatcatcttcggcgacgttgaattgaccgtcaaatgcgcggaagcgctcattcccctgcttcccgaacatgatatcatgctgacggcggaagcaaagtccattccgcttattcacgaacttgcaaaacagcagggcgaaaacgagtacatcatcgcaagaaaaggcgaaaaagtatatatgccctccccgataagcgtcaatgtccgctctatcacgacgcaaagagttcagactctctatctcggctcggacgacgcggaaaagatgagaggaaaaagagttctcatcatcgacgacgttatcagcacgggcgaatcgctcaaagcgcttgaggcgcttgtaagcaaagcgggcggcaaaaccgtcggcagagccgctgttttggcagagggcgacgcggcggacagaaaagacatcatattccttgaaagactgcccgtttttcccaaataatcaaatataaagttttatctcccgcatttcgatgcgggagataattatttataaaggtaaaacaatgaagactgctctgcaggagattatgccgtcagtgttgcgaacacaaccctgccgaccgcgaaaaccactgccgacagtataataaaaatcagaacaaaggcattgactttttccctccaacgcatcgccagaatcacggcgtctgcaactgcggcgataatcatgggtatccaacgcaaaaggtcgcttccctgccccgtaaaaaggtctcgaagcatccacgtaaagcaggcaaccagcgccagcgccgcaatagcctctgttacgtgaaaaagcgcggcgcgggagatttccgagcggtacataacaggaattgccattgaaaacaccgtcagaaaagcaagcgaataccaaaacataaacgggtgctccgcgcccgacgaggtctgcgcggtacgcaaaatcattgcgactatcagcatgccgtatgaggcaaactgaacgggagctatcgtatgctccgtatgcatcatacccgacacaagaataacaccggcggtgatggtcagcatagtgtaatcgggaacgacatcggaattgacaagcgattgccaaaagcctttgttgccgaaaatcagcagcaaaacggcggcgacaagagaaagcgccgtcaaagtattgacaaaaccgtcaaagcccgtgcggtacagatcggaaaaagacgagcggctgatgcgcacaagactttgcgcacgctcggcgaagaggataaaaaaatatccgaggaaaaaccatgaaatgacgggatacaaagaggaattttgtaaagcaggcatagtcgcaccttcctttcggcatatttcagcgttgaatggccgtgattttttacaagacgttgccgccgataaaaacttcggggcgcgcttgatttttccgacgttttcaaaatcataaaagctcggtaaaatcggaaacatatctatcgcaaaggtttttcatttcctcggcgtaaggttcggacgggtcacagattccgacgacggaaattctcgctttcgcggcgtttactgcggcataaaaggcgtcttcgaaaacgactgcatccgacgcttcggtctcaaagtcggaaagaactttcaagaacgagtcgggaatatcttttccgagaccgagttcgcgggtggaataaactcgttcaaaatacccgtcaagaccgcagcgtttgagagacgcggttataaacggcgtttcgtttgcggtcagaatacacatacgaacgcccttttttccgtatttttcaagaaattcgggaacaccttttcgcggcagcgccttgcttatataataatcgcggacattgtcctctatccacttgaatatctcatcagatgtcatttcgggacagtaattgtcgtgcaaaaactctgcggcggcatacagtgtcggcattgagttgagcctgtcggtcagtcctttttcgggttctctgccgacatattcgacgaacgcttcgccaaagcccgtccatgcgcccatggtgtcaaaaagtgtgccgtcaaaatcaaatataaataattttttacgttcaaaatcaatcaaaaacaaatacgacctttccgttttcgagtttcaggtatgcgtcaaacggtttcccgttcttggaaatgaaccctcttattttggacgttttgccgttcgtcagcaaaagtttcatgttggaaacagaaataatgcgcccgcaaataacatttctgacggtgaacttgcacccgttatcgcgatagccgcggcagccgtaaccaaacttcgttcttgcgacatcgttgccgcaaagaggacatttgccgacaatatcgccgaaaaagccgtcatcggtatccgtttcgggcggctgaggagttctcactcccgcaaagacttcggcaatctctttttcggcaagtccgacgctttcggaaacggtcatctgaccgtgaaagacctttttaagcgctttgccgagttcggaagtcttatatttatccatgctgatattcattcgtgtcaaagcctcgatgagatattctccgtcgggcaatatggtgtaaacatcttttttcagcaatatatactttgtgttgcaggcgtttttgattatacctgtgcgggtcgcctccgtgccgagttcaagtccctcgaaaatggcgcggtattcttccgtgtcgtcttcgttttcgctttcctgcgctttcgctttttcttctctgaacgggtttttcagataattgttcagggtttctatcgtatagtgtttcggcggcgtggtctctttttcaacaggcttgaaatcaacattcacgcggtcgcctttttcgaggcgaggcagtatcttgtcctgctttccgtattcgtcaaagcgcgtccaaccgggagtaacgataacggttcctttgagcgaaaagtcttcaagcccgccgacatttatctttatttcggttttctcggcgacgcattcttcggagcagaacacggcgacaaaacggcgcataacggcggaatatacctgtttttccgcaggcgaaagttttgaagcgtcaggaatcttatatgtcggagtaagcgcggagtgcgactctattttcgaatcgtcgaaaatggtctttgcgtccttgaatttgacgggataaccgaccgccgtaacattcgcgattatcttttttatcttgtctttttcggctgttgcaagatattcggagttcgttctcggatatgtcagatagccctcttcgtaaagtttttggactattgcaaggctgtcgtccattgacatcttgtactttttaccgaggaaattctgcaattttgaaagcgaatacagtttgccgggagcaagtttgtcttttttcctcttgacgtctgtaacaacggcatccgccgcgttatattctgcgcagagtgcttccgctttggcaagttcgtctttcgtgaacttcttttttgagttcagttctacaacctgtccgttcgtttcagcctgcgaacgaagcgcataatacttttcgggaacaaagttgcgtatctgcatatcgcggtcgtatatcgcctttacaacaggcacgataacacgtcccacacgcagaagtgtgccggttttaagcgtcgcaaatctcgtcagattgacaccataaagccagtccgtatatgtacgggcatatccctcgttcgcaagattttcgtattcggtctcttctttcatctccgaaagtgcggagcgtatcgtttcgggtgtctggtcgggcagccacaggcgcagcagttttttgttccgaacgcccgcgtgagttatgcagagacggactattatttcgccctctctgtctgcgtctcccgcgttgattatatcggagacatcttcgcgcaaacaaagcgtttttatggtctcaaactgtttttcgacgccagaatcgactttttttgtcgcgtcttttcgcaggttgaagcggaattctttcgggaaacacggaagcgttgccattgtccaccgcgtcgagccgtctggattgggagaataatcatctatgtcagccaaagaaaacaaatgaccgaacgcccaagttacaagatactccccgccgtaaaaaaagccgtctcccctgcgcattttataatcgttaaacgactcaatgcccgcaacgatgttgcgcgcaagactcggtttttcggcgatgataagtttcatttccataccctttgcttcttttatgcgcaggcagagaatactcaacccgaccgcataacggcaccattttttattacacagttattatattataatactttcggagaaaaaagtcaaggataaaacggaagaggaaaaagacctcatacgcaataaaaaactccctgccgagagcatttatgaaaaaaaccgaaaaagtattgaaatacatgtcgttttatggtagaataaaatgaatacgcaaactatgacttattgagaggaggcgtccgaaatgagcggaaagaagaatgcaaagatgtattttgcgggagcggtcatattggcagttgttgcaacagccgttgcctttacgctgttctttgtatcgggcaatgacggaatatacagcaagatctccgcagaaaactcctctcaaaacgaacagccgccgcaagcggacgttcctgcgctttcagagttcaaaacggttgaagaaatgcagcaagcgatagacaaatatacgcagtatctcgcgtccgacctgcttgaactcgtaaacaacgaaaaagcagtaagagaaaaagatcttgaccttatttcggtctcgggcttttccgacataaaacttgaaagagaagccgcagaaaaactgaacgcctttattgcacaagcaaaacaggacggcgaaaccgtaacggtatttcgcggctacacaacggcggaagagcagcaggaatactatgacgccgaatacagaaagaatcagggcgcgggatatacaaacgacgaaatggcggaacaaaaaacactccgctcggaagccaaaccgggatacagcgaatatcagacggggcttgcagtttcaataggcgaaacatcttcgacggaaatttccgttgtcaagaacagttcgttttacaagtacgcaacggaaaatatatggaaatacggctttattctcagttatcccgaagataagaccgctgttacggggcattcgttcgaaccgtggcatttccgctatatcggggattcggaacaggcgcagttcataatgaaaaacggaatgtgtctggaagaatacagggactatcttacaagcagaatagagaccttgaaaaagaatatagaagacgaaaactccaaaaagataggaacatacaataaataaaaaatttttcgcaaagtaaaatgctctcccgtttttcgagagagcatttttttacactataacagttgcaggaacggtatcaccgcagaatattggttgattccctcgcccgaattgggggtgaggaacgaaaacgccatatcggcaaggaagcaaaccacaaggactgtgcatacgatgtatcttacgggtttcgggattttcgagaacagattgtcgagcgcaggagcgatgaaatacacgaaaagacttcccattatgccgaacagcagtattccgatgaagcagattcttccgttcagattaaggaacatatcgctgtaatcccaccacttttcgtggtacattttttcaaggaagaaacttgttgcgtattcgacaaccgagcagacgccgcagataataaagaatgtcagaataggctttttgagccatcgtcgcaggaagattatcgccgccatggcgcccgtgccgtaaatcggaagccacggaccgtacattgttccgcgatttacgataatacccttttcggcaaacgtcagacatatttcccatatccaaccgacaaatgcggcggaaaagaagagcaacagcattttatcaaaggtataacggcgttcggggtgcaacgaacggtgaacaacttttgtttttgtgccgggggcaagcggatatgcgtccgcaggatacggactttccacaggcaaaggcgcgttcaaggcgcggtcgataaataattcgtttttcggtttgacgttcagaacggcgtccgcgcgcagatccatataatactctgtctttgtgcctgtataatacgcattgacataaaaaatattgagaagtccgacggtgagcagaccgagaatacgccaccctacgaaagacaaatcaagcgtaaacgcgcgccatttctgccctttcatcatctgttttgaaagcgcaaaagcctctctcgcggtgacggaaggattttccgcaaggatgtacggtatcatcgaatattcgtaatgctttataataccgcctacgattgtcagccaccaaaggaatgagaatatctctttttttagcatgacccatacgacacggggcacgctgtgttgacggaacacgaaaaatgttttgattattcttgttttatatcggcgcgcttccaaaaaataccgtttttcgccgacgcggagacttgccgaaataaatatgtcgtacgcgattttgacaacaaacccgataagaagccctatgccgactatcaccgtgtttgaggaagcgaacattatcgcgcttcgggcgatgttgagtattgcgctgtcggagtcaaacgtatgctcaacaacgacctgcactccttgctttacgacggggctgatgccttttatcgaatcaatcccgtcaataatgccgtcaagctttctgattatctcatctcttaccttatctaccgcggcatcctgtttttcggtctcggacgagctggtcagcgagccgatggaaaacatcgacgaataaagtccggcgacaacggcgacaaacagacaaacgacaacaagccgccaataattgaatcttattgtctgttttgcgccttttttcagttgcttgaacgattgcattttcaatccccttttgcatatacttcggcgatacgcctcgcctgcatttcaatttcttctctcaaactttcgggcgccaaaacctcgatacgggaaccgaattgcataagccatccgataagcggcggtccgacataagtttcgaaccgtgtggtaaacgtgccgtccccgttatccgttatcccgacatccgttccgaatttgtcgtaaatgacaccgacaaggtcattggatgctttgaggcgaacatatatccgctcacaggcatacattccgaaaacgcgtgttccgtattcctttatatctataccgttcggcagaggcagtctcggagagtaggaaatcgtgacgttctccattttgtccacgcggaaatgagacactttcccggggtggttttcgtcataggcaaggcagtaatagttctcgttatcccacgcaagcgcgtaaggactgacagttctcatatcgccgcgataaacgcgaacgggaacgccctgcggagtttttgacgctccgtaattaaaataacggaaatttacctgtttatctgcggctatcgcgttatgaagagcgtctacattgtaataaatgctctcattgcccgtctttgcgcggtcgttgaaaaatatttgtcgccgtatctgccccgaaagagaacgcgatgtcagcgttccgagttttgaaataagaacgtcggactttttctgcgttatgaactttgcggaagcgaccgcatcggcaagcagtttcaattcggcaagttcaaaatctcttgcgccgatataatatccgtaactaacaccgccgcccttgacgctgacaatatccataccgaaaagacgcaattgttctatgtcatcataaacactcttgcgttcagcctttattccctgctcggaaagtgacgcaagaattttttccattgtcagcgggtgttcttcgtcgctttcttccaaaaacaaacgtgcaagatacatgattttcagtttttgaagcgcgctttttgccacggaagacaccccacttacggctgttttatcatatattttttcgataaatgtctatgcggatttattatacaatattttgtcacatttgtaaagactttgccgaaaataaaatatttacaacatacttttgtcacacatcttgattgacaagaattttcggacggcgtataatatatttatagtataaatattcaatgcaaggagttattgtaaatggaaagagtttataatttttccgctgggccgtcgatgatgcccgaagcggtacttaaaagagcggcagacgaaatgctgaactgcaacggaagcggtatgtccgttatggaaatgagccacagatcaaaggcttttgaagagataatcaacggtgcggaagcgacgcttcgcgaacttcttaatattcccgacaactacaaagtgcttttcctgcaaggcggaggttcgacgcagtttgccatgatcccgctcaaccttatgaagaaaaagaagatagatatatgcgtaaccggtcaatgggctaaaaaagcggcgcaggaagcggaaaaatacggtcaggtacacgttgtcgcatcgtctgcggataaaactttcagttatattccagaactcgatcccgcaacgtttgacacggacgcggactacttctacatctgccagaacaacacaatatacggaacgcattactcaaaactgcccgaaacaggcaacgttcctcttgttgcagacctctcgtcctgtatttgttccgagccgatagacgtttcgaaatacgggcttatctttgcgggcgcacagaagaacctcggtcccgcaggcgtgacgatagtcataatcagagaagaccttatctccgagccgatggaattcactccgacgatgctccgttacgacattcacgcaaagaacaactcgctttacaacacaccgccgtgctacggcatctatatgtgcaaactgatgttcgagtggctcaaaaacgatatcggcggacttgaaaatatggcaaagataaaccgcaaaaaagcggatatcctttattcgtatctcgactcttcaaaacttttcaaacccacggtacagggagacagccgttcgatgatgaacgttccgttcgttacgggtgacgccgatcttgacgcaaagtttgtcaaagaagccgcggctgcgggctttgtcaacctcaaaggtcacagaaccgtcggcggtatgagagcatccatatacaacgcaatgcctgtcgagggtgttgaagcgcttgtggaattcatgaagaaattcgaagcggaaaacgcataaacgtcaaaggagcaaatactatgttcaagataaagaaactcaacaagatagcggcggtaggcacggatattctcgatgcggacaaattcacctgcgcagacgatatcgacgcgcccgacggtatacttgtccgcagcgcggatatgcacgaatacccgctgaaccccgaactcaaagccattgccagagcgggtgcgggcacgaacaatattcctcttgacaaatgcgccgaaaaaggcatcgtcgttttcaacacccccggcgcaaacgccaatgcggtaaaagaacttgttatcacttccctgctcctttcgtccagaaacatcatcggcggcatagagtgggcaaaaacccttaaaggagaagcggacgtcgcaaaactcgtcgaaaagggaaagagccaattcgtaggtcccgagataaagggcaaaacgctcggcgtaataggtctcggcgcaataggcgcacaggcggcggaagcggcgttctacctcggcatgaacgttatcggatacgacccgtttatgtccatagaaacgtttatgacaaaaatgccgtttgcaaaaaaagttgacgacgaaaacgaaatattcgaaaaagcggattatatcactcttcatcttccgctcaacccgcagacgaaagaaatgataaacgacgaaacgcttgcaaaatgcaaagacggcgtaagaatcgtcaacctcgcaagaggcggacttgtcaacgacgaagcgcttgcgcaagccctcgaaagcggcaaagttgcgtgctatgtcacggacttcccgaacgacaaaacgcttgaaatgaaaaacgcgatagctattccccacctcggtgcgtccacgcccgaatcggaagacaactgtgcgattatggcggcgtccgaaattaaggatttcctgcttaacggcaatatcaaaaacagcgtcaacttcccgagcgtaagttcggaaagaagcacgggcacacgctattgcatcatacataaaaacattccgacgatactcaatcaatgcacggctgttctcagcaacggcgaccgcaacatcgaccacctgacaagcaaattcaagggtgattacgcatatacaatagtcgatatgaccgaaaacacaaacggcgccatcggcaaagaacttgaagccattgacggagttatcagagttaccgtgctgtaaaacataaaaatttcaggggctgtaaaaaaacttgtgtttctttacagccccacatttaacatatccgaaaggaggtttacgttgtgaaaatcacggtcacgaaagacggcaaaataattaaagaatatcttctcgacaacgacttttctacctcgcagatacgcacgcttaaaaagaccgaaaacggcataaccgtcaacggagaaccttcgaccgtcggaagacttctcaaaaacggagacattctcgaactaaaaacggaagatgcccgcccgacgcccgtcgagcccgcggatattccgctcgatattctttacgaggacgacgatatcctctgcgtcaacaagccgaaaggacttgcgacgcacccgcacggacagcatacaaaaacacttgcaaacgcttttgtatataaatatccgtcgcttgttttcagacccatcagccgacttgacgcaaacacgagcggtatagttctcatcgcaaaaaaccgctatgtttcaaaccttttggcaagcgaaatatcatgcggaagcattaaaaaaacatatatcgccattcttgacggcattccgaccgaaaagacgggaacgataaacgcgcccatagcgcgcaaagcgggcagtaccatagaacgcgaagtttcggaaaacggcaaagaagcgataacggactattccgtgcttgccataggcgacgggcacgcgcttgtcgaagcgcacccgcgaacgggcagaacgcaccaactgcgcgtccatttttcacatatcggctgcccgatacacggcgacggcatttacggcgcggacgccgacgactgcaaaggacacgtcctgcacgcccgtcaactctcgtttatccacccgagaacaaacgagcgcataaccgtcaccgctcccctgccgcaggagttcattgacctttgcggggaatacagtttaacacatacattttaaaggctctataccgatattggaaacagtttcaatatcggtatagagcctttaaaatatatacttatgctaattccatgccatcttgctttgacacactttgattaaaaatgaatttttcccattaaataatcgtttaccaatttttcagtagaaacagtagtatcgttagtcgagtaattagatgctgaaacctcaccggaacaaagagtctcattaaaagattttacagccccacacttaggacatttgcaggtaaactttactgtcacatataattttgatgccgctctttttgaattgcttgaatcagaccaataatgagaaacctcttcatatgtagtattttccggatcaccaagttgtgccccacatttatcacatataagatttttcaatctttgaattcctctcttcgtagcataaagattaagtccgaaaaatatcgatgcaagcattcctatcacagcgacggccataagaatattggaaagagcttctatagcttctacaagatacgacaatagagcaaaagtcacaagcgttcctatagaaataaacaaataagtctttgtttcaccaaaaatttcctttgcttcttcaagattcttattcttctttttaagtcttttaaaatagttttcttttttcataaaaatcctcctaacagttcttcaaagcaagattcacattttaactatttaatttcatgtataacaatttcttttacattcctatatgtcttgattttgccgtctgaaaagtgcactgcattaattttaaatacaatttttaattcatctaaacttgtattccatatttccctggcattttcacctttttctgtatgtaactgaattccatatttttctgaagattttctcaatatattcccccgtatttcagcagatgaggtagacaacaaatcaccatttttattaaatacttccatatcgccacgtataagtttaacgttatacggactactgtttttaacatctaatacaaatgtgtaaaaatatccagaatctctatgtcccgaaaccaaattttcgttataagcatcgtttgttttagagacaacagttattgaaatattctttatcgagtgtcctctaatagtaaatatcaaacaacatattaatgaaaatgcaaaaactaaaaaactgcaacatataatatacttctgttttttcttatgtttttgttcttcatttgtgataaattctatccttttatttatatgctccaaaagaaaacagccgctcggaagaattcctttttgcactaatgacatcaacgacgattgtatatcctttgcattagatatagatgttacttcattaataacatccttgccattatctataatatatttaatcgcattatttctgcttgaacgaataatttcttgctcaaatggctgaaacagatgatacacatcattttttaataatagtgactttactaattgtataaaatcatcttctgattttgtttgaggaacttcaacagcgaacccacttttaataagttcttttctgcgataggtgtatgccaacctcatcaaggcactttttgcttcactcttatcatcaaataacggaagtttgatttcttcaacatatttaacggctaaaaggcaatcttcgtatgattcgacacagtttataaaacataactttgcgtgatctaacaattcaattgttttatcatttttttcagcagaatcaaaaaattcaattatgtcaataaaatcagatgccgacaagcaatagtgctctgggctaatcacaatatctgcatattgagaatatatttctttataccgcctattatctttatttactaaatgttttttttcttgatacctttgagtctctttatcaagaaaatcgaaaatcatatatgtatttccgcaatattcacattttgatgatatttgtccttgatcaaaatgtaattgagccccacaagatttgcgtttaaattccatttttaagcccttaatacaagaatcattatgctaaaaatcaaatcattttttatcttctatatattatgttagatcccttaatagtaaaaaaagtaatattgcctttaaagccattttttatccacgattttcttttaatacgaccctcattattataatcacataaaaatagcgaactttcttttttagttttttctacaatttcaatgatttttttcaaatacggcttatcttctttactacaactccagccatatacataaatctcattggaatcccctttaataaaatctctttctatcttctgccacacattgtcattgtttttgattatcttttccgtatctttgtataaaacggcttttgcttccagcatataatccgaacaacaatccaaattgttgcttttacaatttgccctatctccgccgtgtccaactataattgtctttttatcactagcctttccatgtatatgacaaacacgagaatcctccggactcaaacagaatagccgttcaaatgtatctgtataattaaaaataataattgtatcatcattattaatacatttcaggctgcaatcaaacccgtttttttcaatgttactacaatctatactgcttatccactctgcaaacatggaagtaatactaccgacagacgatgtaataaactctgttccgaaagatacaggcgatccaaaactgttatgctttccaaaatatttatctgctttttgtatgtactttgcccaaggcaggcttcctaaatcagtttcaaaatcactccaattatcatcgtttaactcgttaatcatattcactaacatagccgcaaaaaatgcgtttctttttttatcgattgcatttgcgtcagaagatgggaaatcagtcactatttttctataaaaatctcccgaatatatatttaattcccttgaaaagggcaatttgttattatcggaagacatcgtaagtttatacttttcacatagccattcaccaaactttttatatgacgttgcaccgttcaaatgccccatatcataaccatttccgattattatcaatctacccataaaagtttaactccttttttataatttctgctaaacagtcttattttagattaaatataaaagcatcaaaaagtttatatcaaatataaaatatacttgactaaatacaacataatccgcattatgttgtaaacgaagactaaaagcatatattatttatatacaagacagacgcatataatttatgaccttttcattttataaagcataaaaagaaaaggttttgttgctataccaatttttcaattattttcatttttttacattttttaacgttgttctgttgacaaagcgttctttttgtgctattatatttatagaagatttgtatacatatcaacagaatattctttaatacaacataatgcggattatgtcgcaagcgtcgccgagtggcggcgttttttgttttctggctataatatccatgcggcggcggtgctcggtgccggtggagatgatatatatgcgggtggtgttgatactgctgtgcccgagaatatccgcaagttttgctatatccttttcaatgccgtaaaaaacgcgggcgaaaaggtggcgaagattgtgcggaaatactttttgcgggttgacatttgctgctttgcataaagatttcatttcacgccagatgtttgtgcggtttatcggtttgcccgcttttgttataaatatcataccggtttttatattctgctctgcggcatagcggagcagtttttttcggagttcttttacaataaatataacgcgcgtttttgatttgcagtttacgaccgcttcgccgttttttaccgcttcgaccgtgatataccgcagttcgctgacgcggattcccgttccgcagatagtttgcaggataagtttcagtctttcgttgcgtttttcgtccgcggcgcggcagaggcgcagatattcgggttttgtcagttcctttttttcggagcaaaatatctgacgttgaatttttaaggttttgacttttaaatcatgccaacgcaaaaacgcaaaaaggctgttgatacttgaaagcatggaattaacgctgcgtgcggcatagttttgcattatttgccttttatatgcaagcacggcatcttttgtgatttctgacatttggacatattcggcaaaggctgcaacatcgcggatatacttttctatcgtggcggggcttctctcttccgatatgagatactctttgtatgcggctaaaatcgaggttgtgataaatcgtttctgctccttttttctcctctgaacaaaaatattccccctgacggtatcagggggaataaaatttaacttatgatattcggttttacatatcgtttgcaacgatgtcttcaagggtctcgcggagaaccgcaagggacgttttgccgttgtttatcatggcaacgggaagtctgcctatgcggttgtagttggacgccatggaatagttatacgcgcccgtggtggcaaccgcgcatatatcgccgcggcaaacggaggacggaaccataacgtgctcttgaattatgtcgccgctttcgcagcatctgccgacgacggaacactccatatcgcatttttcgttcattttgtttgcgatgaacacggtatacggggagcggtaaagcgcgaaacgcgggttatcggtcatgccgccgtcaacggaaacatagtttttgtaaccgggaatacgtttgacggttccgacggtgtaaagcgtcattcccgcgtctgcgacaatgcttctgccgggttcgagacgtatggacggcagatcaatgccgagccccgccgcggtcgctttaagagcctccgcaacctgtctgatgttgtccgcgatgtctataacggggtcgttttcggtataacgaacgccgtagccgccgccgaggtcgagaatttcggtcacatagctgtggtcacgcttcattttcatgataaagccgagcatgataacggaagcgtcgagaaatacctgcgaatcgaaaacctgcgagccgacgtggcagtgaaagcctttgagcgcgatgtttttgagagaaatagcgtgaacggagatctcttcggcttgtcccgtttcgatgcttgaaccgaatttggaatcgacttttcccgtcgcgaccgcttcgtaagtgtgcgggtcgataccgggggtaagacgaagcaaaacgggctgaacaacgcctttctcttcggcgatgcggtctatcgcgtcaagttcttcgacattgtcaacgacaaagtagcccacgccgttggaaatggcaaaatctatatcagcgtcagtcttgttgtttgaatggaaatatgctttttcaagaggaaaacccgctttcatcgcggtgtaaatttctccgcaggagacaacgtctgcgccgagcccctcttctgcgacgattttatacatttttttgaacgacgccgccttgcttgcgtaaagcgcgcaggaatcgccgccgaaatattttttcatcgcgtcggcataggtgcggcagttttctcttatgcgctgttcgtccataacataaagaggcgaaccgaattcggagatgagttcgggggtcgggacgcccgcaaaggtcaggattccgttttcaacgccgatatttttgcaaatcatatttttaacactccttaaagcatcatttttctgagatggtcgggaaaaagcgcggagaggtcggcgggtgcgacatcgaaaacggttttacagccgcggcagcctctgtcatacatttttttaatcgcgcgggcataagcgacaagcacgctgcccgtgaattcggggttggaatcgagctttaacgagaactcgcagacgtgggtgttctctttgtcaaagccggttttgccggagcggataacgctgccgccgtgaggcagcgccgcgtggtctcttgccatttcttcggaggaaatgaaatgaaccgcggtatcataatccgagaaatagttcggcatggttttgatttcgttttctatatacgcaaggtcggcaccctcttcggcaacgacatagcattctctggtatgcttttctcttgtggacagctcgggatcttcgccgtttctgacagcttcgactgcggacgcaacgggaacggtatactgtctcgcgtctttaacgccctttatgcggcgaatcgcatcggaatgaccttggctgacacctctgccccagaatgtataatcctgtccgacgggaagaaccgcgttcatataaagtcttgcgagggagaacagccccggatcccagccacaggaaataagggcgatattgtcgcctatctttgcggcatcatcaacattttcaaaatgttcgggaatctttgcgtgggtgtcaaaactgtcgataacattgaaatgcttcgcaagcgcgggggtcatttcgggcaagtccgtggcgcttccgccgcagattataagaacatcgattttatctttgaatttttcgagttcgtcggtatgataaactcctacgcccgcggttctgatcttaacagttgctggatctcttctcgtgaatacgccgacaagttcggtatcgtcgttgagcgcaacagccgcttcaactcctctgccgaggttgccgtaaccgtaaattcctatctttaacataatatatcactcctgttttaagcattcaatgcaataaggtcgttcatatcgtacatacccggttcgcgacctatcataaactccgcggcggcgaccgcaccttccgcaaaaagagaacggctcgacgcttcatgtttgagggttatggtctgtgtgtccgtgccgatgattatttcatgttcgccgacgatgttgcctacgcgaacggcgtgaatgcctatttcatcttcctgtctcttgccctgtccgcttctgccgaggacgaaaaacgccttttcgcgaacttttttaatcgcattcgcaagcaacagagcggttccgctcggagcgtcaagctttctgttgtggtgcttttcgattatttctatatccgcttcggggaacgtttttgccgcggtttttgcaagttcggcaagaagcgctatgccgagagacatattcgcagaccaaaatacgggaacggtctttgaggtttcttctataattttcttttcttcgtcggtgtgccccgtcgttgcgataataacgggcttaccgacctttttcgcgtattcgcagagcgcgggcgcggacgcgtggaaagagaagtccacgatgcagtcaaaatcaatatttacgctgtcaaaatccgcaaaaacgggaacgcttgcagtttctccgttcgggtcaacgccgccgacaagttccgcgccgcgataaccggtcagcgcaagtttttcgacttctttgcccattcttccgcaaataccgttcagtaatattttcatattcgtttatgctccgtttcttttgcttttacacattcaaaccgtgtttgcgcattattgagagaagatttgcctcgtgttcgggctccatcgacgtaagaggaagtcttaaaaagttttcgccgtagcccattgccgccattgccgcttttacgggtatcgggttaacttcgcagaacagcgcgtttatcaggtcaagcatatcaagctgcatatcgcggcttttttcggtctctcctctgaaaaacgctttgcacatttccgacgtttcgcgggggaacacattggaaagaacggaaataactcctttgccgccgagtgaaagtatcgggactatctgatcgtcattaccggaataaatatccatttttccttttacgagagccgcggtctccgctatctgcgaaatgttgccgctcgcctcttttatcgcgacgatattcgggtgttcggcaagaacggcgcaggtcttcggcagaatattgcagcctgttctcgacggaacattgtaaagaattacgggttttgtcgaagcgtcggctattgccgtaaacgtttttatcagtccgttttgcgtggctttattataatagggcgtaactacaagcattgcgtccgcgcctatcgagcaggcatattttgtcaggtcaatggcataagaggtgtcgtttgaacccgtgcccgcgataacgggaactctgcccgcgattttgtcaaccgcgaatttcaaaacctgtctgtgttcctcgtccgtaagagtcgagccctcacccgttgtgcccgcgaccacgatagcgtctattccctcggaaatctgccattcgataagccgttcaaacgcttcataatcaacgccgtttttgttcagcggcgttacaacagcggtcgccgctccggtaaatactgtgtttttcataacgatatcctccgtattacagaacttttaaatcgggacgtcgcgaaaaagataacgggcagaagcctgaaagccgctgcccgaaaaaatccgaatgaccgatgacctttaaaaggtcaacggaaacaggttatcaaacagatagctctccgcaaaactgcgacagcaatgcaaatcttatttcacactgccggatcggtctttcgccgcaaccgtcctcggcattcgcacctttcgccgcctcagccctgcgagagccttatccgaaaacggttactgtttgcaaaatgcgcctctatcattgtatatgtgtattctatcactaaaatcgcgatttgtcaataggtcgtttgtaaattatccgtggaaaactatctcgacctcgttgtgcatctcttcgggaatggtctcacgaagaacgccgagagccttttccttgcctattattacatcgacagccgcttcgaccgcaacggaagatgttgagtagcagcaaactatttcatctacaaacggcagctgcgacgcaacataggggtttgaaacgaccgctatcatattcgggtttgcggcatgaacggctttcaaagcatcaagctggcgtttggtcataagtccgacctgtcccgagcgtgaacggaaagacgtaccgaaaacgacgatatccgcggcttttgcctgttttgcgagttccgctatctgctcatcggtcgcatcgggtgcaaacagcgcgagctgcgcctgcggaacatatttcgcaagcgtttccttgataagcgtcatattggaatacagtccgaagctaagtctgtttgcggggtgcgtgggctccatgaccataacctttttaccctcaaaatcaatgggaacggcattttttctgtcacggataagcgtcacggatttcttggctatctcacgggcaacggaccagccgtcacgtttcggaacatcttcgcgtttttccgacgagaaaagtccgagcgcgtatttctgtttcagaacgcgaaggcacgctttgtttactatctcttcgtcaagtataccgtcacgaactgcctgtgcaagtcctgcgggggcgttccatgcgtcgttgggaccgaggataacatcacagcccgctgtaatggcacggatagtacccatgtgcggattgccgcagttcttttcggattcggtcatacccgccatacccatagcgtcggtatacataacgccctcaaagccgagttcaccgcgaagaagatcggtcatgacagcctttgaaagcgtagcaacgttttccgcgtcgtacatatcatatatggcatggttgcacataagaccgccgacgcccgcttctatcgcctttttgaacggcttcaaatggatattttccatttcctcttttgtcgttcttgttttttcaagcgcaaaatgtgagtcggagaactgcattccggctccgggaaaatgctttgcggtgccgataagtcttccgtccgattgaagtccttttatatatgccgcggcaagagttgccactatatcggggtcttctccgaaagagcggatatttgttatcgggttttcggggtttatgttaacgtcaacaaccggaccgaaacatatgttccagccgaggtaggaagcctgctgcgaaacaactcttccttcttcatacgcgagacgttcggcgtctttgagatccgctatcgcgcctatcgccatctgttccgcaaactcggtggctatggagcggtcgtgaacggtctgacctacgcccgtttccatatcaacgccgatgaagaacggaatgtcggcttcgcgttgaagtctttccatatcggctttaaagcgcgcaagagcctccgcatcatgcccgtaaatgacagataggttgccgacatgatgttccatggcggtctcgcactcttcccagcagccgatgcctgtcgatacaagctgtccgcatttctgttcaagcgtcagcatttcaagaatctgttcgggcgttttgccctcaaatctcttatccatttttatttctcctcagtttgtacggaagcggtaaacgtcccgtttttatactgtttttttgtgcaatgagcggaaaacaaggcgcgaagtccctccgaatttccacttgtacaaccgtttttatcaagaatatacgcataggcctttgttctgaaaacataaaagaagccgtctgtttcatatattttgaatatatcggaataagaaagcgtttgactgtccgagccgtcggcgtcggaaatacttattgaaagtccgtcatcggacacggtaacgtcggagacaagcgttttgcccgtatcgtttttccgagcaagttttttcggcattatgaaaaagcgggaatatatccaataagagcagaaaatcactataactatcgcgatatagtcgttcattccgagttttattccgttcgtcaattttgcaacaacattataaatattgaatacaaacaacgcggcgtaaagaacgataaaaccaattacaacagccttgtttcgggagaaaagattgaacttgaaaaatttcagcatattctcctgcgtatactctgttctgacggaaacctcacgcatttgccgcaccccgattttcaatattttatcaataaaataataacacatttgacaaaagcagtcaatcaaaaccatttcgatttaacaaaaaagaactattccgccaaatgatacaaattttgcctgaaattttgggaataaagaccaaccgaaaatcgttgacacaactgaaattatatgataaaataagtttgtaaacggttcgcaatctttacgaatttgagagtttgaaacggttgcggcaaaatcatatgattccatgaggtgaaagagaatgaaaagaatcatttcggtcattatcgcactttgcttgacggtgtcccttgtcgcgggctttgcgatgggaacaaatgcggaagtagcagataaacgcgttcttccgagagcggaaaaggctccgactcttgacggaaagcgtgacgacatttacgacaaaggattccgcgaaacgctcaacatcgacactgcgggtatggtcgtatccgaggaagaagatttcgacacgggaaagcccacgccgaaattcacgcccgcaagcgctgatatttccgctgtatggtactcaaatgttcctgacggaacagacatcacacgtttgagtcaggttatttcggacacggcaggcggaatttacattttcgcggacgtaacggactgttccagagcatggggcgtaaacaaccaaaccattattcaaagcgaatggcttgaaaatccgaacgcttacgaatatgcaaaggctaccccggagtttgaactttcggacagtttttgggtattgcttgatccccttaactacaaatcttcaagaatgcttgggctttccgaatttgcgttcaccgcatatgcaggattggcctcgggcaacggcgaaataggcgttcccgttccgtcttggagagaatactactactggggtcttgacggcggaaccgtaaacggtgaatccggtgccggcggaacgattgcaaacgcgataggcacacaggtaaaatccacagtcaactacaagttcgatccgaactttccgctccccgaacctttgacggattcctcgtcaatagttgaaaagtatcaatataagagcaaactccttaacgcatacatgcgcgcaaacataaacggttacacgcttgaaatattcctcccgtggaaagcaactcagatggagattaagggagaaagcaatctgccgccgttcctcattccgaaagtcggaaccgaattcggaatgggtatgctcctgatggataactggttctcttattgggaagaccatagctacggaacaaaaccgaattacgaagaagttcagtattacatttaccacaactgccacatgacggattacggcaaagacgttatagaagattgggcggatattgcgtatcccgaatatttcccgacatacgttctcggagactacgcaaaagatacccccgacatcgtttacggtgatgccgacggaaacggggaagtagacatcgcggacgcaatgctgatattctatcacgttgcgaaaaaagaacttttgacggacgaacaacttttgcgttgtgacacaaacgatgataacgaggtcgatatcgtcgatgcaatgagagttttctacttcgttgcgaaaaaaatcgattccgttaaagaataaaaacagaatataaaacaaagtggcaggcttcaaaagcctgtcactttgtttttcaagtttattcaaattcctccgacggcttccgcggcaaaccttgccgcgcctaccgcggcggcgaaagtcatgtcggaagaactgatatcaacgccgaaaacatgagaaagagaacgtctgaacgcttcacagtcaattcggcttttgccggaaagaatcaactttgtcggagttttaaaaacaaagcacaggcgacgcgccgtttcctttacaaacgcggagcaaagtcggtcgggagtaaaaccgtcaaaatcggcggcaagtttcagtctgccctgctcgaaccgaattttcggaagagacgtttcattcagagccgaaagagcaaggtcccctacggttcgggcaacattttcggtacctccaacgcttaccgaaacacgggcgacaaaactgagaagagcgtcatacgctttcaccgcatccgaatcacgtctgacaaacaggtcatatccgccagacagcggcaatcggatagtgccgagaggctgtttttccgattttgaagcaaaatacgaaacgaactcgttcttgcggagttcgacaagcacacctcccctgtcggcagaacctaaaaaccgagcctgatttctgccgagagcgaccgatacgggaatgttgccgaaatatccgacaacggacgaagaaccggtcacttccggatagcgaagatcggcaaggctgcatttaacaacggctcgactgtcaaaatctttcaactcatcagaataaaatccgacatcaaacgcttccgacgtatggaacacgggtcgtttgttgtcacagagggcggctgacagatatgaagcaacagtagaaaaagtatatgcgtcggcgggcacaagtgccttatcgacatttgcaaaatgcgcaagcagtccgttttctttgcgaagcgttaaaccgcatagttgttcgacacggcgaatatattccgttttttcggaaacggaaagaaaatccgaaacgcagcgtccgtcagcagccagataaactatctttcccggaataccggtcagacatatcgctttcggttcgtattcctgcgcaagatcggcaataatacctatcgccgtatcgcagaagcgctcaaacgatgtttcggacagcggttccgtcagagttgcgacaggctcggaattttccgtcaaagcgaccgtcagaaaatcttctccgacatctacgccgagatacatttcgctcacatcaaaatctcccatacaattttttcttttattatataagtatatcacacgaaaaatgaaaagtcaacggaaaacatgaataatgcctcatataaaggcattttctgagaaaaataagattaagccgaacctattgcattttttgtttttttatgatacaatgttctcgaataaagaagatggtttttctttattcgaaagagaaagaaagataaaaacaggggagaaaaaaatgggggctcttgaaaaggctgagacgctgtttctttggtttatgatatacagcgttgtaggctggatttatgaaagcatactctgctccgttgcgcagaaaaaatttataaacagaggatttttgaacgggccttactgcccgatatacggcagcggggccgtgcttgttattcttgttctcggcaaattgacaaacccgtttttgctgttttttgcgggtgctcttttgacgtgcagtcttgaatacctgacttcgtttgtaatggaaaaactctttcatgcgcgctggtgggattattcaaagcgcaaattcaacattaacggtcgtgtttgcctgataggagctgtggttttcggcgcgttttcaacggttcttgttttgtggatacacccgcttgtaacaaaactcactgatatgctttcacctcttgcaagacatatcgtttccgctgttcttttctgcggaatagttacggaccttgtgttcacggtcaagggcatggcgggattccgcgagaagatagaggaagtttccgagcttgtggaacagcagaaaaaggcgctggaagaaaagatacacgattcggaagcggccgcaaaacttcgcggtcgcagaacggagataaaaaagaaatttaccctgcaacaacgcagacttatttccgcgttcccttcgctgaaattcaagaagccgcaaagcaacgaaacattgcggtctcttcgtgacgttatgaaaaagataaaggaaaagaaggagcgctgaatatgataagggacatttcgtatatcctgcttggttacggtctcggaagcgttttgtttgcaaaagtattctgctcatggttgaaaaagaccgatgtgacccaaaacactgcggacggcaatccgggaacgacaaacgcgttcaagaacggcggtttcctttgcggaacattaactctcatctgcgatatactgaaaggatttctgcctgttttcttttatacaaggggcaacatgacggtgcttttggcactcgttatcgcggctcccgtcatcgggcatatcttccctgttttcaacaaattcaaaggcgggaaaggtattgcgaccacattcggatgccttttcgggatattgtcgaaatttgttcctctcatcgcgtttgcggcgatattcgttttcttttcggtcataatctgcataaaatcgcattttcacagaacgcttgtgacgtatatctg

SEQ ID NO: 2076 - DNA, 3407 bp, Unknown
  16S sequences of unknown bacteria
gagctgggactgaccgtggatcaggtggcagactaccatcgataccccattgccgacaatgatgcaccggccctttccgctgaccggttggaatatacccttggaaatctgctcaattacggttttgccgaccggaagaccgtgtcggccttttatcaggatttggcggtaggaactgatgaacaaggccgggaagaactggtgttccggactccggaaattgcagaggcgtttaccgctgcggcgctgcaaaattcccgggtctatgtggcggatgaagaccggcttgcgatgcagatgctggcggatctgctgcagaccgctttgcggcggggggtgctgcagcgggaagacttatggaaaaccgagccatgggtcatccggcagctggagacagatgcagtatgccgtgagacgtggcgccggttttgcagaagctgccgggtagtgcgcagtgaggtgcggccgctggatggtcatgtctggcggcaggtggatgccaagaagcgctgggtggatccgcttgtcctgggaatgggacgggtgtcccaatggagcggggcattgcgggaacagctggcatcctttcaagcgttggatttttccgtttggctgcgggctgagacagaaaagcgcgcgttgggagagaattcctaacgcgcgcttcctttattttatattgtatagtaaattgtgcagcgtctttcccatgtttgaaaacttcatacgatgggaagcaggccgcgcagatcctggatctcgtagtccaaccggagatcggttggacgggggagtccgccgggattgacccagcagcagggaaggcctgcattgttggcgccccgcatgtcggtggcaagagagtctccgatgaccagggtgttttccggtgtgatgccgggcagctgagatcggacatagtcaaagtaggcccggctgggtttggaggcaccggcttcctcggagatgaatgcaccggaaatgagcggtgcgaaggggctgttttccagacgctttcgctgcacggaggcgaccgcattggtgatgatgtagagctggtgtccgcgctcatgcagcgtcctgcaggtttccagagcgtaagggagggggtaggcccgctgtcccagggcttccaaatagtcacggttgcaggcagacggatctgcgttcaggtccagcgccttcaaaaaacggacataccgctccagggtcacaaagtccttgctgacttcaccgcggtcaaaggccgcccaaagttccagattgatgttgtgatacagagcgtaaacttcaggcgtatcggggatcccgtgtttgcggcacatgatgtgaaaggcccgggcggaggcgcggggaaaatcgaagagtgtatcgtcggcatcaaagagcaggtagagatagttcatggaaccggatcctttctgttgggatagttcatcttaccatgccgggcgggaaaagacaatcaccacccagtccggagcgccataccatggagcgagggggggatgccatgtgaaatggcggttcggcatcatcggcggagaccgccgacaggcggaactggcccggatgttggcacaggatggacattttgtgaccacatatgggctggattccggtgagaatatgctgaaaggacgtttggaacaggctctcagcgcggatgtcgtcattttgccgcttccgctttgcgccaaaccgggaatgatcacctgcgcagcggaggaaattcccgtggaagccctgcttgaacagcttcaaccaacacagctgattttaggcgggcgcgtgaaggcggaagaacaaaggatggcgccggcccgggggttgcagctgcgggattactttttgcgggaagaactgacggtggccaatgctgctgccacagcggaagcggcgcttcaggtggcgatggagcatttggaccggacactgttgggaacaaactgtctggtgctgggttttgggcgcattggaaagctgctgagtttccggctccatgggctgggagcgcaggtgacagccgcagccagaaaggcgtcggaccgtgcatggattcgggcctatggttggaatgccctggacaccgctgcgcttacaggagagctggagccatttcctgtggtattcaatacggttccctcactgcttttggatgagccgctgctaaaagaacttccgggtggatgcttgtacgtggagttggcctcggtgccgggagcggagatttgcgcagcgcagcaattgggtgtgcgctgtatccgggctgccggccttccgggacaactggtgccggcaacagcagcggaggccatccgggaagcagtctatcagatgatactggaggaacgaggtgaccctgtgtgagaaaggagcgggttggattcgcattgtgcggatccttttgtacccatgaaaaagtgctgcggtctttggaggaactggcgaaacagtatgagacggtaattcccattgcttcggagaacgcggcatttaccgatacgcggtttggtacatctgcggacctgcggcggcggctgcgggagattacgggccatgaggtgctgtgtgatctgccttctgtagaacccattggccccaagggcctgctggatgtgctggtcattgcacctgctaccggcaataccattgcaaagttggctgcgggtattacggataccgtggtaacgatggcggcaaaatctcatctgcggaatggccggccagtcgtcattgcgatggcaagcaacgacggtttgtctgcgggggcccgcaatattggggaactgctggtgcgcaaacactattactttgttccctttggacaggatagtgcgattttaaagcccaactccctgattgccgattttgataagattccggataccgtagatgctgcccttagaggtgaacagctgcagccgattttgctcaagagctgagagaatacgatttttcagataatttgaatagcagagtccctggtaccggcaaagattgtttggtgccggggactcgttcgatataattatatagtattgaatgcggagagctgagttttggggagtaggaccaatataaatgatagaggagaagagaaaaggaacggttccttggcagttggtataatgggaaaacaatgcaaagtgcaaaagaattcataagtacagcgaataacaaatagaagtaaaataagtgtaaagcttggacaaaccgggagaaaacgggaaatctcaaaaaaaatagataaagtgggaaaaaagggttgacatttcaagaaacctctgatatcctatcaacactgtccgcgagatacgcggcgcggccgacagaaacttgaagaaattcaaaaaagctgttgacaagcgcaagacagtgtgttacaatctaaaagttgccgctaa

SEQ ID NO: 2077 - DNA, 7093 bp, Unknown
  16S sequences of unknown bacteria
aaaaattatacattcaaccatcaactaaataaccaaaatattctccaagttttaccttgatttaatggggtgcactacagcaaggtaaacgatatatccgggaaggggtttataaagcgcatgtggacctttggagcccgcaatatatgcgatggggacgagaataccattatctggcacctgcccggcgagaaaaaatacggattgccgcgtctgttctcatggctgaagaatagggattttatatgcgggaagaataattttgtaaaggcggcatcgtcatattgcatgattcctaagaaaaactttggcgctttggcaatgcgttattttgccgccctcttttataaagcccgcaaggtattcggaaaatcctgatgtactcctaactcaggttttcttcgtagatatcaatgtatttgttccaggcaattttcccggaaaagttattttcggcgattccccggagcctgcccgccgtttcggctgattcttctgaggacaatctttttatgctttgaaccatagcttcaacatctccgcgcggcacggcgattcccgccccgtcgggaatggtctcagacgccccgccggaattaaatgtcactaccggggttccgcatgcgatagattccaagtttactgtgggatagttgtcctcgaaagtcgggttcgcaaacacggaaacggcggtgtataaggaggctaaatcagccggactttccgttcttgagacgcctattatgccatattttgacaaatattctttttgtctgcggtttactcccactacaacgcaaatgtatttctcgcccaatagataggcaatcctgcttatcagattgaatccttttcgttcctcccaaatgcttgatacaaacaatattatttttttgtttggtatggaatatttttcaagaaatccttttatatatgtcggtttaaaggtatccaaatctatgccgttgtgtatgacttccgatggaatgtctttcagggcggattctttcagcaaaccgtttaaccagtgcgagactggaactaatgtgaggtttggaattgaatttataagttcttgcttaagcttgtggttgcgtcgggaagagtcgcaaatgaagcttgcgggatacctcttcttttgcggacaatttccgcatagcgttttccatttccggcatccggagctctcaaaataacagcaatgcccggtgagaacccagcaatcgtgaagtgtccatattacgggacgtccgtacgatgagagaaatcttaggagctcgggattgtttagatagtatccgtgcgtgttgtgaaggtgtataatatcgggggatatttttatgatagcctcggaaagctcttttacggctatttttgatattggcgagtctgtatcgaaaatccgctgccacaatccgttgaaggctatctggaccggagacgataactttattatttccgacgcgctcggccttaatttgcgggcgcatgctatatagctcttccagcctctggcgcttgcggcaattcctatctgttcggcgattctccccgtagagccgtagtttccaaccgtattgatttgtattaccttcatctggaaatttgctaaaagcctcttttgcattaaaacaagcctttaagagtcgtagtgcaatactttttttggagggggcggattctcagaattatcactaaatgtttgacataaaaggccgtcggcaaattatggaagtttattttacgcggcaatttttcagaatcaaaatgagcgatattcctaaagcttacgaaccttccactgtggaggacaaatggtataagacctggttggaatcaggatgctttaaagcgcgtcccgacgccgacccaaagaacgcatattctatagtcattccgcctccgaatgtcacaggtgttttgacgatgggacacgtcctgaacaatacgatacaggatattctcattcggcgcgcccgccagatgggtaaaaacgccgtatggattccgggtacggaccatgccggagtagccacgcagtcaaaagtcgacgcggccttgcgcaaggagggaacttccgcccgcgaactcggcagggacaaatttatcgaaagagcaaaggcatggcgcgacaaacatggcggcataattatagaacagctcaaaaagcttggagcctcgtgcgattgggacaggcttgtccataccctcgacgacagctattcaaaagccgtcctgaccgcttttgtgaaactttttaaagaaggctatatttatcgcggtaaacgcatggtgaattggtgcccggtaaatctgactgcgctctccgatgaagaggttataatgaagcctcagaagagcaagctgtataaaatgcggtacgagcttgccgataagcgcggaacatttctcgagatatcgaccacccgccccgaaactattatgggagatacggccgtagccgtgaatcctaatgacccgcgctatgcggatctcataggaagttttgcgctgcgtccatttcctcaagccagaataccgataataggcgacgagtatgtggacatgaagtttgggactggagttctgaaagtcacccctgcccacgacccagcagactttgaaataggcctgagacacaatctgccggtaatagacgtgatgaatcccgacggcacaatgaacgaactcgccgggccggaattttgcggaaaggatcgttttgtcgcgcgcgaattggctgtaaagaaactcgatgaaatggggcagctcgtgtccgtggaagattacgagaacaacgttggattttcagagaggggcggtgtgcccatagaaccgcgcctttccgaccagtggtttatgcgctatccgaaaatcgccgaggccaagcagtcagtggaatcgggagccataaaattttggccgcagcgttgggaaaaaacctatgtgcattggctcgacaatatacgcgattggtgcataagccgtcagatatggtgggggcatcgcattccggtatggtatcgcaagggtgtggagaatcccgatataaataatccggaagaggtctatgtaggagttgacgccccttccgatccggagaattggattcaggacgaagattctctcgacacttgggcaagttcgtggctctggccgtttgccactcagggttggccggataaggctgaaatggataggctgcagatgtcggcgttctatccgacgtcggatttggtcaccgggcctgatataatattcttctgggtcgcccgaatgataatggcaggccttgaattcctgccaggcgatatggcggatagaataccgttcaaaaacgtttattttacgggcataattagggatatgcaggggagaaaaatgtctaagagtctcggcaattctcctgatccccttgaaattatagcaaaatatggggctgacggccttcgcttcggggtcatgaactgtgccccgcaagggcaggatatcctgtttgacgagagccgcgtggaacttggccgcaacttctgcaacaaactttggaatgcttgcagattccgccaaatgaacggaggattgggcgacaattcctctgccgaaaaaataataggcaggattgactcatcaaagctcgatcccgacgaccacgcgatattgtcgagcctatctaaatgcgccgcaaaagtggattcggattacgcctcttatcagttcaactcaataacccagggagtgtattcgttcttctggaacgatttctgcggttggtatcttgaagtgtcgaaggcaaggctgtcagatgcttcccaaaaggaaacggttctggcggttcaggatttgtgcataaggcagattctgcttctcctgcatccgtttactccttttattacagaggaattgtggcacctaatgggatacggccgagatggagaatttatacagaatgtaaatccgtcctttgttgaaactcttaaagattgcggattgtcggtggacgaattcgccgcggcgcagataaacgccctcaaagatttcgttgtgaaggcccgttccctaaaggcgcagtgcggaaaggcgaattcgaaagattccaaattttctcttgttcccgccaatcccgcgtcaaaaatgttgtttgaaacatctttcgacaaactgaagaaacttgtgagagccgagtgccttgaaaccgtggatgcgcctttggacgctcccgtggccctctccgaactcggagcggtatatctggacataatcaagacggattccggagcggagatagcccgcttggaaaaagagcgcgaaaaactctctacggcgatagaatcggcaaagtcgagattggcaaacgcggactttgtgtccaaggctccacagaaagtcatcgacggcgcaaagcgccagctcgacgattgccaagccaagctcgacgaggtgttaaaactattgcgcacctttggaaaataagggtaattttttattggtggaaaatgtcggacgggcgaaaactaaagctgttattgctacaaaatacgataaagccgtatagggttccaatattcaacggcttagccgaacgttgcgaacttacggtggcttattcaagcgacaaatcggaagtcgaaaaattggaaggggtaaatttcaaaattctatatatcccggaatggagctttttcggaaaattttcgattcagaaacggaatatgttttcgcttgcgcgcgattttgacgcagtgttgtcgatgggcaatatagcatatttatcgtttatggcgctgggggcaaatccgtttcgcaaatatgggtttacaatatggtctctcggcgtctccgcctcttacacaaaaaaatacgacgtccagaagaattgggattttctccgcaaaaccatattcaatatggccgacagcattgtgttttatacggactatcccaaacttaagtacgaaaagatgggcatagaccccgcaaaaatgttcgttgccaacaatactgtcgccgtagccgattctgtcccgagcgatttggagaaagattccattctttttatcggctcactgtatcctcagaaaggtcttggaaccttgttaaatgtctataagagggtaggcgcatataagaaacttccgaggctggatataataggcgcgggaagcgaattcgcaaatgtagaaaaatggatacgggaaaataaactgtcggataagatttttcttcgaggggccgtctatgatattgacaaaaaagcggaatattttgctcgggcgatagcatgtgtgtcgccgtgccaggctgggctcgccgttcaagaatccatgggatacggcgtatgctttgccacaaattcagactcgtttaccggcggagaacgcttcgatatcgtgcacgggcaaactggtatattgttttctgagaattatggaatcggagatttcctcgccgaattggcggatcgcccagaaagattcataaatattggaaagtccgcaaaaaatttctatgaccgcttcagaaaaccgtcaaatatggttgacgggctctggaaagccgttgaatacgcctataacaagcgcgtcattggagctgaatcaaaataatcagaggattcgcgtcgaaaactcacttctgaatcttagtttttttgacgcttatgttattgggcggttcccctgcggcaaaaggataatagtatgccggttgccaatgttaatgccgtcgtgcatgctatccctattatagctgcggatagcccggagagaatctctgaggaaatcgccgtcacagagtagtcggcaaacggagcgccagtaaagttgggagcgtctggaagtagcgaaaaattcttcattgtccactcaaaagcgtccggaaatgccgatgcaagcggcgaaagcaccaaggctgtaataactatgccaccaagcgcataaattgtacgcttagaacgggcggactctttctcgtctgcttgtacaaggcttaaaagcattatagtagccgttgcttcaatgattccaagaacgccatgtattccaagcagagtgccgaatacttcagcattgcccttttcggaggaatatagttctatacatagggaaaatgctgccaattctactgaaacaaatgcggctattgctatggaagccttcgctcctatcccatttttggcaagtatatttcttgcgaggcctcctatgccagttccgataagagccatgttcacaatgtttgctcccaacattagaattccgccatctgcaaatagtagtgtctgaagtagcaatactatagacattgataacaccgcggcaggaacacccaatattgcagctgcaaatatcccgcctataaggtgccctgaaattccgtcccatataggatagtttaacatttgcacagcgaataccgcagcgcttgtaagggagaattttaatggtgaaggtatctctcgtgctccacttgacaacatatatattgatgccccaattcctacggcagctattgtggcggttaaagggcaaaccgttcctgagagcatctctgagggtatgtgcatataattatttctcctgtttttgaatttattcgtccaaactttattccaagtctttggtcgtgtgcatgaaaatcaagaaaatagttaaaaaaatctaacttatgtacgaagcgtgcgcgtgccccttgacggcgagccagtttatgtgagaaaatagccgacataaaatcacataaaggaacgaaatgaaatcaagattcagcgtagagcagataataaagatactaagggaatacgagttatccggaagtaagacggaagttctgcagaagtacaacatcagccagcaaacattttatcgttggagatgcaagtaccaaggaatggacgtacaagaagccttaaggctcaaagcccttgaaaaggaaaacacggagctaaagaagatgattgccgaactgagcttgcaggttcgggcattggatatagcggcaagaaaaaacttctaagcccagagcggcaattgacggttgcaaaagaggtaatcgccaagttgtcgtgttctgggcgtaaggtatgtaaagcattgaa

SEQ ID NO: 2078 - DNA, 3576 bp, Unknown
  16S sequences of unknown bacteria
gcgatgctcgcgatcgggctattatgcgtgtataagccgataaagacgcgcgcggaaacgacgacggcggtcatcgatttgggcggtgtattatcgggcacgcaagaaatgtcgcttttagaattttatagcgagagcagttttgaactcggtgacacgttgttttataacggcgaacgcgcggaaataacggaactcccgagcgaagcggaaggaacggactattatacgttaaggtgtgagacgggcggtaaattttatcaaagccaaagaaaaatcattacggtaatagtcaatccggtgtcggaagagctgttctttaatacgggcgcatcggcgtcattggatgcgacggatttgtatcgcttgcgatttgcgctgtatgtctcggaaagcgcggtgcagtcgaacagtctgttgacggtaagctttgtatcgggaacggacgcggggtgtaaattaggcttcgagagcgatgaaatcaaagaaaggcaagcgacgcttgatttgagccgatatatatttacaagcggctatacgacggtgtatatctacgtaacgggttcgttacacgcggaaatgcagctgttggcgacggtaggcggcgcggcggcgacgagcgatgcgaggagtatatactacgtctggcagaaagccgtggaaaataacttcggcggaatggtggtcgaagattcggtaaaaaactatatcacgctgacagtgggattttcgtcggaaaataacacctttgaaatcagccaagcggcgcagctgtcgcagagcagcggtctgtcgttgatggtgaaagtgccggagtcgtatctgacgcagttgaaacagggaaagcgggaaacctcgaaagaaacgctctattcgtcgatatcgggggttccgatcggaacgaggtacacctatgaagatcattttttgtatatttgccggactacggatttaagcgattacggaaacgcgggaatgaagctgacgtggggatatatgtatcacgtatcgccgggggaatgcatagagccatacacgaacgaagcggaggcgttgagcgaagaatttttaagccgcgggatggatgtgttttcgttggggctgccgacgaatgcggagcaggagtattattattttgcgacgatcctgaaagtaacgcgaacggacgcggtgtatgttacgggcaaacaggatcaggaatcgttttcaacaagcatagaatcgttttcgcggaattattatcagacgtcgctgaaaagcctggcgctggaagtcttggaacgcgacgcgagcatgacggacggagagcgagcgtggatgcaggacgtggcgggagtgaaaccggacacgaacgagatcacggtgacgctgaaatacaaagccctgacggactatgcgacgttgacggaaaagagccatgcgtttaaggtaaaaagcgtctgggcgcaaaataaggcgctggtgctctccgcgttgtacgatctgacggaatttaacaatatcgccaagctgaatgcggtttatacgggcgattattggcgagacggataccgatatacgacgcagaagcggatcatcttgcaggcggaagattttgagtacagctataatgcagtatcgcagactgggacgctgacggtaatatatgcggattttcagtataaggatctgtccttgcgggtgacgaacaacgacccggcgaacaatctgacgatagactattacacggcggacgtggtagcgggcgcgatgagcacgacgctgacattcagatttgcggacatcgaggagcagctgcacaattcctgcaattggctgttcgatttcggaaaggagaatattcgtatcacgggcatgccggagggcgtgacgacgcagctgacggaggaggcgctgatcgtgaccttcccgaacgccaaagaaaacgagcttgtcaatttatcgctgatcggcgttgcggaaattatcgaggacgtggaatacacgctgacgtatgagtatgcggagctgacgctgaacggaacggagatctcggaaacgtggaaaacgtctgcgccgattgtgaaactgtatagtgagatcgtgacttgcaatttcacgaatttcatgacagactacggggaaatcgtaaacgaagcaataaatcccgcctttctgggcggagcggagtattatattccggtatcgatacgcaaggaatacagcacgtatgattcggaaacgcatacgtgtaaaatcacggtggaatatacgtataatacgcttttcgggattacgaataactacgacgacgaaattatattcaaagcgctcaatcatagcagcttaaactacacgggcggggatttcgtgggtaagatcccttcggggtatcgagtgaaaggaatttccacctccaaacccgataagctgacggtgacgaatgcggaggattaccgaaacgcaaaaatagaggtgcggacgagtacgacggaaaaagaggtgctgccggtcgcgatagagttcacggacagctggaatctgaaaatcaagtaccttgaaaactataaggactatcggatccgtacgggcgagaaagacgcgaaaccgtgcttcgcggaaaagaaggtattttcggggaccgtcaaagtcaaagattatgaagatatctacgcattgacgaatgaagatatccaatcaattttagggcttaaaagtctggatattttaggtctggcgacggtggaaaagataacggtgaaattcgacgggatttccacctatacggcagagctttcgtattcgcacgcggcgctgaaacaaatcgactacgacgggaatatgctggaaatcaaaatcccgctgacctcttattcggattggtgtaagcaatacgggcaggattggtctattttgtttttgaatactccgaagagacactatttcaaatattcgaacgacgtgacgagagaaaatctgtacggctttttctcggtagcggtattcaaggagcaggtgtctgatcttaattattggttcaagaacaacacgggcgacggctgcatgacgattttcgagggtaagcaagtaagcgggtcgggggtgtataaatttttcaataacctgacgacgaaaggcgtgattacgtctgtgctggggtatgtgggaatgtcgttctgcgagatcgtgaacgacgacaacgcgatgtattacagttatttcttttacttggacggaacaagcgataacgcatacctggcgacgaacggagcggacgacgcgggagacacggacagcgcgatcaagaacgcattaaacgacgcgaaggaatggatcaagaaaacgtgggataagctgaacgggtcgaatgccatgaagtggttgaagatcctgggaggcgcggcgttgggaattttagcggtgacggcgcttatagcgggcgtatataaaattttgacagtatcgggaatcataaagccgaagcgaaagacggcaacggcgaagaaaacgaaaccggctaagaaaaagaaatcgagcacgaaggcgaaaaaatgagcgaggagaagaacgcgaaaaagcccgccgcaagtaaagcgg

SEQ ID NO: 2079 - DNA, 13320 bp, Unknown
  16S sequences of unknown bacteria
cggaggatgggcacattattctgaacggggaagacgataagctttctgcgattcaggaagtaaaagggatccgcccggtattctttggctttgaaaaagaggatggcatctgggcagatcatgtgcaggcacaggggctgaacgggatttcctgccgaatccacacaccgcagggcagctttgaggtaaagataccgattccggggcttcatatggtattaaatgcgctggccggtaccgcagtcggcctgcagtatggcctgacactgagacagattcaggacggaatcgagagcctgcagccggtagcgggacggtttcatatcgttcagacagatgattatacgatcattgatgactgctacaatgccaatccggtttcgatgaagtcctctcttttggtgctggccgacgcactcggacggaaggtcgcaattctcggagatatgggagagcttggcgctaaggaacaggagctgcaccgggaagtcggaagctacgcagcatcgctggacattgaccgttttcttgtggtaggaccgttggcgaaaaacatcgcggatggaattttagcggagtatccaaatgcggatgttgtttgctatgacagcctgcaggaaattctgcacgatctggatgggcagcttcagaagggtgatacaatcctcgtcaaggcgtctcattttatgcattttgaaaagctcgtagagcaactgaccgggaagtaggcaacagagccgggagcagcatccacccatgcggtatccgggtggtgaataacgaagtaaaaaagaagaaacgcagtggataagccaggtcattcggatctggctcgctgcatgataaggagaagaagatgtacatcattgcaggacttggaaatccgggccgcgaatatgaaaatacaaggcacaatgcaggatttgcctcgctggatgccctggcaaagcggcacgggatcgagctgactacacggaaatttcaggcactgacgggcagcggttacatcgatgggcagaaggtactgcttgtcaagccgcagacctatatgaacttaagcggcgagagcctgcgcgcggcctgcgactttttcaaagtagatccggaggaggggctgatcgtcatttatgatgacatcagtctggcgccggggcagctgcgcgtacgtaaaaaaggcagcgcgggcgggcacaacggaatcaaaaatatcattgcacagcttggcactcagaattttctgcgggtcaaggtaggagtcggggaaaagccggcaggctgggatctggcggattatgtgctggggcatttttcaaaggaggagcaggtgctcatggaggaggcctttttacgggcagctgatgcagcatctgcgcttctcacagaagatgtggagcgcgtgatgaaccagtataatacgcacaagtaagacaggcaagtttttctggtgggagctttggttgccggattaagaagggaagggacagattataaatggaaaggcaggggattatgaaagcattgacggcacccatgcaagagcttggggagtttgaagagattttacgaaagatccgtaccaaccgcggcgtgcttcaggtgagcggctgtattgatccgcagaaaccgcattttatttcctgcgcggcagaggggtatgactgtcggctcatcatcacgtacagtgatctgcgtgcgcgtgagctgtacgaaaactatcggttctttgaccgggatgtcctctattttccggcaaaggatctgattttctttcaggcagatatccacagcaatctgctcgaacagcagcgaattgcggtcttaaaagcgctcgcagagcgaaaaaatgtgacggtcatcacgacgatggctgcgtgtatgaaccatctgatgccgtcagaaatctggcagaagcaggtgctgacgttcgcaccgggcgatgtgctcgacatggaagcgatgaaaagcacactggtacagcttggctatgaacggacggcacaggccgaaggcccgggacagtttgcaatccgtggcggtattctggatgtatatccgctgaccgaggagaatccggtccggatcgagctgtggggcgatgagatcgattcgattcgcagctttgatgccgagagtcagcggtcgatcgagaacctggaggagatccggatctatccggcggcggagcttatcccggatgaacggcagcggacggcggcgctggaacggatcgagaaggatgcggcgcgagcgatcaatcagtttcaaaaagaaggacagacggaggcggcagcggcggtgcggcagctgctttccgatgcaaaagatgcgcttttagagctggcggagccgctctcaatggaagggtttattgactattttacgccgcgcacagagtcgtttccggactattttgatccaaagcgaaccctgattttcctggatgagccgaaccggctcttagagagtgcagatgcagtcgagctggaatttcgcgagagcatggaacatcggctggaaaagggctatgtgctgaacgggcagaccggtattctgttttccggacaggagatcgcggcacgcatttccagagaaaatgcgatcggtctttgtaccctggaaaatgcgaaagcaccgtttaccgtatctggcaccttcaatctgacggttcgctcggtcagtccgtataataacagctttgagctgcttgtaaaggatctgcagcgctggaagaaggatggctatcggatcgtgctgctttcggcatcccgtaccagaggaaaccggctggcgcaggatcttgcggaggatgggctgaacagcttttataccgaggatgccgaccgtgaggtgcttccgggtgagatactgatcacgcatggaaatgcacagaaaggatatgagtatccgctgatccgctttgtcgttatcgcggagagtgatattttcggacaggagcataagaaaaagaagaagcgcagacgctatgagggaaagcagattgcgagctttacggagctttccgtcggtgactttgtcgtgcatgagaatcacggtctcggtgtctatcggggcatcgaaaaagtcgaggtcgaccatgtgacgaaggattatatgaagatcgagtatgccgggggcagcagcctttatgtgccggcgacgcagctcgatgtgatccagaaatatgcggacggcgatgcggcgaaggcgccgaagctgaacaagctcggtacgcaggagtggaaccggacgaagacgcgggtacgcacggcagtgcggcagatcgcgcaggatctcgtgaagctgtatgcggagcgggagcgaaaagaaggattcacctacagcgaagatactgtctggcagcaggaatttgaggaaatgttcccgtatgatgagacggaggatcagctgatggcgatcgacgcggtcaaacacgacatgcagagccggaagatcatggaccggctgatctgcggtgacgtcggatatggcaagacggagatcgcgatccgggcggcttttaaggcggtacaggacggcaagcaggtggcgtatcttgtgccgaccacgattctggcgcagcagcattataatacatttgtgcagcggatgaaggattttccggtacgcgtggatctgatgtgccggttccgcacatcggcggagcagaaaaagaccgtcacggatctgaaaaagggaatggtggatatcgtcatcgggacacaccggctgctttcaaaggatgtcgagtataaagacctcggacttttgattatcgatgaggagcagcggttcggtgtcgcacacaaagaaaagatcaagcagctcaagacggacatcgacgtgctcacactgacagcgacaccgatcccgcggacgcttcatatgagcctggtcggaatccgtgacatgagcgtgctcgaagaagcgccccaggagcgcgtgccgatccagacctatgtcatggaatacaatgaggagatggtgcgcgaggcgatcagccgggaactggcgcggggcggacaggtctactacgtctacaaccgggtcaattcgatcgttgagatcacgaatcggatcgcagcgctcgtcccgcaggcacaggtcgcgtttgcacacggacagatgaaagagcatgagttggaaaagattatgtttgactttatcaacggcgatattgacgtgcttgtcacaacgacgatcatagagaccggtctggatatctccaatgcgaatacgatgatcattcatgatgccgacaatatgggattatcccagctctatcagctgcgcggtcgtgtcggacggtcgaaccggacggcatatgcctttttgatgtaccgaagaaataagatgctcaaagagatcgcagagaagcgtctggcggcgatccgggaatttacggagcttggcagtggctttaaaattgcgatgcgggatctggagctgcgcggtgcgggcaatttgctcggaagcgaacagcatggacatatggaggctgtcggctatgatctttactgtaagctgctcaacgaatcagtaaaagaggtgcaggggatctcgacggtcaaggaggattacaatacagagattgatctggatattgacgcatttattccggaacggtacatccgcaacgagatgcagaagctcgatatttacaagcggatttcaggaatccagaacgaagaggagtacgatgatatgctcgaggagctgatggatcgtttcggagaactgccaaaggctgtgcagaatctcctgctcgtctcccggctgcgtgcacaggcgcatgacctttatctgacggaggtgacgcagaagggtgaggagatccggatggtactgtatgagaaggcacagatcaacacggcgggcatcgacggtctgttgaagcagtatcgcggacggctgaaatttaccattgataagaatccgtatttcctttatatccgtcagaaaaaaggtaaccgggaagttgacaacgtgctcgatacggttcgggatttgcttgcggatatggagcggctgctggcatgatggctgctttccatttttacacagaggaaatccctgtggttttgcagcggaggctttgattttggtaaaaatgcaggtgaaaagtttgtgaaaaccggaaaaagcgttgcgggatttcgtaaatcagtttataatgaaacaatggatctgcgggacatggagaaagcagaagtgccgtagaaatttgctgttcgcttttggaaaaggagataccaatgaaacagatgtccggcggcagcagtatcaggaggatgggtatgaagaacagattaaaaaaaatagcggtcatcggattgagcgcctgccttgcacttggcatgctttccggctgctccaagaaagagacgtttcaggcagatgcggctgcgattactgtaaacggggatgagatctcggcaggacttgtgaagttcgcgacacattactcacaggcgttgatggagagcatgtataagatgtatatgggtgtcgaggatccgatggattctgacatttatggaaatgggtcgacgcttggatctatgatcaaggacgatgtcgtttccacactggagcgtcttgtgctggcagagcagaagatgagcgattacaatgtggagctgacggatgacgagaaggcagccgtgacagaggcagcgaccagatttatggatgagaacggggaagaagtgctgaaccagatgggagcgactcaggaggtcgtggagcgttatctgaccctgcgtctaattcagtcaaagatggagccgcagatgtccgcagatgtagataccgaggtatcggacgatgaggcggcacagcgcaagatccgctacaccttgttccgtgcggagaccgaggcagagacagagtccgagaccggtacggaggcagagagcagcagtgaagagacgaccgaagcggtctctgaggcaggtaccgagggcgagacatcggtagagaccgaagcagagacggcagcgatgaccgaagagcagaccgtaaagacgaagtcttccgcagagacggaagctgtatcggaagcagcaagcgaggcggctgagacagagaccggaagcgaagcagcgaccgaggcatccgagacggaaacggaaacagagacggagaccgaagatccggctatggtggcagcgaaggcagaagcgctggcaaaggcagaggatctgatcgcaaaggtaaaagacggcgaagattttgagaccgcttccgcagaagtcgacgagaatgcgacctgttcgaccctgactttcggaagtgacagcacgagcgtcgtagaaggactgatcaccgcgacggaggggctggatgacggcacgttagtcgagacaccgatcgagatcgacagcggttactatgtggcacaggtcatctcaaagcttgaccgcgaggcgactgacaagcagaaagagacgatcgttgagcagcgcaagtctgaccggatcagtgagctctataccgagtggaaggatgcggcagagatcacagaggacagcgatattctggcgcagatcacctttgacttttctctgacacaggagaccgaggcatccaccgaagcgacgacagaagcagcgaccgaggcggggagcgaatctgcaacggaagcagcgactgaggcggtaagcaaagcaacgaccgaggccggatcggaagtgaccacagaggcagcaacggaagcggctgagacggaaagcgagtctgaatcagagaccgcagataaaacagagagtgagtctgagaccgcggcggcgaagtagctgcgattccctcagcagtgaaactcttgccgtttcgctgcgcaggaaaatgagtcacgaaaagtaagcagatagaaagaaacagaaaagaatctggcagcccccggcggtgagtaatcacatggcctggggctgtttttttctcagattgcagaaccggataaaatgcagtaagctacagagaactggtaagagatatgataaaagttagagggagagattatgcaggagaataaagtcacagacattgcaccggaagatctggatcgtcttggactcctgatcgagcagggacagtttgagctgctgcttccaaaggtatgggaggatgcggatgtgcggcgggaggtgccgtctgacgtgcgcctggtttatctgatgaacgatgcggtggagagttttctggtttttcaaaatgcacggatgtgcggaacttatcaggagaaatttgacggagagctctcagcggcgctggcgactgaggaagatggctatgtgctggcggttcatcaggggatgaatgcatttaccttattttttaccggaatggtattggaagcgcacctgtttgattacggtcatactgggcatttctgggtgaaaggatatgagtatctgcggcagctggagtatcggctggcgattctgcatgataagctggaatatctcggcgaggaattttgcagcaaagaagaacgtcagcttgcgtcgctggcagagtttccgccgctgaattactgttgctatccggcagttccaaagaaatatcgaaccgtcacagagccggactggaatccatccgaggcggcattacaggtgatgtgcgagcttgcaaaggaggccggagatgtatcacttctgcgggcattggaaaggtatcgcaggaagcccgggcgataccgtgcaaagcagcttgggagactgatgcatcgcacgcggcatgcagcagtcgtggatttgctgacagagcagcttacggaggccgcaggaatttataaaaaacggagtttccaggacaaggagcaggaggagatgcagcggctgtaccgactggcagaagcacgcgccaaggagctgcgtgttcgtggcctgcgctgtgagatcgtggaagaggagccatttgtctatgcgcgggattcgattgcgtataaagtatatgtcatggtatggcagaggcgtggatggaaccgggttgtgcgggtagaggagataaaaaaatgagagcaggactagaaaacctgcaggcagaatcggaacatcgatctgtctgcaggtttttactgtcagttgcgtcgccgctcatagtctttcagggatttgattgcttcattggacattgggagaagggcgatcaggttgaagatcgtcatcaaaccgacaccgacgtccccgagatcccagacgaaggtgtaggcggcgagtcctccgataaacagcatgacaagtgccagcagtttataggcagtctgtgcgctccagcggtcaccgaacagataggccacattggaccgggcataaaacaggatgccgatgaaggtggaaaaactgaacatccacaagatcagggcgatgaagatgacaccgatctgaccaaaatagctgtacatagccgtctgaagcagatccattccctgcagaccgtcgacgagctcttgcggggcaagcagcatgaccattgcggtgcaggtacaaagcagtgtatcgatgaagacgccgaatgcctgcgtcagaccgacacgggccggatgaggcgtctcggcggtcgctgcagcgcatggtgcagagccactgccggcttcattggagaagagaccgcgcttgacaccgttcatgaggacagcgccaaagccgcctgcggctacctgacgaagaccaaaagcctctgaaaagatacgtcgaaagacatcaccaagctgataggcgtgcgtaacaatgagccagagtgtgatcagcacatagatgccggacatgattggcacgaggatatccagtacctttaccgtcgcatttttccgtagcacgatcacggcagcaagcagcacgagtgcagtcgtggatacaagcggcgaaatatggaaggcatttttcagagaagatgacacagagttgccgatgacctggctgacaccgcaccagcagatcagaccggaaatggcaaataaaatcgcaagcaggcttttgcgggcctttcctttgcgccctgcgttgatccagtcatgaatgtagtaagcagggccgccgcggtatccgccgtagagtggatcctcctgcttgtgaagctgggcgagtgtggattctacaaaagaggttgcagagccgatcagagccgttatccacatccagaaaacagcgcctgcgccacctgctgagattgcggccacgacaccgacgagattgcccataccgacccgtgtggcagtggagacgatcagagcctggagagcagaaagctcttcagattttcggtcctgctcagaatcttccggtttcgcagatccggtgataaggcgtaccatatcagggagcagccgaagctgcagaccgcgggtacgcaccgtgaagtaaataccggcaggaatgagcagcagcaccagaagtggcaggctgagtgttccgccgggaagtggaaggcgaatccagtcgccccagagaaaatagtatacctgttcaatacaatggatgataaaagtcataagtccccctgtttttaggcagcgcttttgcggctgcgcaatatacgtaccagtatataataaaaaatgctttttgtaaaataaatacttgcgcttttgccacataaaaaaacgattcagaaaattgctgtacagagcaaaagaagagtggtaaaatacggaagatgtgaatcagaggatttgccagatcggacagaaaaagagggacagaagatgaaaaatccattgcgataccaattgacggagtatgattgcggaccggcgagcatgctcaatgcgatcagctatcttttcgagcgaaaagacataccaccggaggtgatccggaatattatgctgtattgtctggattgtcacagcaaggaaggtgttccgggaaaacgggggacctcaagggctgcaatggcatttttatgtaactggctgaatgaatacggagagctgggcttgctgccgatatccggcgagcacatcatcggaaatggtgtctgtatcggcacagaaagccggattaactatgccctctgccacggcggagtagctgtcgtacggctgtatttagatgagccgcattacgtactcatgaccgggacagagggagccgcaattcggatgtttgatccatactggctggatcatttgcctaaggaagatattcagatcaccgaggatcatccaagagaatacaatcgtatcgtaccggtgaaatatttcaacagtgaatccacggatgtctatgcacttggaccgaaagaagaacgggaagccgtgattctatacaaccgtcggacgaagaccgagccggaagaagtgatcgagtacttcatatagtgacccgcaaaacacctttcgcccccaacatcatgagattaaataaaaagctttcgcatacactgtaaaaacagcgtctccggaggcttttttgtgaaggaatatatcgaagagcgcgcaacggaaatcgcgtattacattatcgagacgggagcgactgtgcgtcagacggcacagaaattcaaggtgagcaaatcaacggtacacaaggatctgcgagaacgtctgacacagatcaatccggctctggcagcggaggccggaaaggtgctggcggtcaataaggcggaacgtcatattcgcggtggactggctacgagagaaaagtatcttcaccggaaagagataaaatacctttagcagaaccgccgtcttaggtggtcaatacgggaaggagtttggaatatgtcagagaggaaaatgaaaagagttgcagattcgatgacagagcagtctcatttgctcatgccaaagtgtctgaatgcagcaggctatctgttcggcgggcagctgcttgcatggattgatgagacggccggaatcgttgcaaagcgtcatgcggagatgaacgttgtgacagttgccgttgataatatgtactttaagacgggagcgagggtggacgatacgattgtactgatcggacgtctgacgcacgtggggcgttcttcgatggaggtacgcattgatacgtatgccgagtctttaagcggtgtgcggacaatgatcaatcgcgcatattttgtcatggtcggcacggacgatcatcagcatccacaggaagtgccgggactgatcgtggaaggcgtgacgcagcagatcgaatgggaggccggacagaagcgtgccgagcttcgaaaagtacgaagacaggaaggattttaaaaaagaggaatgaaaagtcaggaatatcagaaactgcagcatgaatttgcgccggtctacgatacaaacagcaaaatattgattctcggaagctttccatcggtgaaatcaagagaacagcagtttttctatggacatccgcagaaccgtttctggaaagtgatcgcggcattgacgaaccggccgctgccgcagacgatcgaagagaaaaaaaggctgcttcttgagaaccggatcgctgtatgggatgtgattgcagaatgcgagatcgttggatccagtgacagcagcatccgaaacgccgtgccgaatgatctgcatcaaattctggatgcggcgcagattcagcatatttatacgaacggtggaacagcaaaacgtctgtatgagaaatttcagaaggatctggcagtcccaatgacaggactgccatctacaagtcctgcaaatgcagcgtttacgatggatcggctgctggagaaatggaaagtgataagtccatacttccactgcgaaagccctcgagatccaaagtgacataaaggaagccaagacgcttcagtttggatacgattatctcactctttgcgagcagagccggaaaagaagcgcggtcgatttcgatccggagaacaggttcatggtagcgcagacggacattgtagaatcccatctgccggatggcttcttctcctttatggatgtttgccagaagcttccgatccagaaaagcaccgtaaggaagtcgtgtggcaagacatggtgcggacggcgcggaggcagtcggaagcgagagtgcggcagacagttcccggatgcgttgctttgtgaagccaagctcccgaagcgggctgtgaatgccgagctcttttaaaacgagcatgccgggacgatattgcttttcatcgtctttattcgtgccgtcacagactgccatacgtccgttggcatgcgccagctgctgcagctgggtgaagagcagatgcttgcaaaggtagcagcggttgaccggattttgcagaatctgtggatcctgaaattcgtctacgtggatgacagtacattccgccttgagcttttttgccattgcgacagcggtctcgatctcagagtgcgggtgcagttctgtctcgaggatgacagcaagcaccggacgggaggaagcttcgcaggctaccttcagaagcagagtactgtctacaccaccggagtatgcgatagcgattccgtcagtgtccagtgcctggaaatattctctcagacgtgtatagtcctgtgcgagttcgggtaaaagtgtgtgtggcattttataaatgatcctttcaataaaaaatatttctttgctgcttatggatggatcacacatgcggattttcacgggcgtaagcctggatcatattgtacatttccgtgaaacctgttccattttgttttgccagacggctgacactgtcattttccggataataataggtatcgtttccgtacgtgcagcatttgacatcggccatgccccatggagtttccagtgcgaaaattttccgtggaagtttggtacgctgcatttcctgaatacggatgccgatggtagtcgtattgcggaaaatgattgactccatttccgcgcgctgttccggattgcacagcaccttgagcagacaggccggccggttttttttcatgtagatcgggatgcagaaagcatcgagtgcaccggcgtcgagcagcagctgcattgtataggagagcgcttctccgctgcagtcgtcgacattcgtctcaagagacaggatcgtatcatgggtgtcttttgaaagtggttgaagtagcatggcgcgcagcagtccggtcgcagcataatcccgctttcctgcaccaaatcctatgcggcggatccgaaattcttttggaagtgttgtggcagttcgaacggcagcggctatggcagcaccggtcggtgtgacaagctcgccttcgacatccgagatatttaaagtcagatcgttttgcattgcaattgcagtgacagcaggtaccggcaccgggatcagcccatacacctcacctttcggtttcgcatagacctgtgtttttgctaaacagatgcttgagcctat

SEQ ID NO: 2080 - DNA, 2379 bp, Unknown
  16S sequences of unknown bacteria
ttctttatataaaataatccctccgtatctccggctcccttgtgtaaagggagctgtcgcgcagcgactgagggattgtcctttcccgcaagacttacctttttcgaaagctttcgtcagcctcggcatgtcctgtttcttttaacaaagctttcgtaaaaaaccgaccctcctaagacgtcacaacccctccgtcaaaatcaaagatttcgacaccgaccgctcacaggtgaggcttttaatcccaaacccaacgcccaccgacataggaggcgttttaaatcacaaaaccccgcaaaaaataaccccgcagaaagtagagctttctgcggggtttctttcgggaaaatccgatctcaaaatgttttccctcgggtaattaaattttctcggcgcctgccttatttaaccgcctcaaaagcggcgtcgagagcggcgataaggtcgtcggcatcctcaatgccaatggacaggcggatggtgttgggcttaatgccctgctcggcaagctcggcctcgttcagctgagaatgggtggtgcttgcggggtgaataacaagggatttcacgtcggcaacgtttgcaagcagcgagaaaatggcaagattgtcgatgaacttctgcgccgttttgtcgtcgcccttgatttcaaaggtgaatatagagccgccgccgttggggaaatatttgccgtaaagcttgtggctgggctcgctttcaagggaggggtgatgaaccgcctcgacctgcggatgtttcgaaagataatcgacgattttaagtgcgttgctgacatggcgctcgactctcagcgacagcgtctcaagaccctgaaggaatataaaggcgtggaagggggagagggtggagccggtgtcgcgcagaagaatggcgcggatgtaggtcacgaatgcggcgccgggagcggcgtcggcaaaggaaacgccgtgataggaggggttaggctcggagatccaggggaattttcccgaggccttccagtcatagttgcccgattcgataataactccgccgatggccgtgccgtggccgccgatgaacttggtggccgaatgaaccacgatgtctgctccgtattcgatggggcggacaagatagggagtggcgaaggtggaatccacaacaaggggaattccgtggctgtgagcgatttttgcaagagcctcaaggtcggcaatgttggaattggggttgccgagggtctccacataaagagccttggtcttgtcggtaatggccgcctcaaaggcgccctcctcctcggggtcgacaaaggtggtggtaattcccgaggtcagcggcagggtgtgagccagaagattataggttccgccatagatggttttggaggcgacgatgtgctcgccgctcttggcaagagcctgaatggtatagttaatggcggcagcgcccgacgcggttgcaagggccgccgtacctccctcaagggaagcgattcttttttcgaaaatgtcctgggtggggttggtcagtctgccgtagatgttgccggcgtcacggagaccgaaacggtcggcggcatgctgactgtcgtggaacacaaaggaagtggacgcgtaaatgggcaccgctcttgcgtcggtggcggggtcgggctgttcctgtccgacctgaacctgacgggtggtgaatccccagcttgcggaattgtttatatctttaacgtttgacatgacggtaatctcctttaaaattcaatttaaaaattcaaatatcttcaatcggttaaaaaagcataaggtcacattcgcacgcaaaaaatcagggtataaatgtttcttcttttgtctttcatttatatcgcctccgaatttcgccagtttgggaaatttttcgcaggtttaaaccctttcgacaggcgccgattgcccgtcggtttaatacctaccttttccgtatgttttctgtattatatcatcggcattcccgtttgtcaagggttttggccgatttttttattttgtcttgcaaacctactaaatctatggtattataggattatgaaaggaatgagggaagtgaaaatttccacaaaggggcgctatgcccttcggatgatgctcgatttggcgcagcatcagggcgacggctatgtcgcgctaaaggagattgccgcccgacagggcatttccaaaaaatatctcgagcaaatcgttcccatgctgacaagaggggactttctgcttacaaacaggggttatcaggggggctatcgccttacccgaactcccgaaaaatacacggtgggcgagattttgcggctgaccgaggggagcctttcgccggtttcctgcctcgaaaccaagccgaatatgtgcgagcgggccgagggctgta

SEQ ID NO: 2081 - DNA, 16269 bp, Unknown
  16S sequences of unknown bacteria
ctgatgcgtttctgcgaagaagtagcgaaatagtgtggctacagaacggacaaagcgttcgttaaactgtggaaaataatgtaatgccgctgttccgccgcctgtagaaggcggcgaaacagcggcggtttattggattttatccgggaaaaagacgacccgaaagccggcatgccggctttcgggtcgtctttttcctgactgcagaattattcggactttattctgtttctatttttcatcgctgccgtctgcagatgatgtgtattgttccgcatgggctttgatttttccaaaactctcttcgctgatgacatgttcgattcggcaggcgtcttcagcggctactttcggatctacgccgagacggatcaggtactgactgagcaggacgtgtctctcatagatggtagtggcgatacgcatgccctctggaagaagtgttatcattccatcgggagccatttcgatcagtccgctttcgcggagctttttcatggcgacgctgacactcggttttgaaaaattgagttcatttacgatatcaatagagcgaacctgtccctgacgctgttttaagatgagtatggtttcgagatagttttccgctgattcttgtattttcaatgaaattcgcctccttttctatgagatgctctgaactttggcgagcggctgcgatcaggatttcgctttggcgattctgttctgatacttcgctctgtcttggttattgagaatcgattttctgagccggagattttccggtgtcacttccagcagttcatcatcggccagaaattccaggcattgttccagactcatctttctgaccggtaccagacgcagagattcctcgctgcccgcggctctcatgtttgtcaggttcttctttttgcagacatttacgttaatatcgcctgctttcggcgctacgccgatgaccattccctcgtaaacagggacgcctgcttctacaaagagcgcgccccggtcctgagcgttgaagagtccgtaagcgtttgtctctcctgtctcgaatgccaccaggcttccggtggatcttcttgcgacctctcctttaaaaggctcgtagcggtcgaagacggaggccataatgccttcgccccgagtatcggtcagaaattcattccgataaccgaaaaggcctctggacggcaccaggaattcgattttcatacggcttcccaccggtgtcatctgaaccatttccgcctttctgactcccatcttttccatgacagagccgacggaattttccggtacgtcgactacgagacgttcgatcggttcgcacagcacgccgtcgatctctctggtgaggatccgaggcggtgaaacggcgaattcatagccttcccggcgcatattttccatcagaatggaaagatgcatttctccgcggcccgctacgttgaatgcgtcggtagaatccgtttccgttactctcagagagacatctttcagagtctcttttaagaggcggtcccggagatttcgtgaagtgacatattttccttcccggccggcgaaaggcgagtcgtttacgacaaaagtcatctccatggtcggtgcggagatctggacgaaaggcagaggttcgggagcgttgggatcacagatcgtatccccgatggtgatgtcgccgatgccggagattgcgatgatattgccggcgtaggcttctgtgatagctttctttgtcagaccgtcgtattcgtagatattggacgctctcagttttttgctggtgttgtcatcatggtaattgcagacgatgatatcctgattctgggtgagtttgccccgttcgattctccccaccgcaatccggccgacgaattcgttgtagtccaatgcggagaccagcatttgaaacggctgatcgtaatcggcctctggagcggggatgtgactgagaatcgtctcaaacagcggacggagatcagtgccctctgcattctggtcagcagatgcgatgccccggcgggcggaacagaataaaatcggagattccagctgatcatccgtagcgttgagatcgatcagcagctcgagaatctcgtcgatgacttcatcgatccggcggtccggacggtcgattttgttgatgacgatgatgactttgtgacccagttccagcgcccgggacagcacgaacctcgtctgaggcatcggaccttccgcagcgtcgaccaaaaggatgacgccgtttaccatcttcaggatacgctccacttctccgccaaaatcggcgtgtcccggtgtatctacgatattgattttcacatcgccataagtgacggccgtatttttcgctaaaattgtaatgccgcgttctctctccaggtcgttggagtccatgactctttcgacgacagactgattttcacggtaaacgccgctctgcttgagcatttcgtcgacgagagtggtcttgccgtgatcgacgtgggcgataattgcaacatttctgagattagggtttatcaaataaagtgcctccttaaaagccgtatttttctttaaaataccagaaccgcggcaggtgcgctaaaatatttttctgatatttcagtactttttcataactatatattatattctaattcgtgaaatgaagcaatataaatagagaaggccggacaaaagataaaggaagatgatgccggtattttttattttatcaaaaaaatggggaagaatgtcgaaaatcctcgaatacatgccgaggaaaactgaagaaaatagaacgaaaagcggatgtttttggtaatctcttcgctggaaaaggaattcaaccgaaaaaaataaaaaatattagtgttaagaattggtaaatccattgacgggatgttttttctgtgatacactgattaacgtaagcgaaatgttatcttgattcacatgtttctgtaagtcattagacatttaatgatttacaaaaatatgtgaattttttaaatttgagacgaaactgaaaagggagaattccttttgaaagcggtttcctgccgcctgcggcggcagtacggcaaaaaatctttcataattgaatttatgatatagagattttattatttttaagacaggaggtattttagatgagcaatggtactgtaaaatggttcaatgcagaaaagggttatggttttatcgctgatgatgacggcggaaatgatgtgtttgtacatttctccgcaattcaggctgatggatttaagacattaaatgagggccagaaggtcactttttcaacggaaccggatccgaaaaacagcgataagctcagagctgttgatgttgtcgttgtaggttaattttacctgacgatagatcgcgggcagttattccgtatatactatcgaacgacccgagccgcctaatagcaggcggcttttttgtatgccgaaaatctttggtgtgcggcgtaatacgacattttcgctgaagagattcagattttttgaaaagtttctaaagaactctgacgtgacgcgatatttatgacaatctcggaaagagacggagagatattttaggacaatcgagaaattatgatcagtaaggaagttgtaattttttccgtttttatataaacttatgacatggagttagtatagacaaaccgaagtttgtctatattttttgacttatagttaaataagactaactatgtactttgaggaggaaaaatgaaaaggaaactgatatgtctcagcctgtccgcttttcttgcggcttccggagcgatgccggcatttgcggcgacaagtgcggtatcgttccaggatctgcagggcaactgggcagaagaagctgcgctgtattgtgcggaaaaaggactgatgcaggggtataatggaaacttccgtccggcagaccacctgagccgtgccgagatggctgcggttatcgtcaggagtctcgggttgacggaagaaacggatctgacagcttattctgatatagatgcgtcttcctggtattacagcgacatgtctaaagtggtagaggcaggtattttccaggggtccggggataagctgaatcccggagcagatattacaagggaagaagcttttaccgtatttgccagagcttatcagcttgaggcggatctcagcgtactggaacgatttcgtgattcggatcagatttccgcatgggcgagggacagcgtttcggctatggtccgtaagggatggattgaagggtccgacggcgctctgaagccgaaaagcccgatcagccgcggtgagctggcacagattttctacaacggcggaaacgatatgacaccgtcttccggtgaaaatccgtcctcagaggtgaaaccgggaaccggacagggcggatcttcttccggcggcagctctggaggaggttccggaggaacggtgacgcctgtcgaggaatctctggtgaaggaatcgcagacaaagatcgtagatctgggatatgctcagtatgtatccatcgcttttgaagatggatattctacagagaactgtacggttacagtcgacggcaccgatgtgacttctgtgctgacgccggttacggacgacggctctgtagcgaagtgggaactgacctcgctgaaaccggcgaagctcacagtgaccagcggcgacagaacgcagaatgttatcctcagcgataacaaagatccgcagacacctgaggtcgtcagcgacaccggtgcagattattttctaactcacggcgccgtatacgtatgggactattatcttaccaattatgatgcggcgggaaatgtgagagtaaaaccgactaagactacattcggtacatcttcgcaggaacaggaaattcctttctattctccggacgctgttttagtcccggatgaagaagcggataacggatatcatgtcagcggagaggctgtcgtcatgtttaattacgccgaaggaaccgaggcggaaaaggcatgggtggacggtatttccgatgtggatctggtggcatatggagaaaacaatcagacgctgaacggggaattggaatggactctggacaaagaggcgccccacggcgattctactgcagcgcaggtttccgttccgctgggacagatcaactttttctcaaacggccgttaccagttgagaattacttccggcgaacaaagccgcctttttccgatacatgtggtaaatgaaaagattccgtcgatgcagctgtcggatccttcggtggagagcggcaagaacgtccactttaagataaaggatatgacgtacggtattacgatgcctatttatcgggtacagctcacactgccaggcggggaaactgaagaactgcataaaatcgacgactggtatcttttcggagacagttttgtcctttacaacgacaatgaaaatcatcttaccgaagcgggaaattatacgctgacgatctgggcggacggatttcagtctttctcgaagactttctctgtaaacggcgccggagcgttgttttccgaaaatatgaagaacggcgccggagcggcaaagcctgtctcttttcagccggatgcggtaacgatggctacttcggtgggttccggaggatcggaggacggttcgggcggcagcatgatgagtgcggatctggtattcgatgcagaccttctggcaaatgcggagattctctgtgaaatcggtgtggaaaacgattatgcgaaagctatcgctgaccggtgggagtatgatatgagcggtatagacgccgtatatctgcagggttccgacgtgctctacaccgcatcggggtattttgacgcagtaaatgaggcgagagcgaaagacaaatatctgacttttgcgcaatatatcgaaaccgagggagcagagacgactcagaaccggccataccgtgtaaaacaggtgctggaagataacctgctgggagaggccatagcctttgatgaggccgcgggcaaagaggttgcggatctgattctcgtcgacgggcagggggaaccggcggtgtcggtgaaggaaaataccgatccggtcttttattgtgaagatctcgcttatctgcaggcagtcggcggacatatctatctgaataacgattatctcaatccgatttctgaggaagactgtgtgatcgatgcggagaagaatactatgacgctgaaagggcttgtgctgacaccgggtctccatacgctggaacttcgggcgccgggctatcagacggttcgtctgactttccagtatgaaaaagtactggaacagaatttatccctttcgctcagcgatgcgtctgtacagccgggcgatacgattacagcaacggtgagtggatcggaaggcgatttcctgaaaaatctgaagtcagtcgttctgaaccagccgaacggcagcaccgcgtccatcggtccggagggatattacggttatgacgaatactatacgctggcggaagattacagatctctgactattgtcacaggagattcgttccgtctggcaggacaatattctattcagctgcaggcagagtattatgcggagagcctgacgacggaagagtttacagtaatcgcagaggaaaaaaccgcgccttccggggaaatttcccttgatgaagagcgcggcctgtatcagatttcttttgagagcgcgggcagtatctattcctggaaatcagcgattcagtcggtgacagtcaacggcgagtcctatacagaagccgggatactcagcagtccgcagagcgattcgaaaacgtaccgattttccaattcttacggatacgatgtcctttcgctcggcggaggttcgtttaaagcggatgaaaacaacgaaatcattatctgcgcagaaggatatcaggactttgtgatagagtacaatgagaattccggagcagataatcagggagcagaaccgcctgcagtggacaaaattgaaacaccattttacggagattatcgaaatatcatttttgaaggaggatatactcagagtgaatatatggatgcgattacaagtgtaatcgttgatggtacggaatatcagaaagtagattatatgtctgtgtataagggagtatatagggtactgccaagtgacgctcagattcatatcgggatcgaaggtcttgcatcgggagaacatgccgttacggtcaaggccagcggttacaaagactgcacgttcactctgactgtaaactgatcaatctgcaaatatgataccggtgtcccccgcctctgcaggcggcgggcgccatctcatttcttttccatgacatctgtctccacggagggggtaccttcccaggggacggatgtctctcttttatcagagacgggttttgtttggctttgtgaatttactggtataatgatataataaataaaaataacaattctatatgtcaatgtcacaaagaactgacggtccgccgcggtcttcggatccgaaacttgttttgtataggacacggatgtgcgggacgaaagcagatatgaggtaagtcagacgggaggaaaagtgatgagcgaaaaaaatatttacgcacagattctcgatgctatcgcagagggagaaagcgtttcgatgaatacgacgattaagggcgagagcggcaggatctcggaaggtctcagcagaacgctggaaattgtagcgcagaacagagcggaggaaggtctttccgtagtaaagccggaaacggtaaaaaacggcggggactttgaaatttccgaaccgatgcttccaaaagaacgtctgatcgttttgggcggcggtcatatcgcgctgccggtatgtgagtttgcatcgaaatgcggttttgaagtttacgtggcggacgacagacccgcctttgccaacgctccgagatttccgtgggcggcgggcgtgctctgcgattcttttgaaaacagcatcgagcagctgaaaatcacgccttacgattttgtcgtcgtcattacgagagggcaccggcatgatgcggactgtctcagagcgattcttccagggaagcagccggcttatctgggcatgatcggctctaagagaagagttcgcggactcttggatatgctggtggaagaaggttacgataaggaaaatatcgagcgcatctgtacgccgatcggcttaaagatcggagcggtgactccggaggaaatcgcggtgtcgatcctgtcggaaatcatcgcgtacaagcgcctgccggaaaagaataccggacattccagatatgtcaacggttcagatctggatctggagatgatcgaatatctggcggaaaatcacgaaccgaaagctgtcgtcaccgtaattcaggcaaaaggatctacgccgagaggcgccggtgcaaagatggccgtggacccgagaggccaggtgacgggaagtatcggcggcggctgcagtgaaggagctgttatccgcgatgcggtggatatcataggcacgggggaatataagacagtgtttatcgatatgaccggagaagtggcggagtccgacggcatggtctgcggcggcgtaatgtatgcgctgatcgaggacggtacggaaatgtgatctttcggagcggacggggacggcggttctcccggaagcgggagacgtatcagagtcgttgtaagcgcagagagcgctggaattgattttttgtgagacaggaaaatcagcggatctttttatgacaggagcggcacagaagatgaaagaatttatatacgcagataacgctgcgactacgagaatttcacaaatggcatttgaggcgatggtaccgtatcttacagagtattacggaaatgcatccgccctttaccgaatcggccgcgattcccataaagcggtggaggatgcgaggaaacagatcgcttctctgattcatgccggtccgatggatatttatttcacctcctgcggtacagaggcggataattgggcggtaaaaggcgtcgctcataaaatgaaaaaagacgggaaaaaacatctcatcaccacagtcattgagcatcatgccattctgcatgccatgcatgcgctggaggaagatggatttgaagtaacctaccttccggcggattccggaggaagggttcgtccggaatctgtgagagacgcactgcggccggacaccgctatggtgtccgtgatgtatgcaaataatgagctgggcacgattcagccggtggaagaaatcggtgcgctgtgccggaaggcgggcgtcatttttcatacggatgcggtgcaggcggcagggactcttcccatcgacgtcgtcgctcagaatatcgatatgatgtcggtatcagcgcacaagtttcacggaccgaaaggagtcggttttctgtactgccggaggggtctgtatcccgataattttatggacggcggggcgcaggaacggggacaccgggccggtacggaaaatgtggccggaatcgtggggatggcggcggctctgaaagaagcctgcggcagtctggatgagaaggcgcggcatctgtcctctctgagagacagggttcaggaaggcctgctgagaattcccggttcccgtctcaacggcggagacgagcaccgtctgccgggaacggtaaatgtttcttttgagaaggtagacggggaatcccttttgtttcagctggatctcatgggaatcgcagcatcttccggttctgcctgtgcttccggttccgtggatccgagtcatgtccttcttgccatcggtgtgccgtatcacatggctcacggatctctgcggatttccctgggtcgttacaatacggcggaagaggcggatcggatcgtagaggcggtagctgaggcagttgcgcttctgcggggagaaagatgaagcgcatgggcagaagagaaagaaagcggcgcgtatttgcgctgattatttccgcggtggttttatgttttcttgcagctggctgctctctgccgcagagcggagattcagaagcttccggggggagcaattcttcggaaacggtgcaggagaaaaacgccggacaggttcagagaaccgtcttcgcgatgaatacgatgatgaatctgcgggcgttcggcgaaaatgcagaggcggcgatcgaggcggcggaagaagaaatccggcatttggatactctgttgcagaggggcgaagaatccagtgaaatttatcagctgaacagcagcggatcgagagaagtttccgaagagacgctgtctgttataaagagggctctcgaaattgcagaagccaccgacggcgcctttgatccttctatcgctcctgcagcagatctctggggtttttacggacagaatttccgggtgccttcaccggatgaaatttcgtcggttcttccgacgatcggctggaaaaaaatttctatcgaaggaaatcgtgtaacgctgcagccggggacaaaaatcgacttgggcggaatcgccaaaggctttctttccggaaaattgatggagatctttcgggatcacggcgtggaaacaggaatcgtctctcttgggggaaacgtacagactctcggagagaaaacagatggaagcatctggaaggtggcgctgcaggatccggacgaccctgaccgttatctggggcagctgagtgtcgcggataaagcggtggtgacttccggaagctatcagcagcattttgagaaagacggaaaggaatatcatcatattctggatccgaaaacaggctggcctgcggacagcgggctgacttctgtgacgattatctgcgaggacggcgcgcgggcggacggtctgtccaccgctcttttcgtgatgggcgccgaacgggggattgcgtattggaaagacaatgaaggcttcgatgcgatttttgtgacggctgaccgaaaaatttatgtcacggaggggctggaaggaaattttgaatgtgtcgattcctatgaaatcgtaagaaaatcatcgtgagagactgggtatttcgctgaaatatgagatttactgtccgcagagactctgcggataccggcgcggccatagaaacgaaaaagagagcgatcccgcagcttttgtctgcaggatcgctctctttttcgtttctatgctttttgatgcgggcggggacggattgtttccggatacgctgtctctgcgcgggcaaagttatatgcgtatctgcacgatataggcgtcgctttggttttccgtgacattcaggaagttgtaggaattgatcacatatgcgtttcccgttgcctcaatattctgttcctggagccagtccagaaggaaacgaaccgtaggaaaaatcgttttcgttcctcctttatgaacgagacaggcatattgaccggcttctctggtgaaagaactgctgcgcgcggactgattagccggatcattttgtcggagacgttcgttgtgcatacaggaacagaaattatcagtgatcagcacatggtgcgggataatgcagcagatcggataacagggcagctgaaattcatcgctgtccttttcgaaaaaaaaggctgacattttttctgcgttgctcagatcgttcagcgaatggcaaaaaggaatgggagtcagataataggttccctcgtccaggatttcgatggacggctgatcattctcatgactgttcacataatttaaaaaatcatttttgcattccaggaaaagcatcgcggactggagttcttctatcttttcgctgagacgttttttgtggtattcgaatagtaattcggaggaaccggggcgttccttttcgtggtccagcatagtggcgatcgattccaaagaaaagtcgagtttgcggaaaaaacgaataaaattaacggtctgcacctgttccggaagaaaatatttatagccgttttctccgatgaataccgggcggatcagctgtttttttacataaaacgacagagtatcccggccgatacgggccaatttcgccagatttccaagggtaatatattggttctttatatcctctgttttttccatctttttctcatctcctttttctgtttaattataagtaatccttgacctggtagttacttataagtttatactatattctaaagaaaacaagtataaataataaaagcaaataaaatggaataaaaatgaatcttctcaaacctgcggagctttctgcagtgtatataataaggaaaagttttagaaatgaatgatatttttgggctttcaggaaaaatgaggaaaagagagagctctcggcagaaaaagtgtcagatggaatcctttgccgaggaaagaatgaaaaaatatatttccgtctttctactggttcttgcgacagccgttttgtgcggatgtagcggaagcgcggaggtatcgcaggcggattctccggcgctgcagagctgcgagtcgtacggtatctgtgaaggcggagagcaggatcagtatatcatagctgaactgatatttgaccggccggtttctttttcggaggagctgaaagagcagcttcgtgtagtgatcggaggacagagaatcgctcccgagaaaatcgaggtaggcgcagtggagaaccgggaggatgccgtgcagctgaaaatggcggtacagcaggttaacgacggatatctggaaatcaccaatgctcccggagaagaaaagctgacagctctcaccgatgcggagggcaggtactgtgcggcttccgcggatgtgaagcagctgatcccaagcggtgcagccattaccactctgaaaagtgatccggcgcagaccgtttgcagggtggaccagattgtgactcacagaagcattatctggattcagcttttcagcggaaatcaggcggtggaaccttcgaattcaaacactacagacgtgatggaaggcgcctgtgcggtgcacgaacacgaattcctctgggctacaaaagagacgacggctgcggatattgcggagactgtctctaacttttacggggaagatttttccgcttccgcagagggcgatgagattaccgtcaccagaaaaacgggggagaacgccgggaatctggaactgaagatatataatggaaaataaaaatacggcagtcgaggataatcggaaagttatgaaagcagagacagcgcggagtttaggaaagagaaaaaggaatataccggcgattacggcgggactgatcgtcctgctgctgattgcagcggttatttccgtactgataggaagatattctatcacgccggacatgttgtgggagatcctgtttcacggcgatgatcctctgagtgaggaagtggaagctgcgtctctcgtcctgtttgaggcgagaattgccagaattgcggcggcggttctgatcggcgccgcgctttctgcagcgggggcatcttatcagggaatttttcgaaatcccatggtatcgcctgatattctcggcgcggcgacgggagcgagttttggagcggctctggcaattctcttcggagcgagtgctctgatgattcaggtttccgctttctgtttcggtcttgcagcggtagcggcggcgtatttcgcgagttcggttctgacacggcagtccggcggagcgactctgacgctggttctcaccggcatggtggtatcagcgctgttctccgcgtttatctctatcgtcaaatttgtcggagacccttatgatactctgcctacgataactttctggctgatggggggattgacctatgtgacgaaaggcgatcttttcatcatgctgattccttttgcagcaggtatgattccgctgctgcttctgagatggcggttgaatatcctgtcatttgacgacgaagaagcgtcctcgctgggggtagatacaaaaaagacgcgggcagtcattattttatgcgctacgctgatgtcttcttcagcggtagctgtaggaggcatgatcggatgggtcggactgatcgttccgcatatcgccagaatgctgacaggaccggattattccaggatgcttccgtgctctatgctgacggggggccttttccttctgatcgtggacgacatcgccagatgtctcttcgcgcaggaaattcctctcggcgtactgacggcaatcatcggagcgccgttctttctgtatctcatgtttcgtggaaagaagagttttatatgatgagcaattatacagagaaacatacgaaaaaatatatgaaaaaaggaattgcagcggtgatctttctcttcgcgctttgtctcatctgcggatgcggtcagaaagaggagaaaaaagctgtctacgaaatcacggcggaggggagcgcacaggagagcggcgtcatcgcttttgcagggcttgagatgaacgtatatcaggatccggcgtccaatccgtgcggagattgtccggatcagccggtcagcatttatgtgggaaccgatacgccggaaaccgtagaggcgatggcggaagcggtgcggcgggccgacgatctttgggaggttacagagacgacagaccgcagtctgatccttcaggagaagataccgggaagtgtgacggaagagccggagctttccgcgccgaaaggtttgacgctgacgggttctttttccctcgtcgggggaggtacggaccagcagcagagcgctgacggagaaaaaaacggaacgtccgcagaggcgatgaagatagtcaaaaatctggacggaaaagagatgcaggttcccgaggaagctccggagcgcatcgctgcggtttacggccccgcctatgaggcgctgaccgttttaggcgcagaggacagaattgtggtctgcgcggatgttcagtttgaaaattttccgtgggcaaaaaaagttttttcgaagatttcggatcttccttatctgaaaaacgtacatacttcggtgagtgcggaagaactgaagacctaccgcccggatctggtgctgactttcagccgtcccaatgagctgaaacagctgtcagcgctgaacattccggcggtatatggtgtgatttctcagtcgctcgatgatgtaaaagatcagctgcgggtttacgcggaagcggtaggcggcagtgcgccggagagagcggaaaaatacgcggcgtatttcgatgaaaaactgaaaatggtcaccgacgtgacgtcgaagatggcggacgccgagaagccttccgtatattatgcgggaatcgacattcttacaacttatggaaaatattcggatctcagtgatgttatcgacgctgcgggcggccgaagcgttacggcagaactggatgcaggaaatcatacacagatcaattttgagcagctggcttcctggaatccggattatatctttatcgatcacggcagtatgaacgatcgggagaccgtagaggaaatcaaggatgccgcttatggaaataagaggtatgaagcgatctcggcggtgaaagacgatcaggtctatctgacgccgagcggcgtattttactgggacatgggtctgcagaagattcttctcgtcatgtacatggcgaaaaccattcatccggaagcttttgcggatctggatatggagcaggaaattatggagttttacagtgagttttacggatatgatctttccagagaggatgcgcaccgcattctgatgagagaagatcctgtcgggtgatttaaaaaaacgtaaaaacagctggatattactggcgaacaggtcggtgcagagggatgtttggacatggaagagcgggctgaaacggaagcgcgacagtctccgaagaagagcagtgtgcaaaaggatcctctcaaaagaaaaattaaaaaattatacgataattaaaaagtgaataatataaaaaacaaagggggtaccccctttgctggcaaggtttcgccttcccagcaaaggctgtcttcttttattagaaaaatgatatagcgtctgacattttccgcttttctccgcggatttgatttcctggttcagcaaagagaacattcttcgttcaaatccagagcggaggagaggctgcggcgctatatcaaaacggtttgcacgtttttgtcagaaacgtcgagagcgctgctccgatggaaatgaggaaagaaacatgctggagatcaaaaaagcagtctgcggatatcggcgtggcagaagagtgaaaaaagtgatagaagggatttccatgacggtcgaaccgggggaagtcatgtgtgttctcggttccaacggtatcggtaagacgacactcttccgatcggtgctcgga

SEQ ID NO: 2082 - DNA, 1929 bp, Unknown
  16S sequences of unknown bacteria
gttgagagcgaccttttcgagcagttccgcccactttttgtcgccggtcacggcatagagccattcgaacgagtacatgagctcgacgacggcgcagagttcgacgccctgaataggagacctgccggaaatgcactcgtcgccggtgaaggtaccgaccggcattccgtggtgctccatgaggaaattatacctgttccacgcgaggtccttgtattcttcatctgtgaacaagctcatgagggcttcactcttgagcatcatcgcgaggttgacgacgtgcgtgtggaatgtccattcgttgatcggcttttcccagctgtcgtagaagctgtcgtagtccgcgccggtgtcgcgcaggaacgccgccatgtcgtcgaaccacgtctcgtccggataccaatttttcaggtatttcagcgcgatgagaccctcgtaccagcggaatttgccccactcgtatatgcgcaccccgccgctcttcgcgagctcgtagaagttccgcatcgtgcggtagaggacgtccggcactctctcgtcgcctgtgcagtcataccagacggtgagcaccttggagatcaggtggatcgcccagatgtcgtacttgtccctcggcgtgtccccgctcggacagatccagccgtccggttcctgacgcgcgattatggcgtccacatactttttcgcgcgcgcctccatgtccttgtcgcggagaaggaacgcgagcgggatgaagccgtcgagccagtacgggactctttcccatccctcggcggttccacctatccatttgctgtcccggacgtcaggccagaccttgtcgaggtttccggcgagtcccttcgcttcgatctcaagctgacggcggagccatccggtcggggtgacctcgcgcgacgtcagaaaactgtatttgcttttcataaaatttttctcctttacacaaaccgacttgacaaagagagtcaaaagtcttataataataaaagtataccttatttcccgacttttttcaattgccattttcgttcgcaacattacaaaaatccgcacgctttcaacggcagaccggatcgtctgtcaaaattccaggaggaaccgatgtatctgtcacccactccgccgcctgaattccgcacctgcgcaaaaaaggtattcgctccgggcgaggttcatatcacacgtttatactggcgcagcgtcctcattctcatgacgaagggaaccctcaccttcagagaggacggacagaaaatcagcgtcagtgagggcgaatactacatccagcgcgaggggcttatgcaggagggtctgacgccgggcgtctcgccggagtattatttcatagagttcaacggcacctaccgtgagacgaacgagcacggcgtatgtctgccgctccgggggaactaccgcgggtcggtcatcttgccgatcgtcgaaagcttcggggctctgttcgcgagccacacggcgaatcctttcctgcttgactcatacatgaaccgcgtcttcggggagctctcgagcggactgcttatgaagagcgaatcggacggcgtcctcgacctgataaagaacgacatcgaggcgaggttcaacgagaacacgacgatagaggagatcgcgaagcgctacggctacacgtccgaccatgtgatccgcctcttccgccagaaattcggggtgaccccgcaccgctaccgcctgcgcctcagaatggagcacgcgaaatggctcatcggcaacaccgacatgtctctcgaggcagtagccgacgccgtcgggtataaagaattcccgtcgttctggagatgctacaggtcggtttacggggtttcgccggggaagaacaggtaaatagtctgaaaatgaattttcagaccaaacagttttgagactttcacgacatagggtcgtgaattttga

SEQ ID NO: 2083 - DNA, 14349 bp, Unknown
  16S sequences of unknown bacteria
tgtagaccacgtacttgcaagtggcaaggacatcaacgtcatggtattcgataccgaggtatattccaacacaggcggacaggcatccaagtctacccagaccggtgctatcgcacagttcgctgcagctggtaaggaagttaagaagaaagatatggcttccatcgctatgagctatggctatgtatatgttgcttccatcgctatgggtgctgattacaaccagtgtgtaaaggcaatcgcagaggctgaggcatatccgggaccgtccctgatcatcgcttacgctccgtgtatcaaccatggtatcaagaaaggtatgagcaaagctcagaccgaggagcagctggctgttgaggctggttactggcattgcttccgtttcaacccggctctggcagcagagggtaaggatgcatttgcactggattccaagactccgactggcgatttccaggcattcctggatggcgaggttcgttacaactctctgaagagagcaaatccgcagagagcagaagaactgtttaccagatccgagagcgagtacaaggcaagatatgcttacctgaacaaactcaaaactctgtacggcggagacgcagaataatctgtattaacaagaaggatatgctttcgggcatatccttctttttttcttgcataaaaagaaagatatgggtatgatatctggtagatagaatttcttttttggaggacgaaacgatgacaaaaccaactttggtaattatggcagcaggaatgggaagccgttatggcggattaaaacagatcgatcccattgacccgcagggacatattattatggattattccatctatgatgcagtacaggccggatttggaaaagtaatatttatcattaaaaaagaaaacgaagcagattttcgcgagagcatcggcaatcgcatggagaaacgcattccggtggagtatgtatttcaggatcttcacaacattccggaaggttatgaagttccggaaggacgtgtgaaaccatggggaaccggacatgctgtattgtcctgcctgccggttgtagatggtccatttgcggtgatcaatgcagatgactattatggacaggaggcatttcggctgatccatgatttcctggtaaatactgaggatggggataaatatcagtatgcaatggtaggatatcttctgaaaaatacactaaccgagaatggtcacgtggcacgtggtgtctgtgagacagatgcgcatcataagctgactgccattacagagagaaccagaatcgagcgtcatgcagaaggaccggcatatacagaggatgatggtgtgacctggcacagcctgccggaagatgcaccggtatccatgaatctgtggggcttctctgcaagtattttaaaagaactgaaagagcgttttccagtatttctcgatgagaatctaaagaaaaatccgctgaaatgtgaatatttccttccatttgtggtagatgaactgatccgagaaggaaaggcagaagtaactgtattgaaatcccatgaccgctggcacggagttacctataaggaagataaaccggtcgttatgaaagcaatgcaggatctgaaagatgcaggaaaatatccgcagaatttgtgggaggagtagaatatgtgtacagcagcaacttatcagacaaaagatttttatatgggacgtacattggattatgaattctcttatggagaacagatagcgatcattccacgtaattatccgatcaagtttcattatgcaggtactctggagcatcattatgcctgcattggcatggcacatgtagcaaatggatatccattgtattatgatgcagcaaatgaaaaaggacttggtatggcaggcctcaattttgtcggtaatgctgcatatgctgacgtagataatgaaaaagaaaatgtagcacagtatgagtttattccctggatactgacacaatgcgccactgtggaagaagcccgcgagaagcttacacgtatgaatcttaccggcgctccgttcagtgcacagctgccgacggcgcagcttcactggattattgcagataaagatggctgcatcgtggtagagtccatggcagacgggcttcatgtatatgataacccggcaggggttctgacaaataatccgccatttccgcagcagatgtttttgatgaatcaatatatgaatttatcaccgaagcagccggaaaatctgttttctgataaacttccgcttaccacttacagcagaggaatgggtgcgctgggactgcctggagatctgtcatccacttcccgttttgccagagtggcatttaccagactcaattcccggtctgaagatacagaaaaagcaagtgtcagccagtttttccatatcttagggtctgtagaccaacagagaggatgctgtgaggtggcagagggtaagtatgagatcaccatctatacttcctgctgtaatacaagcaaaggtatctattattatacaacttatgagaatccgcagatcacagctgtgaatatgcatgcaacagatcttaacggaacagaagttgtcagctatccgatgttacaggatacagagatccgctatcagaattaagaaaaactttaactttctttcctgcggattgtggtaaaatatccatattcaaggatagaagcggagatgtcaagcatatccgcaggaggaagtaagatgaaaaagaaagtaattatgcttagtatgctggcaatcacagcagcgatgctgacagcgtgctcagacaaaaatgatgcagcagatgtgccggaagtttcacaggcagaagaaagtacagaaaatacggatacagattcatctgcagaagcagcggaggaatccacagagaatgtcgaaaaagattcggaggtcaagggttcagactatgtgatgtccgaagagtaccagaatgttctggataaatacaagacgatgatttcagaaaaatgggatgtgagtaaagcatttgatgaaggaatgtcttctatggtgtcagagttttgtaatatggatgcacaggatcagatcggttatactctgtatgatctggatgcagatggacagccggagctgttgattggtgaaatggatacagaattaccggtaaacagcattatttttgatgcgtatactttgaaggatggaaatgctgttcagatatttgaaagtgaatccagaaaccgttattatcttgtggaagatgaagcaggagcgatcctgatcgcaaatgagggatccaatggtgcggcgagctccggatggttatattacacagtgtcaggggatcggcttacagttcagcaggcaatcatgtatgatgcagcagcagatgaagaaaatccatggtttatggcatatgatgatgactgggatacttctaatgatgagccagtggatgaagatatggcacagtctgtaatcaattcttatacggacaattatgcaaagcttgattggacaatacttgtacaggaataacatataatatgaacaaagaaggatagatgacaatgaagaagaaatatttagctgtatttatgatggcaacagcattgacattaacggcatgtggagcaaaagatacagcaggagattctcagcaggcagaagaacaggtgacagatactgcagatgaaaccacagcagaggcttcacaggatacagaagatacagagaatggtgaaactgcagagaacaatgagaatatgatcacggagctgacggctaatactgcagcggaaatctcaggcaaagaatttacgttgaagacggaacaggcatatccggatgacgatgagattattgcagttacagctgtgtatggagatcaggaactgaaactggatgaaagtctctatgtgaatggggtctatgaggtatctctggatggtcaggaatatgtgatgacagagaccactacctttgatgactatggaatgatttatcttgtgaagctggatgagagtggagtgacactggtatccacacaggacggacatctgcgtgaggttccagcagatccgaccgaaggatttgaaattgaatccaaggtagatgtgcttggaacctatggtggaataagaacctatttcatacaggatgacaaactgactgccaatgatactatctatgaatttgcaggagatccatcaggagaacttccggagctgactgtgaaagaaagtgtcaactgcagactggagggcggtaacacgactctgaaagcaggagatgtgatcattccgcaggcatattcaccggatgatggtactttctattttgaactgccggatggaactgcaggaaatcttctagttgatctgtctcccgatggatcagaaggtcagatgacgtattccggtactattggtggtgtggatgagaatgagctgttcgaaaaccttccttatgcgggctaaaaaacacttgcaatagaagaaatgcagcgttacaataggtaggacaattgaaggcaggggagcttgtatgacaggctgagaggaaggtagaccttcgaccctttaacctgatgcggataatgccgacgtaggaagtggatatgattttttgaggcaccgcattgagtggtgcctcttttgggcaaagaatacagtattttctctgtacaacaaaggagtgtaggaacatgaaaaaaattacaacgaaaaaaatggcattaactgctatgcttgcgtgccttgcatttgtactgaacacatttgtatattttccggctatggcaccttttcagcattttgttgatgtgctggcagctgttctggtaggtccctggtatggatttgcggcatccttgctttgtggaatcatgcggatgatgtccggcagaaccattcaggcggtaaccggggcaatctttggacctgttcttggtggattgatttatcggaaaacaaaaaatgtctacctggtatttgttggtgaagtgtttggaaccggagtgatcggtgcctgtgcttcttatccgctgatgaagatgttctatggactggatgctcagtctccgttttactatattccgttctatacaccgtcagctattgtgggagcagccatgggtgtggttgtagttctgatcctgaagaagacaggggtgctgaaccgcatgcagaatgaactttcataggaggaagacaaatgaccaaatttgcagaggtactgcgtaaggttcatgaaatggaaccgcgtgtgcagtgcatcacgaactttgtgacggtcaatgactgcgcaaatatcattctggcggcgggcggaactccgtccatggcagatcatattgatgaagtggcagaagcattgtcctgcgtacaggcgctggtatgtaacatgggagccatcgcattgacggattctatgattgtcggtggaaaagaggcaaaccgacggaagattccggtggtgctggatccggtagcagtaggtggcacacagcttcgtagagatgcagcaaagagactgttgaaggaagttcattttaccgcgatccggggaaatgcatcagagatccgctacctggctggtcagcagaccacaggtgctggcgtagatgtaagtgatctggatgccatcacagaggaaaatcttccggaagctcaggagatgatcaagaatcttgcaaaaagtcttggaacagtgattgcagtttccggagtgatcgacctggtatccgacggggagcgaaccatggttttgagaaatggatgcgcgaccatgtcacggatcacaggaagcgggtgtatgctgacttccatgatcggtgcatttgcaggagcggctgcagaggatccatttacagcaacctgtgcggctatggcggctatgggaattgccggagagatcgcagagaaaaagagaataaaaaatggcacgggaaatgctactttccgtacagatttgatcgatgcggtctttaatctgacggaagaggaacttacgaaaggggcacgttatgaaattttctaaagaagagatacagaattccatgctgctgtatgcagtcactgaccgtatgtggctgaaggatggagaaggactgacagatgtatgcagaaaagtactggagaatggtgcgacgtttctgcagatccgtgaaaaagatctggatgaaaataccttcgaacaggaggcagaggcactgaaagagctgtgtgcctcttacagagtaccttatgtagtcaatgacagtgtagagattgccatggacattgatgcagatggtgttcatgtaggacaatctgatatcaaaggacgcgacatccgtgcgatgatcggaccggataagattctgggaatctccgcaggaacagtagaagaagcacaggcagcagaaaaagccggtgcagactatattggagttggtgcagtatttggcacaagcaccaagaaaaacgccagaaatctgtcgctggagaagctgcaggagatcagcagttctgtaagcattccggtggtagccattggaggaatcaatgcatccaatctgatggagcttgcaggcagcggagtagacggtgtagcggtggtatctgccatctttgcagccaaggatccaggtcaggcgaccagagagctgaaagtgctggcacagaaaatggtggaacatgaataaaaaatacgcaatctttgacatggatgggaccctggtggattctatgggatactggaaacgtctggcaggagaatatctggagactcatggggtcctgaatccaccaaaggatattctggagaagatcaagcctatgactatgacggaatcagcagctttgtttatccgtgaatttggacttcagggaacgccggagcaggtggcagatgatatgaatgccatgatggatgaacattatcgcagtgacatcccattgaaggcaggcgtaaaggagtatctgacccggctgagagacagaggcgtgcgtatgtgtgtggcatccgctactgcagaaccgctgatggaagcatgcttgtcccgtttgggtgtcagggaggattttgaattcctgttgtcctgtgagaccgtaggagcaggaaagcatcagccagatgtgtatctggaatccatcaggcgcatgggcgcggaaccgtcagagacagcagtttatgaggatgctctttatgcagcgcagacggcaaaagaggctggattctatgtggttggtgtctatgacggcagtgtgacttattgccatgagccggatgatcaggaagaacgtgatcgcatgtggaacgagtgctgggaacagttgaaacagttgaccgacgagtccatcctggactggaaaacagcagaataaagagttgaaaatggttccggggattacctccggaaccattctttcataacgtcgtagatctgaactaactcatcttctttgataatataaggcatcatggtgtacatgcaggtcaggaacggacggctgaaaacgccgcgttcataggcgaactgctggaagccttccagggttgccggatcgtagacatccacacaggtacaacctcccatgatacgtacttcccggatacgtggatcggtaaagccatccatttcacggtgggagatctctgtgatccgatggatcttgctcatataatcttcccgttcaaagatttcaattccttttaaggcaacggcgcaggccagcggatttcccataaaggtcggtccgtgcatcagcgctttccggtcatcatcgctgtaaaaggcatcgaagaccttctggttggcaacagtcacagcatgaccaaggtagccgccggtcagggctttccccagaaccagaatatccggcagaacttcgtctgcaacaaatcgataaccagttcttccaaatccagtggcaacctcatcaaagatcagaagtacatcgtattcgctgcataattcacgggcacgcttgagaaaagaaatatcatacatccgcatgccaccggcaccctgcaacagtggctctacgataaagcagttcagctgatcgtgataggctgcaaaggcctcttccagtgcaggaatctcagttggaatatggatcacaccttcttttttatcaaatgcgaaatgataatcttcatcatcccctacttccatagctttgaaggtatctccgtggtaggcatgttccaaagctaatatcagcggacgttttctaccctggttagtgttgtactgaagcgccattttcagggagacttccacagctacactgccggagtcggagtaaaaacagtagtttaaatcacccggcagaaagctttccagcttttgggtcagcttctgtaccggctcatgggtcaggccaccaagcatcacatggcagaaatgatctgcctgttccttgatggcagcagtcagttccggatgtttgtatccgtggatcatgcaccaccaggaggagacagaatcaatcagcttctgatcctcagtatagagatagactccatcagcatcaacaattttataaggagccttcatggttttcatttgttcgtaaggataccagatcataatgttacctcgtcataaagttcactgagtgtcgcagcatctatggaaagagaagtatcgccatcacagacttttgcaagagtgggaaggcctgtcatatgctcacacataaaaatattgtcttcctccattacattgcctgggtggcagtgattgaagattattcccttgagaggaagatcatgtgctttcatatattcaacggtcagcaccacactgttgatggttccaagacctgcatcagcgatcagaatgctggaaagatgaagttcttttactacatcttccagctggatcctggcttcgtcaaagcagatggggcataggataccgccgctgccttcaacggtcacataatcatagttttcacagacctgagcaaatccctttttcactacattcatctgaaccggatgtccttccagccgggaagccagatgaggagagtaagcatgctcatatacataaggacacatatcttccagtcgctgagtgatgccggacatagtctgtacacagagtgcatctccgggaatcagagagccgtctgctctgcggtcatttccactcatggcagctttgtagtaggccggatgtagaccgacttctgccagttttttagtgatcagaccggtaatataggtctttccggtgtctgtaccggtacctgtaataaagagcgctttgctcatggctttatgcctccttccagtaatccggtgttacatcgcggccaagatccgtgagcatctgacgatcacttcggatggtagcacaggcaaccgttgtcagcatatttccggtaatggtagcagaagccccggacttgaaggcaatttcaccgtcgttggtcagaagagcacgacctgcagccagacggatattggcatcgggattgatataacggaataatgcgatggtacgtaaaatatcttcctcagataaacgaggcagattttccagaggggttcctggaatcggcatcagtgcattgatgggaatggaatcaattccaagttctgccaggctgatagccatatccaggcgatcttcccaagtctcgcccataccgatgatacctccggaacaggcacacataccttctgctttgacttttttcaaagtctcgatcttcatatcataagtatgtgtggtacagatattcgggaaattccggcgggaagtttcaatattatggtgataactggtcacgcctgcctcgtggagccgatgaagctgatcagcagagagaaatcccatggaagcgcacagatcgatcttacattcctttttcatggtctcgtaagcatggatcgctttgtcaaattcctttcctgtcaatgcttttccagcagttacaatggaaaagcgatccacgccttcggactcattgagcttgcacagctccacgatcttttcttccggaagaaaatcatagacttcgcaattagtgtgatgatgggcagattgtgcgcagtatttacagtcttccggacagcggccgctgcggccgttgatgatggagcaaaggtctactttattgccaatccgtgcttcacggatctgatcagctcctttacataaatcgtcaagatcacaggtgaggaagaaggacagatcatcctcgcgggtcagtcttcttccgtcaatgatctcctgggctaaagtcagtatattcataaatattagtctcctttgtgataaatcgtttgcgatagattattttcgttccggctttacagttccagtactggtttgatccgctttaccagaactgcagcaagaatgcttaaggcaatgtcgcctggaactgccaggataaagcagtacaggaacaacggccatacaccgattggtgtgttgattacgtaattgcagattacataatagtagatcatgccgcatgcatagactaccagaagtcctgccagattagctgcaagatagtgaagaactgttttctttttcatatgttcagccagatatccggttaaaaaagttccggcacagaatccgatcagataaccaaaacttggtttgaagatataccacagaccgccgccttcgctgaagatgggaagtcctgccagtccaaggattacataagcgattacagacagggagcctctgcgggaaccaagcagaagaccagccagcatcgtaaataaatattgcagggtaaagggaactaccggaatgggaatcttgataaatgcgcccacagcaatcagggcggtgaacagtccgcagtagatgatagattttgttttcgtcatttgtaaacctcctgaatcattacggttcacaattataaaagataaaaaataatgtgtcaactaaaaaatatatatagttaacaaatgtaatgacggtggtgttcagaatgatagaagttgttgcttgacggagccagggagactgcgatatattcagagaagaatgagatgaaatgcaggctttactgattgatatagaaggatgggagatacagatggaacgattgttaaaacagatagaagcgtataagccatgtaatgagcaggaagagaaagaccgggaattgttgattcaatggatcagaagtggaagggatattgtgaccagagccaatgagacagcgcatctgactgcatcagcatgggtggtaagcccggatcggaagcatgtgctcatggcttaccacaatatttataactcctgggcatggctgggtggtcatgcggacggggaatggaatcttcagaaagtggcgatccgggaagtggaggaagaaagcgggctttcacaggtcacaccactacaggaggcaccagtttcactggagattctgactgtggatggtcactggaagcgtggaatgtatgtgtcctctcatcttcatctgaacgttacctatcttatggaagcagatcccaggaaaccaatacgtaaaaagccggatgaaaacagtgcggttgcatggatcccggtggaagagatcggggaaaaatctacggaaccttggtttgtggaacatatttattctaaactctgtaagaaagcattgactttacaatagatgtagggtttaaaatcaggaacggaagaaaggagtcttttgtacttttatggaaagaaatcttacatctggaagtgtatttaaaaatattgtgtatttttctctgccttatctgttgtcttattttttacagactttgtatggtatggcagatctgttcattattggtcagtttgaaggtgtggcaagcactactgcagtatccatcggaagtcaggttatgcatatgatcacggtcatgattgtaggacttgccatgggatcaacagtcatcattgcgcaggcgatcggaggcggtgataagaaaaaggcctcccagacagtgggaaattcggtgactttatttcttggtctggcgatcgtactggcagtcgtgctggtgacgttggtatccccaattgtgtcggtcatgtccactccggcggaagcagtagatggaacgaaactgtatctgaccatctgttttatcgggattccgtttatcactgcttataatgtgatcagttccatttttcgcggactgggagattctaagagtcccatgtgttttattgcagtagcatgcgtggtaaatattgcccttgactatctgtttatgggatattttcatctgggaccggcaggagcagcacttggtaccacaatgtctcaggcattcagtgtggtgctggcgctcattgtgatcataaagaagcagtctggcatcactttacagaaaagtgacctgcgcccgcagaaagccgtgatgggacagctgttacagatcggtatcccggtggcactgcaggatgggtttatccagatcgcgtttattgtcattactattattgcaaatcgcagaggtttaagtgcggccgcagctgttggtattgtggagaagatcatcagctttttattccttgtaccgtcttctatgctctctacagtgtcagcactctgtgctcagaatattggtgctggaaaatatgatagggccagggcaacccttcgctatgcattgatgatcgcagcaggatttggcataatcgtatccatcgtgatccagtttattgcggagcccgtagtaggactttttacaacagatgaagtggtgaagacaatgggaggtcagtatctgcgaggttatatctttgactgcgtatttgccggtatgcatttcagcttcagcgggtatttctgcgcatatggaagatcagaattttctttcctgcacaacattacctctatcttgctggtgaggattccgggcgtgtatctgacatccaagctgttcccggcaagtttgtttcctatgggaatcgcaacggtctgtggatcactgttatccgtgatcatttgtctgagtgtgtttgtatggctggaaaagcatggatgggagagaaaatatcggaatggaagataaaaaattattttggatcagtgatgtggcaaagatgttccatgtcagtgcaggaaccctgcgacattatgaacaggcgggattgctggcaccggaatatacggatcctgacaccggatatcgctactatggaatccggcagtttgaagtgctcaatacgattcgatatctgcgagtattggatctgcctctttcacagatcgctgagtttcttcagaaccgggatacagatgtgatcgaggaaaaattggaaaaacagaaagccctgattcaacagaaaaagcgggaactggagattatggaacgaaagatcgatcatcggatcgagcagatccgagatgccagatgctccagattagaagaaattcagttgaaaatatttccggagacacgtatggttctcttaagagatccggtgcgaccaagatcctatctggatctggaaatcgctatccggcagatgcaaaaaggacagtcggaggcacaggtatttttaggaaaagtcggtgtgggaatttctaaagaacatttaagagaaggaagttttgaggtatatgactgggtcttcctgatcctggatgaggaagaccattatgacgggcagacagagctgctgacttccatggagtgcgcaacgatgcgcttccgcggcggacatacagaagcaccacggtactatcaaatgcttcttaactttttgaaggagaagcatctgatgccggcgggcttttctcaggaaatcacattgatcgatgacggcatgaccagtgatcctgaaaaatttgtgactgagattcggttgccggtttgcacggcgatgaatcgataaattacattaagcagagcatcttccgaactgagaaaccagcatggttttatgagtgttaaaacaacaagaagtaaaaaaatgtcaagggttgattgattgaaaaatctgattgacaaaaaactaaaagtatcataaaataaaactaacatctgagattcttatgcgtaagcatatccggcgattcgccgagttttcagaagggaaaaactgaataaaggcgagctggatataatgagcgaaagtgagtcagagagagatggctctctcttgacgaacggcgaaattatagagtgataaaatcacgatatgctgaaagcaggggaagttatgaaatattttccagaatcgccgaagggggattatgggaaaaaaagaaccaatatatgccatacaccagatgaacgtctgttggaactgaaagaaaatgtacaaaatgaagatggaggaatcaatatgtgtggagccgtagatcagatgattgcagaaggaatggagcg

SEQ ID NO: 2084 - DNA, 25071 bp, Unknown
  16S sequences of unknown bacteria
aagcgcccgcccccgcccgacgttttccccaccgactcatgagaaggacagggtgatcctatgcagcccggactcggaacggccccccgccatcgcggcgtcagctacgccaaatggggctatctcttcatcgcacccttctttatcgccttcgccgtattccagctgattccgctgttttccacggtatattacagcttctttgagcactaccgcagcgggctgaaaatcatcggtccgaacttcgtgggcctggagaactatgcgcgcctgttttcggcggatctgcccaagtattttggtaacacgatgctcatgtggctgatcggctttgtgccgcaaatcgtgatatcgctgatgctggcggcctggtttacggacgtgcgcctgaagctgcggtgccaggcgttcttcaagaccgtcatttacatgcccaatctcatcatggcgtccgccttttccatgctgttcttcaccctgttttccgacaacggcccggtgaacgcggcgctgatgtccatgggcgtgacgcaggagccgttccgcttcctctcctcggtcgcgggaacgcgggggctggtggggctgatgaactttctgatgtggtttggcaacaccaccatcctgctgatgtcgggcatcatgggcatcgacgtgagcctctttgaggccgcggagatcgacgggtgcacctcgcggcagaccttctggcgcgtgaccctgccgctgctcaagcccattctggtctatgtgctggtaacctcgctgatcggcggcctgcagatgtttgatgtgccgcaggtgctcaccgacggcaaaggcacgcccaaccgctgtgccaccaccctcatcatgtatctcaacaatcacatgttttccaagaacctgggcatggcgggcgcggtatccacggtgctgtttctggtgtgtggcgtgctgtgcgtggtgattatgcggacgatgagcgacgatgtgcgcaaaggggggcgaggaaaatgacccaggctgtgcgctcgcgggaagattcccgcgcccggctgaacctcaggcggacgctatgctatgttgtgctggcggtgatctgcttcctgtgcctgtttttcttctacgtgctggtgatcaacgccacccactctcattttgaggtgcagaagggattttcgttcctgcccggaacctccttttccacaaaccttcacaacgccctcaccgacgcgaacattcccgtggtgagcggcatcctcaacagcctgaccgtctcggcaatgtcggcgctgctggcggtgtacttctccggcctcaccgcctatggaatccacgcctattccttcaggctgaaaaacctggcgctgacctttatcctgctcattatgtccatgcccacgcaggtatcggcggtgggatttgtcagcctggtcaccggcatggggctggatgactcgctcatcccgctgtttttgcccaagatcgccgcgcctacggtgttttacttcatcattcagtacatgaagggaaacctgcccatggagatcgtggaggccgcgcgcatcgacggctcgggcgagtttcacaccttcaaccacatcgtcctgcccatgattaagcccgccctggcggtgcaggcgatcttcacctttgtgctggaatggaacaactactttgttcccgcactcatcatcagctcaagccgcaaaaaaaccctgcccattctgatcgcccagctcagaagcgcggactttctcaaattcgacatgggcaaggtctacatgttcatcgctatcgccatcgtgccggtcatcgtggtctatctgctgctgagccggttcatcgtggccggggtcacggtgggcggcgtgaaggagtgagaagatgagcttcccaaaggagtttctctggggcgtggccacctccgcctatcagatcgagggcgcggtcggggaagggggcaagggggcgtccgtgtgggaccgcttttccaaagtgcccggacggatcgcggacgggagcaccggcgagcgcgcctgcgatcatttccacctgtttcgggaagatgtggcgctgatggccgacctgggcatcccctgctaccgcttttccctctcctggccccgcctgctgcccgacggacgcgggcggctcaaccccgacggcgccgcgttttatgaccggctgattgacgcgctgctggaaaagggcatccgccccttcgtcacgctctttcactgggattatccctgcgcgctcgccgtgcgcgggggctgggcctcgccggacagcccggaatggttcgccgactatgccgccctgtgcgcgcgcagctttggcgaccgggtgctggatttcatcacgatcaacgaaccccagtgctttatcggcctggggcatgccaccggcgagcatgcgccggggcttaggctgccaccctcggaaaccgtgcccatgggacaccatgtgctgcgggcgcatgcgctggcggtgcaggcgctgcgcgcggaagcgcccggatgccgggtgggatacgcgccctgcggcaaccccgccattcctcagaccccggcggatgtggacgcggcgcgccgggcctatttctccatgccgcgggatgcggagcgctggtactggaacgtatcgtggtggagcgacccggtgatgctgggccgctatcccgaggacgggctggcgctgtacgggcgctacctgccgccgggatgggaaaaggaccttgacagcatgtgccagcccctggaatactacggccagaacatctataacggctatcctgtccgggcctcggacgcgcccggcggatgggaggaagccgccttcccgcagggcgcgccccgcaccgccgccggatggcccgtcacgcccgaagccctgtactggggcccgcgctttctctatgagcgctaccgcacgcccatcctcatcaccgaaaacggcatgtcctgccacgatgcggtatcgctggacggacaggtgcacgaccccaaccggatcgattatctttcgcgctatctggccgcctatcgccgcgccgcccgcgacggcgtgaacgcggcgggctactttgcctggtcgctgatggacaattttgaatggagcctggggtatacccaacgcttcggactggtgtatgtcgattaccagaccctccggcgcatccccaaggattcggcgcggtggtacgcggagaccatccgctccaacggggagcatgtggggcgggtggagccggtttccgaggaaaacggctgatgcgctcctaacgccggacagacgggcgccctcctgcggatgggcagcgcccgcgcgcgcttcttcggccacggctgcggaagcgctttttttatgcgcgccgggggatacgggttcggatcgaggagggggtgtgcgcggcgcgggaaggatgcaaacggctgaaaggcgcatgccgccgtttgcgcgggggatgccccggcggtcagggaaggcggagcaggccccaaaacccgaaaggcagagaaaaattccgaaaaacaaactggtaattttgaccggcttctattataatcgattataattgattcatccaaaacctgagtctcccggcgatcacaggaggtgtgccatcatggagctgctggatgagatttctcagcgccttcagcagggcatgaccggggaggtcaagcggctggtgcagcgcgccatcgacgagggcgttcccgcgcagaccatctgggaggaggggctgcgcagcggcatggacatcatcggtgaaaagttcaaaagaaacgaggcctttgtgcccgaagtgctgcgggccgccggcgccatgaaccaggccgccgcgctgctcaggccgctgctggctgccagcgggggaaaagccgccggcaaagtgtgcatcggcaccgtccgcggcgatctgcacgacatcggcaagaacctggtcaggatgatgatggaaggcaagggcctggaggtggtggacctgggaaccgacgtcgccccggaaacctttatccaaacggccaaggagcaaaactgccaggtgatctgcctctctacgctgctggcgggtaccatgggcgtgatggaagaggtcgtcaaggcggccgaggccgccggcatccgtgaccgcgtcaagatcatggtgggcggcgcgcccgtgacggaggcgttctgccgccgcatcggcgcggatgcctacacccctgacgccgcaaccgccgcggagatcgccgttcagctctgctcctgatccgctcgccacctggtccggacgcggcaaaggccccggcctttccggcgccgggccggcgacattcctgccttttttcaggcccttccgggccggccgggaaggagaacacacatgagcgatacccgtctgatcgaagccacgctggctgccggagcggccggggcagtcctcatcccccagcggcagatcgtattatccgcggagttccgcagaatctgcgaaagcaacggctgcggctactatggccgctgctggatgtgtccgcccgacacgggcgacatcgaaaccgccatggcgcaggtacgccggtatccctgggcgctgctctaccagaccatcggcgccattgaggacagctttgacatcgagggcatggaggagcgcgccagggagcacgcccgggtgagccagcgcgtacagcaggccgtcaggccgcttttgcaaaggccgtttttgcacctcggctgcggcgggtgccgtttgtgcaggacctgcgcccggcgcgacggcgcgccctgccgccatcccggtcaggcgctgccctcgctggagggcagcggcgtggatgtgtacaacaccgtcaaaggcacgtccctgaaatacgtcaacggccgcaataccgtcaccttcttcgggatggtgctgtgggaggcgtagggaacggcgcggggccggcgcgcggggatgagccggggtaagcggtaccatgctgcaaaagcgtagtccggcttagccggtcttttccgacagatgcttaagaaatgtttgtgcccgggaacgcaaactcaccgcctgcctggcaaagtcgggcgatacgaattcattttggagggcggtcgtcctcgcttcaggtttctgacagagtgcggggtgcagggacctcatcatttgctcaatcattcgcgctctcctgacggtcgcgttgatggtttcgctgccccgctgtgagtcgttttgggccttcggctcaacagcccacagtgctaccgcttccctccgtgcctgccagagtttggggcagggccccaagcccttatgtcgaaacattttccgcgagcgttgcgagcgtccgaaggacgcaagaaacgtggctttctccaaatgcgtgggtttttaacagtctgaagctggggcgcagggggatcatccccctgcgccccagctttgcagcagtctgaatcccgcctgggccagtcgggattttttgttcatggggagacacggccggcaggggcccagggcccccggcgcgaggccccggaccgggcgcgtctcagccgcgcgggtccgcctgtcgcgcaaaggtcgccaggtcgatggagcgcccgccgtccagccgcgaggcctcggcggcgagggccatcatatggctttccaccgaagcgtcgatggaggtgggcgcggtggtctcgctccggagcatcaggcggcacagggcatccatgatgccctcgtctccgccgccgtggccggacattccctccgccccggcaagatcaatcacctcgtcgggctcaccgaagcggcgaaccgtgatccggtcggaaagcatgtcgccctccagctctcccatggtgcccatgatgcgcacggtgcggtagcagcgctgggcaaaggccgtcatggtaaaggtggcggttgcgccgctggcaaaagacatgctcaccacctgatgatccaccacgtcgttatcgcagcggtatacgcagcggccatagggcccctcgcgcagggctttgcgcacgctctcctcggtgggctcgtgcaccagcaccgatacgggccagccgctgtttccatgcagcaggccggtcagcgggttggtgagatagattttttccgcatcgtagggacactgcgcctttggcgccccgcagtccaggcagcgcccggcgcttccctgaggtgcgttggcctcggtaaagtgcccgaggcggccgaaggaggacacacgcacacagcgctcgcccatcagatagcggatgatgtccatgtcgtggcagctcttggcaaggatcatggggctggtctcctcgctgctgcgccagttgccgcgcacaaagctgtgggcctgatgatagtagcccacattttccacggcatccagcgtctggatgacgccgacgacgccctgatcgatgagctccttgagcctggaatagaatgcggtgtagcgcagcacatgacagaccatcaccaggcgcccggttgcgtgggccttgtccagcagagccatgcagtcgctcagctccggagaaatgggcttttccagcagaagatgatagccgaggtccagcgcggccagcgcctcgggcacgtgctggcggtcctgtgtggcgataatcatcacatccgccaggcgcgggcgggccagcagcgcctcggcactgtcaaagcacagggccgggtccaccccatactcctggcgcgcggcggccaggcgctgcggcacgggatcggctacggccacgattttcataaggtcagggtgcgttttctggtagacggcataggcatcccggccacggttgccaaacccacaaatggcaaaagtaatgggctgattcatcctctgacactcctttgaaccaaggaaagagctccttatgcacttgacggttgaaaacggacgatggatgctacgaccatcgttatgatagcgtcgggccggcggtttgtcaaatggcccggcacgggggcggaaaagcgccaaagcccttctgccgccggggctcgcggcgcccggcgcgctcaggcggacgcgcggggccaaaaactttccggggaaatgataaaaatatccgcgttgccgccggtgtgacggaatgttacaatacaggcgaatggtacgtaccggaagcgaaacacaactgaacaggcgtccaacgggcgctttgccccgttggaaacgggccgccaacccgatggttgccgcccgcagtcaaggagggaatgaacaatgaaacggatctggagtctgctgctggccgcggtgctgctgtgcgcgctgtgcgcccctgcgatggcgcaagaggaaaagatcaccctggaattctgggaaatgagctacggcaacgacgaccgctataccgagacctgtgaaaagctgattgcccagtatgaggcggaaaatcccaatgtgaccatcaacatgacctatcagccctgggataactactatcagctgttcctcacggcggtttcctccggggcggccccggacgtggcctcctgtgcgatcgaccagccggacctgtttgcccagatgaacgaaatccagtacctggacagcgtgatcgacgagtggaaggaagagggcatctacagcgattacagcgaggacatgctcaacttcttcaaatatgaaggaaaccagatcgccattccctacatggtcggctaccgcggattcttctaccgcaccgactatctggagcaggcgggcgtggagaaggtgcccgaaacctgggacgagctgctggatgcttgcgccaagctcaaggcgtggaatcccgatatcgtgccgcttgccctcacgggcgcaaccaacggcatctggcactgcttcatgagctttgccatgagcaacggcgtgggcatcgtggatgaaaacctcaagcccacctccgagagcgaagcgttcaagcagaccattgatttgttccaggaactgcgcgagggcggctatgtggccgagggcgtgctgggccatgacggcgcggcggccgaaaccctgtactacagcggcaaggcggcgttcttcttcggcagcttcggcaccaagatctacgattaccccgaagtggccgaaaacagcgatgtgctggcctgcttccaaggtccttccggcagcgagatttctaccgtgagcttccctgacgcgctggtggtattctcccagacggagtatcccgaagagtcgctgaagtttgtgaagtggtgggcggaaaacacccagcccctgttcaccgagggcggctgctgggcatacccggccaaggcctccttcttcacgggtgaggtgttctccgacaaggtttctcagggcgtgctcaacaaggtcctgcccaccgccaagaccgcgacctggcccattgagggaatgttccccggtttctcgcagatcaacggcgagtatatcatgaactacgcgcctcaggcggcactcaacggcggcatgaccaccgatgaaatcgcggccgagcaggcacgcatgatccaggaagcgctggacaacgccatggaatgaccgcgcgcaaccgccggagggcacagggaagggacgttccttccctgtgccctccgcgggatagccgcggccgcctccggcggtgcacggttccccgcgccgaaggaccggcgccctgcgcgcggcccttgtaccggctcatgcacaccggccgctttgggccttcggcccgacggcccgcagggaatgcgttttttacggcgcggccggagatacgcacagggccgccgcacatgccgcgaaactgggagtttccccgtaggacggcagccttccccaaagagatgtctgacagcctgccgcggggaagccgcggtttccttaatttacgtgaaaaaaggcacgctccgcgcgggccggtacgtttggcccagggaaccgctccggcggtccgtgggcggcaaggaggtactcatgaacaggcagattcgccggtgcgccctgtggatgatgctgcccgcggtgatcctggtgctgtttgtaagcctgtatccgctgctcaacagcatacagatgagctttaccaacaaaaacattctcaaacccaacgcaaccaaatttgtggggctgagcaactttgaggacatcctgacggacccggaattttatgataccatacgggtgtccctcatctacgcgctgggctgcgcctttgccagctatgcgatcggccttggcattgccacgctgctcaacaaggagatccgattccgcggcctgtttcgggcggtgctgctcatcccctgggcgattcccacggtggtggcggcctccaactggtcttacctgctcaacgaccagtacggtcccatcaatacctggctgatgaactggggaatcattgattcaccgatcctgttcctggcggataccagcctggtgctgtttaccgtggtgctggtgggcacgtggaaatcctatccgttcatggcgctgtcgctgctggcgggcatgcagaacatcgaccgcagcatctatgaatccgctcagattgacggcgcatccgggcggcaggccttctggtacatcacgctgccggggctcaagcaggtcagcctggtggtgacgacgctgatgtttatctggggattcaacaatttcgatatcatttttctgctcacctctggcggaccgctcaatgcgacgcgctccctgtccatctacacctacaacctggccttctaccgcggacgaatggggtattcggctgcaatttccctgattaccttcgtgctgatgatcggcttctactggggataccagcggctgctcaaactggatgaaaggaaggtgagctgaatggacagggcgaagaagaagatccgccgcgtcctgctgtacgggctgatcatagcagtgtgcctgctgaccaacctgcccatgctttccatgctgggaaccgccttcaagcccaccgatgaggtgatggccaacaccaacctctttactaccaacccctcgctggacaatttccgcaaagtggcggagaagacctcgtttccgcatgccgtggtcaatacctgcatcgtggcgctggtggtggcgggattttgcgttacatttgcctccatggccggcgtggcgctttcgcgctcgcggggcaagcttttcgggggctttacgatgctgctgctcgttttgcagatgataccgggcattctgattatgattccgctgttcagcacgctgcgcgcgctcaagctggtggatacgcatttcagcctgattttcatctatatctccaccaacctgccctttggcatcctgacgatgaagggcttctttgacagcattcccacggagctggacgaggccgcaatgatcgacggcgcttccccctaccagacgtattggaaaatcgtatttcccacggcgattccggggatgatttccgtggcggtgtatacgctgatgagcgtgtggaacgaattcaccatcgccaatatcttcattcagtccaccgagctgcagacgctgtcggtcagcctccggcagttccagctgcaaaccaccacagactggggggcgctgagcgccgcggcggcactggcctgcattcctgcgttcctgttcctgatcgtggtgcaaaagtacctgatcagcggcatgacctccggcgctgtcaaagggtaaagaaagggggattcctcaatgcttcgctgcattcccacctgcgaccatcccacggtagcctttgcctgcaccgagctgacccggcactgggacctgcttagacccgtgtggcagggcgcggaccccatccttcgggttgggccggggctggaaggcctgccgccggtgaccgaccccgaacgcgacgacgccattgccatctctctgggaggggagggcggcggcgtggtcacgggcaccaacccgcgcagcgtgctgatcgcggcgtaccggctcctgcacgagcttggcttctggtttgtcaggccggggccggaggggacgctgctgcgctacaacggaaagaccgccgtgcaggtatccgaggccgccagctaccgccaccggggcttctgcattgaaggcgcggtcagctttgaaaacgtgctggagctgattgactggctgcccaagggcggattcaacacctatttcacccagtttttgacgccctatgaatttttcaagacctggtacgcgcatgacaacaatcccctgctggcgggcacggaaccggtgccgacggtggaggaggtggaccgctttacctatgggccgctgcaggaggagctgaggaaacgcgacctcatcttccaggcggcaggccatggctggaccaccgccgccataggcatcgacggcctgggatgggacgaggcggaggagcccggggagcgctaccgcagctggctggcgcagattgacggcaggcgcgcgctgttcaacgcgcggcccctcaacaccaacctctgctattccaatcccgaggtgcgcgaggccctgaccgaagaggtgatggcctttttgcggcggcatccgcaggtggacaccattcacttctggctggcggacgacagcaacaacacctgcgagtgcgaggcgtgtcaaaaggcggtgccctcggcgttctatgtggatatgctcaacctgctggatgaaaagctcacccgggcgggcctgaaaaccagggtggtatttctggcctatctggacctgctgtggccgccggaggggcggacgctgaaaaaccccgaccggttcgtgttcatgtttgcgcccattacgcgctcctactcggcgcctcttcccacggacgcgccggcgaagtccctgcccccctttgtgcgcaaccacctgaccatgcccgccgacgtgggggaaaacatcgcctttttgcgcgcgtggcaggcatgcgcgccctgcgacagcttcatatacgaataccattatatgtgggaccagttcaaggacgtcagcgactatgccaatgcgcgcgtgctgtggcaggatgtgcgcaacctgaggcagctggggctcaacggctacatctcctgtcagcagacgcgcgtgttctggccctgcggatttggcatgcatgtgctggggcagaccctctggaaccgggagacggattttgaggcgatggccggggcatactttgaggcgctgttcgcaagccgcgccgggcgggtgcgcgcgatgatgcaggcggcgcggcgcttccatcccgaatgcctgcggggggagcggcccatccgggacgcggccgtggcggcggattacgcggcgcagcgggcggacagcctcagggacagcgcctggtgcgcccaacaggcccatggggcacagggcgtcgaggccgcgctgtggcaggcccttgtctactggtgtgaattctgcgcggcctacgcccactgcctggaggcctgggcgcgggggctggaggatgagcgcgaaatacggctggccgggctgaggcaggttgtgcgcataggcgagccggcgcatcaggagatgctggacgtatactggtttctcaaaacgctggaccggaccgtcttgcctgtgctatgaaggggcggcatgcgatgcgcggactgggcgcaagggtgttggcggcgctgcgcgcctgcgggctgggaccccggctgctgacgggctttctgctggtggcgctgctgccgaccatcgccatgtgcgggattgcctatgtgggggcgcgggacgaaattctcatggccgaggagcgctcatcgcttcgcatggcgcaatacctgcgcagcgagctttcctcgcttctgagcagctacccggccaagctcaacaccatcgcctccgacatggcggtgatccggctcatccgcagctaccgcaaggcggacgcggtggaggccaaaagcctgcaatacgcgctgatgagccgcctgatcagcgaggcggccagcctgcgcggctttatgagcgtggaaatcgtgaccgataccggcacgcccatcagcaagctgccctattcgatcatgaacgaatcgctctttgcgcgcatcgagggcgccaacgaaaagtttgcgttctgggtcgggcggtatcggtggggcgatctctaccccgaagcgtcgctgagtcagcgggaccggaccgtggtgctggccgcccgccgcatcctggactatgcgaatgtgaagctcctgggctacatcgtcatcagctttgactgcaccgagctggaaagcctgctgccgtccgacgcgggggcgcagatcatgatcagcgacgagcagggcgccgtgctcgccggcgtaggcgacacgcaggaaaacctcgcccttctggcgcaaacgctcagccggcaggcgctgcccgaggagctggagagccggaccatgaaccacaaggacgacagcaatctggtcatcaccgggcagattgccgccagcccctaccggctgacgctgtccattgcgtacaggcagattttttcggggctgacacggatgttcacggtcatcatatcggcggcggtgttcattgcgctgatgatgctgggcatcgcgtggctgttgacccgcagcgtcacggtgccggtgacgcgcctctcgggcgcgatgcgccgctttggcgcgggcgagtttgaggcgcggatcggagacgccgcgcacgatgaaataggcatgctgtgccgggagtttgacgacatggccggccgcgtatgccgcctgaccgagcagctctgcgaggcgagggccaaggaaaaggaagcggtatataccgccctgcaggcgcagatcaatccccattttctctacaacacgctggacatgatcagctggatgggctatggcgcgtccaacgcggatatctgcaaggtcgtggcctcgctttcggacttcttccgcctcagcctcaacaagggggaggacagctttacccttgccgatgaactcaaccatgtgaaaagctacatcaccattcaggaataccgcatgcgccatattcagtttcgactggaggcgccccgggagctgctgaacctgcgcgtgcccaagctcatggtgcagccgctggtggaaaacgcgattctgcacgggctcaggccccgcaactaccgcggacacatcaccataagctgcgcgctggaacaggcgtacctggtcatccgtgtgatggatgacggcgtgggatttgacgaaaagctccttggcgaacgcacggaaaaaagcacgagctatggcctgaaaaacatccgccagcggctggccgtcctctatgacgatcggggaagcctggagattgcgaaccggcccgaaggcggcgtggttgccaggctgcgctatcctgcggaaaagggcgcgcctgcaggcggaaagggaggggccgaatgaggattttgatcgctgatgacgaggctttcgtggtggaggggctgacgcttttgcttcatcagaacctgccgcaggtcgagatcatgacggcggacaacgggcgctctgcgcttgccgtgctccgggagcggggagcggagcccgatctgctcatcaccgatctgaacatgccgctcatggacggcattgagctcagccagcagatccgccggcgctatccgcgctgccgtatcatgattatcagcggttacgaggacttcgaggccgcgcgctccgccattgagctgggcgcgcttcgctatatgcttaagcccatcaaccacaccgagatggtggcctatgtgagatccgtgctcgaggacgtcgtgcgcgagcaggacgagcgcatccgccacagcaccgacagactggagagcctgctggtggatatgcacaaccatatgctgctggacgcgccctatggtggcgccgaacgcatcgacagggaaacgggggactactgcgccgtgcgccttgcggtggtgagcctccccggcggagaaggcgttccctcgctgcgcccggcggtggaaaaggccctgaaaagccgcggcgggccgagctatctgatccgcgccgagggcgcgcaggcaacgctgctgctgtgcgactttggggaggaggacgtgtcctggctggaaggcctgccgcaggagctggcggccgcggtgcggtatcccgtggcggtgggggtgggacggcggtgcggcgcgctcagggaggttcatcagtcctaccggacggcgggcatggcggtgtggcggtcctacctggcggatgggcatgccgtctgtttcgacgacgacctgaccgatgcgcccgcagaggaaaaccgcatggaagcggcgtttcggctccggcaggagacgaagcgcatgatggatttttatacgctggtgccggagaagcagcagctgacgcacctgatgaacacgtttctggcacagctggaacgcctcgactgcccgctgggaatgaggcagctgatgtgcgccgggctggtcatggagctgctcagcagcggctacgttccggggctgggcatggaaaacagcctggagcgatacctgcacctggagttctataccgcctgcggcagctggacgcagctccgggagaagatggggcagttcgttcaggtctacagcgcgctgctggagcgcgtgggcaacagcgggagcagccgcctggtccagagcatccgctcggcgatccatgccgatttgcgcaacgcctcgctttcgcaggtggcggacacgctgaacatgagcccttcctatatcagcatgattttcaaggaaaaaacgggacagaacttcaaggactatctgtttcaaacccgaatgaaccatgccaagcgcctgctcaggcagggaatggccatcggagaaatcgcgcggcagctgggatacgaggacacggagcatttcagccggcggtttcgcgcgcagtttggcctctcgcccatggcataccgcaaggaggcgccggcaggcccgggcaagggctgagtcgctgccggcggagaaaaggcgggctgcgatgggctgggaagccccgccctcaggccgcgcgggccggggacctcccgcggcccgcgcggctcgccgggcggcggggtgccggcagcccgccccgaatggccgggggcccggcggcttccgcggcacagggcccgttatgtggactgtccttccaacagcctgggcgtggtgcagaaggtctgcacctgcaagccgggctttttgattttctgcaccagaaagcgcgcggcctcccagcccatgtcgaacatgtccacctccacggcggtgaggcgggggatgagcagctgggaaaagggatagcggtcaaaggtcatcagcgccaggtcccgtggaatgcgcagccccagctgcatggcgcattgcaggcactccagggcgatgtggttgttggcgcacagcgccacctccggccggttttcgccggacagcctgcgccgcagctcctccacatcctcggtgtagggcgtgtcgccaaaaagcgtgtccacagtgagctcctcctcgcgcagaacggcctccatgcccttcaggcgcatttgggagatggcatcctccgggccgccgcccagatacaggatgcggcggtagcctcggtccagcagatagtttgcggccacgccgccggccagctcgtgattgacgtccatccagcagatgttgcaggggaagttcggccggccgatgaccagatagggcgcgtcggcgtggctcaggaaggcggccagatcgcgcgagagcagcgccgcgtgcagaatgacgccgtcggccaggcgctcctgcatcagctctcgcacataggcggttgcgccgcccttatccatgtgcttgagcagcaccgaatagcccttctcctccagcgagcgggtgacgccggtgagaatggcgaacatatgcggattttcaaaggagatgctctgatacagctcggtggcaaagatcacggtgccgctcttttgccgggcgaagctgcgcgcgcgggcgttgggcttgtactggagccggcgcgcggtttccagcacatgccgcctggttttctcggaaatggtgtagctgccgctcagcgccttggagacggtggagatggaaacgcccgcctcccgcgccagatcatagatggtgaccgccatggggagcccccttacttcgccgtccggacgacgagatacccgcccgccgccagccggcccgattccacgccgctctgggccagcgccgctgcgcccgccgcatccaaccacgggcgcgcgtccaccggcgcgcccgcgcggttgaacagcaccgagacgcgctcggacgcatcctcaagggtataggccagctgatcgccctgcgccacttccacgaggaagcggccccgccggagcgccggatgcccgcgccgcagggaaatcaactcccggtacagcgcgcggagcggatggtccctgccccacggcatggcctggcggtactccggctcggaggcgccggtcaggcccagctcgtccccgtaaaacacgcagggcatgcccggaaaggtcatctgaaacaccacggcctgccgcatgcgcgcctcgtccccgccgcactcggtcagaaagcggctcacgtcgtggctgtccagcaaattgagctgggcgagcatggcgggctccctgtagcgggtgagcagccagtgcagccccacggccagcccgcccgcatcaagggtgcgccgggcgaagaactgcagggccagccgccggaaatcgtaattcatgcaggaatccagcatgtcgccctgcaaaaagtgcgatgcgtcctcccacacctcgccgatgaggagcgcgtcgggctttgcggccttgaccgcggcgcggaaggcccgcagaaagccgtcgttgatctcgttggccacatccagccgccagccgtctatatcaaaggtttcgatccagtagcggcccacttcgcagaagtaggcgcacgcctccggacaggacaggtccgtcttgggcatgtccgccacataggaaaagcacgcgtattcgggcagctctccctccgccgggaggcggggatgctccggcaggtcgtagaaccagcggtagtagcgggactgccggccccgggccagcacgtcctgaaagaagggatggcggctgctcacatggttgaacacgccgtcgaggatcacgcgcatgccgcgggcgtgcgcggcatgcaccagccgccggagatcctcgccggtgccgaagcaggggtccacacggaagtagtccagcgtgtcgtacttgtgatagcagccggcggcaaagatggggttgaggtagaggcagttgcatcccagacgttcgatggcgtccagattttcgcggatgccgcggagcgtgccgcccagcagcgagcggcaggtttcgccgccgagggaggcgctttggggctgcctcgccagacagcccgcgcggcttgcgaagctgtcggggaagatgttgtagaccaccgcgtccgcggcccaatcaggcaccgtcaggcggtcggcgcggtgattgtaggcgaactgaaacccgtccgagcggtccgcctgcggcgtgggctgaaacaggccgccgatgtagtaggcggtccgggcgccgtcgcagagctcaaagtagtaggcgatgcggttgagctgcgtggtcagacgaagctcgaaccagtccgccagcgcgtccgtataccgcttttccatgggggcgcgccggtagcacagcggccccatggcggcccggtcggcataccacagggcgcagcaggtcaggtcgcccgcctgcgcgcgcaggcggaacacgtagtgcgtatcatccagggcaaaggcgtactcgctggacggcctgtgccatatcgcggcgtaattcatgcgatcaccctttcaccgagccggcggccacgccggcgacataatacttttgcagccggatgaacagcagcacgatggggacggccaccaccaccgctcccgcgcagaaaaccgtgtaatagcggtagatattggccttgtccaccatggtgtagagacccttggccacggtgtagttgtcatagttatccttcatgatgaccgatacgaagatgaaatccacccacggggcgatgaaggcgttgatggcgatattggccacgatgggcctgctgttgggcagaatgatcttccagaacaccacgctgcgggtggcgccgtccaaaatggcggcctcgtccagcgatttgggaatggtgtcaaaaaagcccttggcgatgtagtagttcatggccgcgccgccggaatagaccagaatcagcgcaagcagcgtctggtccagccccatggccttgagaaagtggtagatggcgatcatgctcatgaagcccggaaacatgcccagcaccagcgatacgttcatcagcttcctgcgcgagggaaagcgaaggcgcgaatagacatacgccaccatgaggctgagcaccgtggtgatcaggcaggagcagcaggccacaaaaagggtgttgagaaaccagcggggaaagttgaacagcgcggtatcggtaaagaggcgcacgtagttgtcaagcgtatagcttttgggcagcaggtaggaggtgtaggcccccggctccgcccggaaggaggagagcaggagccaggccaccggcaaaagccacagcaacgacagcacggccagcagcgtatggagaaaaacggacaggcgcaggttgtgccttttcatgctgcgaacattgctcattggaactgatcctcccttcggacggcgccggtgcggttatagacggcaagcgagcaggaggagacgatcatgaagatgaaaatgccgatggtggaggccagcgcgtaatcatgctggtccacggtcagcttgtagagccaggtcaccagcaggtcggtcttgccggcctgatagtagtccagcgaaaagggcccgccggcggtgaggagatagatgacgttaaaattgttgatattggtgacgaaggtggtgatggtggcgggcgcggtgataaagaccatgtagggcagcgtgatggacacaaactgccgcacgggaccggccccgtccatctgggcgctttcgtagaggtcggaggggatgttgagcaaaacgccgctgaaggtgagcatggtgtaggggatgccgatccacatgttcaccaccaccacgaccacgcgcgccagcgtggggtcggtcaggaaggggagcggcgcatcaatccagccaagcgccatcagcgcgacgttgacggctccctgcggctccagcgcccgcgagatcagcaggaggctgacgaactgcggcaccgcaatggcgatgacaaagcaggtgcgccacagctttttgagcctgaccacccggtggttgatgaccactgccaaaagcatccccagaatgtagttggtaaaggtagccagcacggcccacaccagcgtccagccgagaatcccaaagaaggtgcgggttttgacctcgttgccaaggaacacatccgttacattcgtcaggcccgtccaggtgaacagctggcccggcggctggtgggtggagtcgaagttggtaaaggcgatgaggatcatgaaggcgatgggcagcgcggtaaagagcaccagcgtgagcatgggcagggagaggagcgtcacatggaagcgctcgtccataagggtgcgcacctcctcgcggaaacgggggacgggctcgtgccgcgccgccttctgctccagcagccacgcgcttttgaggttcagccgccatacggcgaagagcagcgcgagggaggcgagcgtgaccacgctgaagagcagaatcagcatggaattatcgccgggcacgcggcggtagatctgcgccgcctcatcccagacgcggctctgcgccgtggtgcccagggtggggaagaggcggagatagggccagccgaagccgaagaaaaacagggcatacagcacctcaaagcccaggtacagcagccccttgacgatttgcccatggcgaaggcaccctgcgcccatcaccaatgcggacaggcgcgtccagccgtttccgcgcctgaggatgccggcggtgcgttcagccccgtgcttcatgtcaatcccccctgttcaaaggcgaagggctgccccgtcccgcgaagcagcccttttggtgcgttactgcgccgtgacctggctgacaaactgatccagaagcgtttgcaggtcggcttcggagtgggcttccagctccgcgccgaaggcctcggcgggcgtccagaacgtgcccagcacgtgctggctcacgccaaattcgctctgcgccgccagcgcggagagcgcgacgtcggcggaaacctcctcggatgcggcggcgttgaggttggagggaccgtagccccgcacctcgtagcggcggatctgcgcatcctcgctggtcaggtattcggccagctccatggcctccacgggatgctgggtctgggtgttcacgcccagaatcttgcagcccaggaacgagcccatctggacctgttcgccgtctacggtgaaggtgggcagcttggcggcggcgtagttgtcgcccagcttttccttcatggccgccgccacccaggtgccgctgatgccggcgcagatggcgtcgcccatgccgccctgcagcacggtgtcgtcgccgctggtgtaggcgggatggttgcagatggcgcggatggcctcggcggcctgcaggcccttttcgctgttgaagtcgcagatctggttgccgttttcatccagcgtgagcgtgcagccgttgcccaggaagaagcccgcgagataccagccgttggaaatgtcgatctggaccttcttgccggccttttcggcggcggccagcagcgtgtcaaaggacccggcatcctcgtcggagacgacggaacggtcgtaatagaggaagtagccgttgtcggcggtcatggggtagccgtagagcacgccgcccaccgaggccgcgttgaccgagccaacggagttggcggccacgatggcgtcatggttgcgggtgacctcatagagcgcgtcggcgttcaccaggtcgatgatctggtcatcggggtaggagaacacgtcggccgccgccgcggggtcctccaggtagcgggccttggcgtccgcctcgcctacgacgccgtaggtgaattcataggtggtttcgggatgctccgccgcgaaagcttcgcacagctcggccagcagctcctggtcctcctggctgccccataccttcagcgcgacggtttccgcaagggccgcgcccgcacagaggcacagcatcgtcagggaaagcaacaaacaaaggcactttttcatcagacaatccctcctgacccatcaactttttgaaactggcggccgcttttgatggtattatgacaaattgcggcggggctgtcaacgaaagaatgcgaaagcgctttccttcggggcgacggggaggtcggacgggggcggaagcgggagagcgcgcagaaacggcgccggaaaagaggcgcgcggggcggggctccgtgctgccgggcgatttccagacgaaaaagggggcgcatctgcccatacggcagacgcgccccggggttgctgacaaatgcgaagtgcaggggggaccatccgttgctccatcattcgcgcttctctgacggtcgcgctcatggtttcgctatcctcgcaaacatcggcgctgtgcgctgaccgcgcgcagcccttggatttgctcacgcctgcgggtcgctttgggccttcggcccagcagcccgcaggcctgccgcttccctgtggtgccccaaagccttatgccgcagcattttccgcgagcggtgcgggcgtccgaagggcgcaggaaacgcggctttctgcaatacggggggccggcggtctgagcccggcacagccggacttttttcgatgcgcgcggcgaaccccttccgagagatccgcagggccgaagccctccgagggaaggccggagccccggcgccgtttgattgggaaacggcgtcccgcatgagcgtgggagccttgcgccctcagggatcagccctgtttggcaggggctattttcccatagccgttccaggcaaacagggcttcctccgcctcgtcgccgtagaccttttccacattgcagatatagaggtaatggtcgccgacctcgtggtattccttcaggctgcacacgatggccacacggctgtgggccggaatccggatggcgctgccctcgaccggcgcaagctcgatgtggaaccgggcggccttgtcggtatcgcggcccgtggtagtgccgcagcccagcacggcatccgcgatcgctgcgccgggaatggtaagaatcacctgcccgctttcgcgcacccgctctccgctgtaggagggtttggccatggcataggcaatcatgccggggttatacgagagataggtccaccaggacaccgtggccaggttggtggagccgtccggcttccgggtgcacaccacggtcaccaggttgggggaagtaagctgggaagccttgggcaacgtgatttctttcatgcaaaattccttcctttctaaggggctggggtgagtgacagggcctgccgggggagcgggtttcctgacgccgacggcatccatggtttccgcccgctgccccgcggctggcctttgcgggcggcgcgtcagatcctgtcggccagcgccgctgcctgagcacagccgtccgtcttgtggatgtcgcccacgttcagaacgccgggtatcagcacctcgcccaccatcttccacttgttcagggcggccgtgcgctccatgggaatgcgaacgccatccagcacggaccggtcctcctcctcacagcaggcgatgagcgcacattcttttcccgcgatgtccttgccgcccaccaccagggagtagaggcggtcgatgacccccttgatctgggcggggatggagtaccagtacaccggcatggtgaacaccagggcgtctgcttccagaacggccggggcgatgaggttgaaatcatcgtcaaaggagcaggcctttccggttttgaagcaggtttcacaggcgtggcaaccgcctattttcatcatggcggcgtcaaagcgggtaacggtatggcccttggcctgggcggcccggatgaatgcgtcggtcatggcgaagctgttgccgtctttgcggggactgccggttatcacaacgatctttttgctcatggtggttcctccttatggcctgggattgacttttcccatgctttacgctatcattctatcaagcacggggaaaaagacaagtacgcacatggaagtgtgatactaacataaaggtccagtacttaccaaaaggagagtatgacatgagcgggcggtgcattgccaatgaatgccttggaacaaccggattcagctacacgctttcgctgatcaacggcaaatacaagatgaccattctctatacgctgatggaattcggcgttgtccgtttcaatgaaatgaaaaagtatatcggagaaatctcctataagaccctgagcacgactttgaaggagctggaggcggaccagctggtccatcgagaggaatatccgcagattcccccaaaggtggaatacagtctgacagagaggggaaaatccctgattcccattctggacgggatgtgtgagtggggcgatcgaaaccggctgtaaaaagcgtgggggggtgacggaaacgccggccgccggcgatggtttccggcggaatgcgggttcccgccccgcaatgatcggcgctgggggcgccggagggacccgctcccaatcagggaagcggcgggacgccgggatttcagccgtaggacgccggatgcggcgcgactgcgttccgtcatcggatggaggcagccgttttgcggtccctgtttccgcacgaaaacccgcctgcaaccggtatgcaacgcatacaaacggcaggcgggtttctggttggatgacaatttgccggggaacggaagcagcccttcgtcgccctgctgaaccatgggattcacacgccgttttgcaggcgggaaagcagaggccgttgcggggggcatgctgccgatgcggatttttgtgggggcagggttattcccactcggcaaattcagatatagtagggtgtatttgaggtgatttcgca

SEQ ID NO: 2085 - DNA, 14821 bp, Unknown
  16S sequences of unknown bacteria
ttttcgtgagcgttgcgagcgtccaaaggacgcaagaaacgcggctctttccaaagccagggttttttcaacggtctgcggcgcccggtataccgggcgccgcttctgtgtttgtatgccggatcacttacggggcaggcagataagctcctccagcatgcgggcgcaaagctccatgtcctcggctgcgatgtgttcgaaggggccgtggaaagcaaagccgcccgtgcacaggttggggcagggaagcccgcgatagcacagctgcgcgccgtccgtgccgccgcgcaccgccgcgtcaaagggctcacagcccgccgcgcgcatggcggcgcgcgcgttttcgatcaggaagggatagggcgcgatcttctctttcatgttgcgatactggtcgcgcagggtcagcgtgacggcgccttcgccccagcgctcgttcatcaccttcgcgatgtggcgcagctgatcccggcgcgcctcaaaacgccctgcgtcgtggtcgcgcacgatatagaccagccgcgcgtgcgccacgtcgccctccatctcctccagatggaagaagccctcatagccctcggtgtgccgcggtgtttctgcggagggcagcatggcgttgtactccatggccagcaggcacgcgttgaccatggtgtccttggcgctgccgggatgcacgttcacgccgcgaaagtccagggtggcttcacaggcgttgaagttttcatagctgagctcgcctacttcgcccccgtccacggtgtaggcataggcggcgccgaagccctccacgtcgaagcccgcaatgccaagtcccgtttcctcgtccggggtgaaggccacggctaccggcccgtggggcctgccggaggcgatgacgcgttccagcgcggtcatgatctcggccacgccggccttgtcgtccgcgcccagcagggtggaaccgtcggtggtgatgagcgttttgcccttgaggccattcaggctgggaaagcgtgccggcgagagcaccgcgcccgtggcggagagcacgatgtcgccgccgtcatagttcgggtgcagctggggcttgaccccctcgccgggataatcgggcgcagtgtccatgtgggcgatcagtcccagacagggctgcccctccagccccggcgtagcaggcagcgcggcgtagacgaagcagttgtccgtcacgcgtacgtttgtgaggcccagcgccgtcagctcgtccgccagcaggcgggccagggagaactggcagtccgtggaaggggtcgcggtggaatcggggtccgaccgtgtgggaatggcggcgtagcgaaggaaacgttctgttgcgttcatcggtagtttcgtcctttcaaaagcatgggattgaaaatcgcccgccccggagggcgggcggcaaattcacttagttcagcggccggatcagaatgaagggggtcagctcgtcgccctgaccgctggggttgtccgccatggcgtcctgaatttgcgcatcggtgaggggaaagtccgggcttttgcccagctggtcgcgctgcaggtcgttggcgtccatcagcaccaccgggatgcccgtgtcctgatagagctttgcgcacagctcatccggattgtcggggttgatgagggccatctggtggtagagctcgaagctcgaacgggtatagaagccgtcgatgccgcccacgcccttgccgcacaccttgtaaaatacgccgtgcatgccaaacagcttggtcaccgcgctggcggcggcggccagcagcacgcgcggcaggccgcacatgtcgatgacgagctgcagcttgtagggctcatgcatgcccacgcccgtgtggttgatccccgcaaagcgccacaggtgattggcccaccagccgggcttgacttcgtcgcgcgtcttgacggacttgacgcacatgcacatgacctttgcaccgaagctgagcacgtcgccgggctgatagagcgggcgcacgtactgttccaccagcgcggcctgatcttcgcccaccttgacaaagtgggtctggatggcgtagcggctgtatttgcggccgtctttgccctcgattacgccgcggtcgaagtaggtcacgccgttttcctcgcggcgctgctcctccaggttgcgggatgggatgatgcccatgtcaatcgcctccaaatgctgttacatatcctcaaagaaaggttcgcccgtttcggtgaccaatatgcccatgtcgttaaaatgcagcggcacaggcttggccatgatatatttgagaatggcgtcaaagcgcacgctttcggtataggtcagaagcgtaaaggctacgccgtgctttttcgcgcggcccgtacggccgatgcggtgcaggtagtattcgttttcattgggcaggtcgtagttgatgacggcctccacatcgtccacgtcgatgccgcgggcggccacgtcggtggccagcagaatctggaattttcccttgcgatatgcctgcatgacctcgttgcgggcggactggcgcatgtcgccgtgcaggcagtcggcgggatagcccgcgtccttgaggcgcttgcacaggcgctgggtcatgtccttggtgttgacaaagaccatcacgcgctggtatacgtcgctgtcgagcagatagagcagatgctcatatttgtgctcgcgctcggtggcaatcacgtactgggtgatctgcggacggttttccttggtcgcggggataacgatttccaccgggtcctgctggtatttccaggcgatggtcatcacgtcctggttggtggtggcggaaaagagcaccagctggcgctcgatgggcgtggcctcgataatcttggtcacatccttgacaaagcccatgttgagcatttcgtcggcttcgtccagcaccatggtatgcacgctgtccagacggatgttcccgcggttcatgtggtccagcaaccgtccgggcgtggccaccacgatctgcgggcactgcttgagctgggaaagctgcttggtaatgggctggccgccgtagaggcaggcgatgcgcacgccgggaatgtagcgcgccagcgcgcggagctcgtcggtgatctgcaggctcagctcgcgcgtgggggccagcaccagctcctgtacacgcttgtccttgaggctgacatactccagcatgggaatgccgaaggcgcaggtcttgcccgttcccgtgggggcgatggcgatcaggtcgcgcccctccatcatcaggggaagcgttttggcctggacgggggtcatttcgctgaaccccattttttcgaccgccttgagaatctcgtcgctgagatcggcggcctcggagaatttggtgatctgtagtccttctgttggcaaagcgggcgctccttacttgtgttgttgctgatcgaggtagatttctatagcgcggctgagctggtcggggcaggaggtgccgccgcggcattgaacgccgcgcaggcggttcatcacctcgcgcgcatcctggcctaccgccaggcgagccaggccgtcggtattgccccggcagccgttggtgaagcggcaggatgtgatctttccgccctcgatttccaggtcgatggcggtggaacaggtgccatgggtcttatagtgcatcatctgtgtgtctctccttctggggtggcttacacaaaataagccaatttattgctttcgacacagcgccccgtttttcctgccggatttttcacatccggcgggctttcgcatagggtgacagtagcgcttgaaacgaggtggggaagggagcggtgccatgagcctgatcatcgcggacgcccggctgggcgtttggaaagctacggacgagggcgggccgctcaccggcgtggactgcgttttggagggaccccgcctgacctgtgccggcagtgcgtgcgtgtgcgtgggcggaaacagggaatgcctgtgcctgacctgccacgggctgagggaaatcagccggatgcctgctgcgccggggctggcggcgctgtgcctgtcgccctgtgggcggtatgtgtaccagctcagctccgaagccgacagcgttcatacgcgcctgacggccaccggagatctgatttttgcggctccggtgggggtgtttccccgcgccatgtgcctggacgcgtccgggcggctgctgctggccgcgggcggggcggtggacgaagcctacctgctcactgcgccggaattggtgcgcgaacgcaccatccacacgcaaagcccgtgctttgccgcaggcttctggcgcggcggactgctgctagtgtgcgccgtggagggagaggatatccacacggcggtgtatacgctggctccgggcacgccgcgtccacgcaagctgatcgacctgccgggacagccgggcgggctgtgcgtgtgtccggatggcgtaggcgcgctcatcagcacgcgcgacggattgatgaaactggacattccacagggacggctgctctggaacctgccggatctggcgctgtgcgccggcctgtgctgccgcggccccatggcgctggtgagcgcgacgctgggcggccaggtgcggctgctttcccattacaagccatggctttcaaaaaccgtgtttacgggtacggatgttcatgcctgctttttgatggcataatccgggggcgtttggcgcatccttgacacagaagccccggcaaaggccggggtatgggatggaaggaggttttcttgctatgctggataagatctcgctggtactggtgatcatcggcgccatcaactgggcgctgatcggcatctttcaattcgatctggtggcgtatctcttcggcgggcaggcggcggtagtcagccgtatcgtctacaccctggtgggtgcggccgggctgtggtgcatctcgctgctgtttggcgagcgcgtatccgccaaggagtgatccagccggatctgttgagaggcctgcagcagaaaggcccggttggtcggcttgccgcgttccgggtccaccgtggcgccgaaaaagcgctcgatgccccgcatgctgccctgggtgaacacgctttccaccgccacgcgcaggcagcgctccacggcggtgggcgtggtgccaaaggcgcgggcgcacgagcggtagagctgacccatggagcgctcctccaaaaccggggaaggcgccagatgctcaaggagccacgccgcataggcgcggcccttgtagcgacggtccatggaaatggcgcttaaaaaggtatccaccgcctgcgcggtgcgcggcgcctgagccgctgccagttttggcagcggcttttgcgccagcgtttccagcagcgcgcacagcttttccggtgtggcgcagatgggcgcgactgcgtctgccagggccggtcgggaagcgcacagctccggttcgcacaaaaacagtacccgaggcggacaggggtggtgaagcgccgcaagcgcctccagcacctcaaagccgtcgagttcaggcagacaggcgtgcaggataagcaggtcaaaccgctcccgcgagagcagcttcaaagcctgcgtaccgtttggcgcgatcagcgcgtcaaagccccgtatctccatgcccgccgcgatccggcgggccgtgccttggctgagcacagcaatcaaaagccgcatgagcgcacctcctgtgtgtaaggatacgcccatgcggccctctcaacctgccgggtatgaccgaaacctttgtcgaatcctgtcagcgcgccttcaaaaaggcatacgcctcgttcaccgcgtccaccgcggcctggctggacagcgtggcgccggagacggcgtcgatatcctgattgagcgtgagcggcggcgttttgccgatgaactgcgaggtaaacgcctcctcacgcacgccgctgcccacgcccaccgtttccaaaaagcgcgcgccgcctacgtcgatatcggaaatcgcgccgctgtcatccagcgtcaggcgcaccagcacggggccggcatagccgatggcgctggcattggcggtgcggtctgaggccgcgggagatggggtgggctgcgttgcctccggggaagcgctggccgacggtgacacggtgacgaccgggggctgagtggcggccggcggctcggccgtgcctgtggtcatcacgatggcaaccacgccaaccgccgctaccagtccggcgatgagccatccggcccattttttctgattctccatacgtaagctcctcctgcctgataggttcgcccctaggttgcgccgcgcggaccggtcctatacggtgcaaagaatgccgcatcctgcgggatgtttgacacgcttcgcgcttcaaaccgacacggcgcgaaaaccacgctggctatactggctgtacactggcatggggaggcggcatatggagacttcaacggcccggccgcaggaggcggtcgagcgcaggggaaaaggcgtgcgtcgcgcgggaaggcgaatgatggcgtttgtgcgcggcgcggcgcggcctgtgggacaggccatgatggtctttctgtttacctttgtgcggtggttcggcattccgtctccctttgcggcggcactgctgctcgcacgggcggaaaaacccacaccgctgatgctggcgggcgcgggcgtgtcgttggcggtgagagcgctgtggggccttgaactggatgtgtggcagtacgtgggcatcgccggactgtggctggcgctgcgccgatgccggccgaggccgggcattgagacggcggcgctgggcggccttgcgatgatgccgcgggtgtttgcagcactggccggtcaggcgccactggatattctgctcagccttgcggcggtgccgctgggcatgctgggcgctgcgttttttcgcagcgcgatggacggcatggcctccaccggcgcgcccacctgcacacgggagcgggcctgcgtggcggcgctgggattgctgctggtaggcgggacaggctatttctgggttggctcgcttaatctgggccagctggccgccgtgtgggtgaccgtggcctatgccgctgccaacggaccggtatacggcgtggccgccgggctgctgtgcgggctgtcgctggcgctgggcgggcatgacgtgcgcatggcggcgacgctgtcggtcatgggactgctgtgcgggcttccggcggtagagcggcggcgctggctgcttccgcctgccgctgtggcgggatgggcggttggttactccctgacgccgctgagtgggccgacggttcccttttgggctgcgctggccggcgcggcggcctatgcgctgcttcccggatggatgctggaacgggtacgcgcgctggcccggggaccggagccgggcgtgagaagcatggaaacggcgtttgtgtcccagcgcatcgagcatatgcgcgacgcgctggaacggctggccaaagccctgcccgaccccggaagccaggcgatcaccagcggcgaggaactgggcgaattgctctgcgcccggtgcgccaaccgcgagctttgctgggggaaggggcgcgtgcggaccgaacgcctgcttgcggacatgatggatcgggtggaacggggcgaagcggtggacgaggacaacctgcccgccctggccgaacacggctgcctgcgcgccgaatccattgaagagacggcacaggaggctctggccgcgctgaaacggcgcgaggcaggcatcagaaaagcgcgctacgaacgggaactgacgctgacgcatctggcggcgctgtcgggcacgctgggagagctgagcatgatggccgggggcgaaagcctcaacgacctcaaggcagctcacatcctcaatctggcgctggaggagctcaacgtgcccgcacggctcagctatgcgcggcgggtggacggccacctgcaggcggcgctggaaaccgatggcatgatgccggtacaaaagccgctggaaatgctcctgcgctatctggccacggaggaagatctgccgttgtccatcacgcgcgcgggacggggacgtgtagagctggaggagatcccgctctacagcgcgtcggtggggatggcatcggtgtgcgcgggagagcgcggagaaggggacggcgtatgcggcgacgcatgctcggccaagcgctgcgagggcggacggctgcttttgatgctgctggacggcatgggccatggcgaggaggcgcaccggcagagcgaaaagacccttgagctgctcaccctgctgctggaggcagggtatacgcgccgtcaggccatcacagcggtgaatggcatcatgctttccatccaggaggaggaacgcttttccaccgtggatctggccgatgtggacctgtggacgggcaacgtatattcggaaaagctgggcgcgtgtgcctcgtgggtggtgcggggcagccatatgaaaaaggtggaaggcgcatccctgccgctgggaatcgtcgaggaagcggcggctacctccacgcagtaccgcctgcacagcggcgatattctcattatggtcagcgacggtgtggccgacgcctttgaaacggacgaacagttcacccaggccctgagcgaaagcctgtatatccagccgcagcgcatggccgacgccttgctccgaaacgccctgctggccggaggcggcacgccgagggatgacatgagtgtgatggtgctcctgctgctggaccggcagcaggccaagggatcatgaaaggcgcggccatgcaccgcgcctttttacttttcaaaaaaagcggagaggcgtaaccgcctccccacagcgtgtcgaaaaagtccggctgccccggccttttccgccaaaggcttaagaaatgaaatgtttgcgccggggcgcaaactccccgcccgcccggcaaagccgggcgatacgatttcattttggagggctgtggccctccaaacctccccaaatgggtttttgacagtctgcgcagaggcgtaaccgcctccccatgtgcgtcctcaggaacctgaggcattacgcctcttcctgataggtgatttccagatgataattttcccgcgctgcgtcctcaaatacgcgaagcagtttgggcaggtaatccaccatttttccgcgcggagttttgggatagtgcacgtcgatatgcaggggctcgcgctcactggccagctcgtcatgaagggcgtccaggttcgcgccataatagaaggggaaatccagcgcctccttaaggtagcggtggagggaaatcttttcctcaaagggagccaggtccagggttacattgcgcataagtacctcctgttgcatttgactcgtgcagggatgaaacgtggcagggggaacgggggggacgggcgtttgcggcactgccgctttcagtgcttgagcaaaatggggttggaccaggcgctcaggccctgtgcgtcgatcagctgtatgcgaacgtagcgctcgccgcggttgacggtcaggtcgtagctggcaaagaccagatccttgccggtctggcagcggttgcccgtccagatcaggttgctgtagaagatcacggtatccacgggggagcaggtgacatcaatgcggccgtcctcaatcgagatctgctcgaaccgcggcccctgcgagcagtagaagcggccccggtccagcgcgtcgaagaggctttcctgactgagatcgtcggcctgcaccatggtaaaggcccggcccgcctcgccctgatagcggtgtgaatcgtccgaggcgacgaagcggtacagcgcgccgtgcgccgcagccacatccagcacgcctgaggcatcggcgcggtcgccattccaggggtaggtggacacgctgttgtagatctccgctgcggttacgtttcgcagagccgaaagcgtggccacggtattgagcgaccatgccgggtgcgccacgatggcgcgtcccccgcagcggcggaacaggttgatgcatcgctgggggccctcggacagatcatagccattgaggcgttcgtccatccccacgccgatcagatgcagcacctcgccgggcagggtgtaatccatctccatgccgctgagcagcagcatgcatccctccagatgcgtgggcgcggacaggcggcggtgatcggtcagggccagaaaatcatatcccagatcgcggtagagggccacgacctcgtcaggactgagctttccgtcgctcaccgtggtgtgacagtgcagatttcctttgaaaaaaggcagctttggatcaaaaaggtccatttcagcacgcaccccctttctctcttcaaaaagcgcatgtaagaattatagcctgtaccgcatggaaatgcaagcgccgccttgcaaaccggcgcgctgtgtgataccatgtgggcgaaacaagcgcgaaaggggctttttctcatgaaagcattgtttattggcggcacgggcaccatcagctcggccatttcagcgctgtgcgtgcgccggggatgggatttgacgctgcttaaccgcggcaacgcagacgcgcgtgtgcccgagggagcgcatctcatccatgtggatatccatgatgagacggcggcgcgggaggcgctggaggggcagaccttcgatgtggtggcggatttcatcgcctatacgcccgacgacgtggcgcgcgacatccgcctgtttgccggcaggacgggacagtactttttcatcagttcggcgtcggcctatcaaaagccgctgtcctcgccatggattacggaagggacgccgctgtgcaacccctactgggagtacagccgcctcaaggccgcctgcgaggatgtgctgatccgcgcctaccgtgagcagggttttcccatcaccatcatccggcccagccacacctattgccagcgcagcgtgcccgtggcgctgcatgggccggcgggcagctttcaggtgctggagcggatgcgcgcgggaaagcctgtcatcgtcccgggcgatggcctgacgctgtggacgttgacccacagcgacgactttgccgtggcgttcgtgggcctgatgggcaacgtgcacgccctgggcgaggtattccacatcaccggggatgaaagcctgacctggaaccaggtgtacagcagcatcgcggcggcgctgggggtggagccgcaccttgtgcatatcgccagcgaaacgctgggggcgctgtgccagagctatgtgggttcgctgctgggggataagagcaacacggtgctcttcgacaacgccaaaatcaagcgcgccgtgccggaatttgtggcggcaaagcgttttgatcagggggtgcgcgaggccgtcgcgtatatctacagccacccggaatgccagcggcccgaccctgccttcgacgcctggtgcgatcaggtgattgaggggtatgagcgcctgacggcggcgctgcccaaatttgaaatgtaaggagctttccgtgagccagtacatcgagccggtcaaatcggcgctggtgctgtttccctttgtggcgctggtgctcacgctgccctatatgctgtttcaataccgcaggtacggggcggtgctgcttctgcgcacggcgatcgtgtattcgtttgtgctgtacctgatgtgcgcctattttctggtgatcctgcctctgccggatgtggaaacggtcagcggcctgacctccgcgcgcgtgcagctgattcccttccgggaggtggtggacctgctgcgcaacgccggcgtggacccgagccggcctgccacgtggtaccgcctggtgtggaaccgggatttcttccagatcgtggccaatgtggccatgtttacgccgctgggaatctacctgcggtattatttcggatgcagcctgaaaaagacgctgctgttttcccttttgctcagcctgttttttgagctgacgcagcttacgggcctttacgggtattatccgaggccctatcgtctggcggatgtggacgacctgatcaccaatacgtgtggcgggctgctgggctacgcgctggccccactggcgatgcggctgctgccctcgcgcgagcagatggacgcgcgggcctaccgcaagggcgaacaggtgagcgtgacccgccgctgctttgcggcgctggtggactttgcggtgatgctggtggctctcgcggcgctgatgtggcggctgccctcggtgatgccgtccggagaagaccccgtggcgatggcggcgtggctgtttggctgctatgccgttggaattgtggggtactttgtgcttggcacatggctgggtggcggacgcacggtgggcaaggtgcttttgcacctgcgcctgacggacctgcgaagcggcggccgtcccagactgtggcagtgcgcggtgcgctatggggttttgtacctggtggtgatgcccactcccgcatttttgctgctggccatcaccctgggaacagaggatggggagatcggcgtgtggctggtgctggcctgcatagggcttctgatggtatatatcctgttctggctgctgctggccgtgcatgtggtcacgcacgacaaccagctgttgcatggcaagctgagcatgacgcacaacgtcagcaccctccgccaccggtattttgcccggtggcatggcgcccggcatgcgcatgataccactatccagtaattgaaaaaagaagcgcaagcgccgtgggatgacaaaatcccacggcgctttgcatatcgctttatgcctgcgcgtcgggcaggggcaggcgggctacgccgctgcggacggctgcttcggctacggcgcgggccacggcaggcccgacgcgccggtcaaacgcttcgggcagaatgtagcggggcgtgagctcctcatcggataccagagaggcgatggcacgggaagcggccatcttcatttcgtcgttgatgtcgcgcgcgcgcacatccagcgccccgcggaagatgccggggaacgccagcacgttgttgatttggttgtcgtaatcgctgcggccggtacccaccaccgccgcgccgccgcgcagggcttcctccggcatgatttcaggcacgggatttgccatggggaatacgatggggttgtgtgccatcaggcggatcatatcggcggtaacaatgtttggcacgcttacgccgatgaacacgtccgcgcccgccagcgcttcgttgagaccgccatgcaggtggcggcggttggtgatgtgactcagttcctcctgggcgggactcattttggcccggccttccaccacgatgccatggcggcccagcagaatcagatcccccacgccgaagtgcaagagatgatgcgcaatggccacccccgccgagcccgcgccattgattacgcaggttacgtcctccatgcgcttgcccacgagtttcagcgcgttgatcagtgccgcagctacgaccacggcggtgccgtgctggtcgtcgtgaaacacgggaatgtcgcacagctccttgaggcggcgttcgatttcaaagcagcggggcgcaccgatatcctccagattaatgccgccgaagctgcccgaaagcagatagaccgtgcgcacgatctcgtccacgtccttgctcttgatgcagagagggaaggcgtctaccccggcaaactccttgaacagcacgcacttgccctccatcacgggcatgccggcctccgggccgatatcgcccaaacccaaaacggcggtaccatcggttaccacggccaccaggttgtgacgacgggtgagctggaaggacttttccgggtcgtcgcggatggccagacaaggctgtgccactcccggcgtgtaggccagcgacagggcctttcgatccttcacatgcgcacgcggcgcgatttccagcttgccggcccattcatagtgcttttccagcgcttcctcccagatatccatagatgaccgctccttgttttcgtgatctttcggcttattgtagcatgtttcgcgccgcgtgacaacgcgggagtttctgttgacttcgcttcttcggcggggtatgatctagtcggttgcatatgaagaacacaaacagaatcatgctgcgttggagggaaaaccatatgaaaaaattttttgaagaattccggcgcttctgcgtcaggggcaacgttatggaactggctaccggggtaatgatcggcggagcgttttccagcattgtcagttcgctcgtcaatgatatcctgatgccgctgatcggcttgctgacaggaggcgtggacctgagcgggctgtttgtggcgctggattttcaaagctatccctccatcgaggcggcgcaggcggcgggcgtgggcacgctgaattatggagcgtttttgcaggcgggggttaactttctcatcattgcgctgtgcgtgtttctggcggtgagggccataaaccgcctggtgcccaaacgtcagcagccaaagaaggaagagcgcctgtgtccctattgctgtgagcccatccatgagaaagctgttaaatgccgttggtgcggcagcagccttgaagaaagcgggaaagcaagagagagtgcaaccgtcgcttgacagattgcaagccggagttgcttgcgccgcaaccgcccctagcgctatgcttgatgccacggcagcagcgaatgccgccgcgaaatcagcagggaggaacagcatatgggcttttcggaaagagtaaccgcgcttcgcaaacaggccggatggtcgcaggaggaactggcgcagcggctggacgtaagccgtcaggcggtgtcaaaatgggaaagtgggatatcacttagataaagataccacatcaatcccacgctgacttttgctcaaccgatacagccggag

SEQ ID NO: 2086 - DNA, 32759 bp, Unknown
  16S sequences of unknown bacteria
cgctcacgggaatgagccgcagcgcggcggcgcgcctgtgcgcgcaggggaatgtggcaagcggcggcaaagccctctcgaaaaaggacagcgtccgcgcaaatcactccgtcacagtgatccttccgccgatcgcctcatgcgaggcggagccggaggacataccgctcgacgtgatctatgaggacagcgacataatcgtgataaacaagccgtccggcatggtcgttcaccccgcgccggggcattattcgggaacgctcgtctccgctctgctctaccggtgcggcagcgagctttccgggatcggcggagtggcgcgccccggcatagtccaccggatcgaccgacagactacgggacttatcgccgcggcgaagaacgatttcgcgcacgaacgcctgagcgctcagcttgcggatcactcgatgagccgcgaataccgcgcgctcgtcgtcggtcacatgaaggaaatgtgtggcacggtggatgcgccgatcgcgcgaagcacacgcgaccgtaaaaagatggcgatcgccgcagacggacggagcgcgcgcacgcattaccgcgtcgatgaagaatttccgcagtgctctctgctcacgctcaatctcgagacggggcgcactcaccagatcagggtacacatggcgtacctcgggcatcccgtgctcggtgatcccgtatacggcggagacggcgcggcattcgtgaagaagcatccgtcgcttttcgacgggcagatgctccacgcgcagtcgctcacgctgacccacccgagaacgggcgagaaaatgacgtttcacgcgccgctgcccgacaacttcgagcgcgccctctcgatcctgcgcaaaatgcagcagccgatcggttaaggggatcaagcctcggacgcgcaccgggaaggcgcatgattttcggaacagcaagctcatgcgtgcgaaataaggcgaacgcgccggtggtatgccggctcaggaaagcggtatctttcgccgaaagtgcccgtatcgccggataccgtccgggggacattgtccgccgggggtataagcgtgcgcgatatctttcgcatgcgctaaccgcgcgatccgtgaaaaatttcggcataggcggcaatgatgccgtgctgccggttcgaaagaatcgcggcggacgcgttaaagcgccgtgccgatatgcagaataaacatatttcacggttaaatccgtattcctcacaaaaccgaaggaaaaacgatgtttactttacacgacagcattttcacaagctccgttcttgagctgccccgcgtccgtcacgccttttccacaaggctcggcggagtcagcaccgacagtgcgacgcgctcgatgaacgtggcgcccggccacggggacacgccggagcagatttacgaaaatatttcgatcctcgccggacgtgtcggcgtgcgcgccgaggataccgtatgcacacatcagatacactcgtctctcgtatgctacgccggagacggtatgcgcgggcgcggggtcgtctcggagaatcccgaggaatgcgacggattctacaccgacgtgcccggcgtcgcgctcatggtccgtaccgccgactgtgcgccgatcctgctcggcggactgcgcgccgacggcacccccgccgtgtgcgcgctccatgcgggatggcgcggaagctgcgccgcgatcgcgtggtacggctgtgccgcgctcggatgcctcggcgtggaggcggcagacatcttcgccgcggtcggaccgtgcgcccacgccgaacggtttgaggtcggcgaggacatgcgcgacaccgcagcgtcctctatgggcgcggatttcgccgcaaggcacatcgtgacgcgcggcggtaggcttttcgccgatgttccgggaatgaaccgagaggtgcttctcatgtcgggagtccccgagaatcacatagacatctccgaccgctgtacgatatcggagccggagctgttccattcccaccgcgcgaccggaggacggcgcggagcgatgggcaacattatcgtaatatcgccgacgggcgaaaaataaaatcttatcgaaaagagggataaacatgaactgtccgaattgcggctcgcagaacagcgacagctcgaaattctgcattcattgcgggcacgctctgcccgttcgcgccgatacggagcacaccgcacaggagagcggaacgatatcggaggcggagcgcgtcagcgcaccgtccgaggttgtcgcggatcgcgccgggcagacggaggacgaagttcccgccgtttccgtgagcgctgccgaagccgaagtatgcgaaagctccgccgagaaggcagcgcccggcaaaagcgccgaagcgatcggaaattttgaggacaacgccgaagacgtacgctctgccgaggcggagatgcgcgaaagcttctccggcgaatgtccgcccgcgtccgacgtcgaaatcaccgcttccgccggtgctgcgaatgacaaaaaagccttcgccgcacagaatgtttccggaaatgccgaagctctgccgaacggagagagcgccgcgccttacaaagacgcccccgcagcatcgtataccgcgccctccggcagcttttcgtataccgcatccgtttccgccggcgcacctgatgcgcccggttcgggaaacggcgccgcagcctttgcacctcccgcatataccgctcatgcgccgaatccctatatgaaggcggaaagcctccgcatggcaaagctcgccgcgctcaaggcggctgtggtctcgccgtcatatcttatcgcggcgatcgcatccacgcttgttttcctgttcattgtatgtcagccgtttataccgggcatgtcgccgctgtcttcaaacaccgccgaccttcagaaggtgctcgacagcgtcgaaatatcgttcagcctgaactcgttcgcgatcacggcttcggtcatcggtgctctgccgtcgttccttctggcgctcggaatgtggctcggattcttctcctgccgcacgaagaaaaaccgcgtagcgactgcgggcttcaccattcatcaggttctcctgtgcgtggcgctcgttttcctctgcatatttttccttatgctcgttctctccttcgccttcatcataatcggaatcgtatccggtgcgggagttgacatcacatcggagctttcacccgagcttcgcagtatggattcctcgctcctttcgctcataatctacgccgtgatcttcgtatccgttgcggtcatgacgctctgcacggtttggctcgcccgcctcatcgtcaccgtttcgtcggtaaaggcgatcgcgcgcgcctacgacaccaaagcacgcatatcgggctttgcggcgggaatgtgcatcgtcgctgcaatccttatgatcatgtcggcggccggctactctctccttctgatcttctccctcgccgtttccgaaatcctcaatgcagtctttctcctctcgatcggagtgttcatcttctcgctgaagcgcaaggtgaatactgcggtcgacgaagtcgagaattactttggaggcgagttctgcgcatacgcaaacgtgccgaacggatatgccgcatactgcgccgctcaggcagtgcctgcaccccggtacagtactcccgcagccccgcaagaagttccggcggcagctgtaaaaacggctgaaacggcagttcccgcatcacctgcggcagccgcatccgtccgagatcccgcgcccgagcagatgcagaacagcgcctcttccgtgcaggaagtcggaaaagctccgcagaacgcggaagcatctccttccgcacagcctgcggaagagaaacacgcttcgtcgccttacatacagatagaaagaaaccgctgacggtccttacggaaaaatccgaccgcacggcacgacaaagaaaggaagctttcgccggacgaaagcaatggttctgacaatggcaacatcctttgagatcacaaagatcccgatcccttccgcaaagatgaacggagaagcctccgttccgtcgtttgcggagcagcccggtccgcgcggcagggactacggtaccgacgaatatgcggggctctacataagctacggtctcgttcctacaccgtttccctaccgcatgcaggagaactactcccgcgagctgtacgacaacgaggaggacgtgatcattctcgagaacgagtatctccgcgcgacgtttttccctcactacggcggaaagcttgcatctctgttcgacaaggagaagggcaaggagcttctcttctccaatcccgtgatacgtccctgcaaccttgcgatacgaaatgcatggatgtccggcggcgtcgagtggaactgcggaattttcggtcatcacgttcatacctgcgatacactgttctgtgccaagaccgagcttgacgacggcacgcccgtcctccgcttctacgaattcgagcgcatccgccgcgcagtcgtgcagatggacttcttcctccccgagggctcgcgcttcctctacgcgagaatgagaataacgaatccgaacccggaagtcatcccgatgtattggtggagcaacatcgccgttcccgaggatccgaacggccgcgtcatcacatgggcgaacggctcgtacataaacggcggaaacgtctccgaaattccgataccgataaacgacggcaaggacgtaagctatccggtgaacaccgatattgcgatggactatttctacaatattcccgcaaacaagcgcaaattcgagtgccagctcggcaaggacggctacggcttcgtgcagacctcaacctcacgtcttcaggggcgcaagctcttcatctggggtcagagcgcaggcggcgaacgctggcagaactacatgaccgccgacgactgcgacggtctctacgtcgagcttcaggcggggcttgcgcacacgcagtacgagtctctgccgatgccgcccgagtccacatgggagtggctcgaggcatacggtgcgcttcaggcggaccccgagaaggtccacggcgaatggcacacggcgcaggcggaagccgaccgcgcgctgaacgagcttctcaccgaggatgctctcgaggcaaagcttatcgcaacgcgcgacatggcgactcgccgcgctgaggacgtcctcttcgagggaagcggatggggtgcgcttgaaataaagctgcgcgaaagcatgggcgtcgaaaagaagatgacgccccacctcgacttcggcgagtgcggacccgagcaggctcagtggctctctctgctcgaagattccttctttcccgagccggacgtgctcgagcgtcccgcctcctatatgcttcagcccgagtggacgcagatgctcgagaaagcgtgcgagaccgttgacagattcaattggtacgcgcatctccagctcagcatgatctactttgcgatgagacgcattgacgatgcggaacgcgaagccgccgcgtcgctgaatctgaagatatccccgtggggactctacacgatggctcacgtcgagcttgaaaaggacaacaaaaacgagggcgcgctcctctgcatgcgcgcatcaaagatgcttccgcgcgatctgtctatcgcaaaggaggcaatgacgcttctcgtctgcctcagaatgtacgatcaggcgcttgcgctcctcaaaacattcccggaggaaatacaggagaacggaagaatccgcgtgtatgcgcttatggcgaacgtgcggctcggcaacatcgaagaatcggagaaaatcctctacggaaacggcggtcttgtgatccccgacgtccgcgagggagagactcttgtgaccgagatgtggtgggagcttgaagagctgaaggcaaagcgcgacggacgcgaattcagccgccagaccgccgaggttccggcgatgttcgatttccgcacggcgggaccgagacgaaagagcaaaaagaaataacggatattatttccgcgggggtatcttcaaagatccccctcttttttgcggcggacggtccgtaggcagctgccgacgagccgtccgcatcgggctgcggtcatcggaaaatctccgcggaagcggcgggcgcgatcctcagacgcaatttattttcggaaaatcgaagaaacttattgcacacggtgtccggctgtgatatactttgaaaagcaaacgcgatctctgccgaaaaacgctttcggcaccgctcacgcaaaaattttcggatcccgcaatttcgcggataaacccggacaggaaaggtacggtcaattaaaatggctatcagaatcggaatcgtcggctgcggcgcaatcgcaaatcttcacgcagccagctatcagaagctcggcgatcgggtcgagctcgtcgcctgctgcgacgttgaaaaggggcgcgccgacgcttttgtcgaaagatacggcttcaagaaaagctactccgacgaaaagcagatgctcgaggaatgcgagcttgacgcggtcagcgtatgtacatggaacagtcagcacaagccctgcacgatgcttgcgctcgacgcgggagtaaacgtgctctgcgaaaagcccatggcgatgaacaccgccgaggctctcgagatggaagaatgcgcccgccgcaacggcaagcttctcatgatcggcttcgtccgccgtcacggaaacgacgcggcaaccgcgctcgactttataaacaagggatacctcggagacatctactgcgcgaaggtatcgtatctccgccgcgccggattccccggcaactggttcggcgacaagtcctactccggcggcggtccgctgattgacctcggcgttcacgtcatcgatctctcccgctacctctgcggaaatccgaagcccgtcaccgtattcggtgcgaccttcagcaagctcggcacaagaaagaatctgaaatccgtcgttctcccttgggagagcacctcggacgtaaagaagaaggaatacaagttcgacgttgaggacttcgtgaccgcgatgatccgcttcgacaacggacttctcgtaacggcggaagcaagcttcagcctgaacatcgagaaggacaccggaaacgtcgagctgctcgggacaaaggcgggtctcacgctttcaccgttcgttctccacaccgagtgcaacgatatgcttgcagacaccgttatccgtgcaaacatcggcgagggcgatttcttccgcgccgagatggagaacttcgtaaacgcgatcgaggggatcgcgccctgcaaggctcccgccgaggacggagtcgagctcatgcgcattctcgacgcgatctacgaatccgccgagaccggcaagtccgtcgatatcgtaagataaggattcacgcctcccctgcgcggtcggagcttttacggctccgcccgcgtttttcgttcttctgacgggcaggcacgaaaggaatgcggtcggcggcggtaagcaggggcggacaccgcagcgcgcggcggtacggtgtatgtacaagccgcacgaactcactccgcagggggcgaggtacgggcaaaatccgaacgaagtgcagcgtgacataatgcgagcgtgcaaaggcacagcaaatctgcacgggaggcagaacctcgacagacggcacggaaaaagcacggtaaagcccgcgtcatatgcgtacactgacaaagcgatggcatgtcgtgcgcggcgcggtgaatgaacggcgaaggagcacaacgacggcagagcggagcggcggttttcgctctcagtttccgaattacgttgttttaacaacgtaatctgatttgcagcacgcgaaaatacccctgcatgcggcaagccgcgccgtccgagggtggttctgcggcatatcgcacctttttcaaaaagcggtatcatgcgcttccggcgacagtcgcacctttattgccaagccctgcctttaccgcagaactgcgcccttcccacagaaccgtatctttcccgcaagccgcacgtttccgctgagccgtacctttttcgcaaaccgtgccttttccgcaaaccatacctttccccgagccgcgcccttccgcgaaaaagaatcctcctcgctcatcgcgggaatgcccttttttcttcctccgtccttgacacccggcggaggcggtgatataataaattattcaagcggcgcgaaccgtctcttcggcggtatgctgtgatctgcgttcagtgaggtcgaaatgaacaaacagttgatagtggtaaaggtgggaacttcatcgctcacgggagcggacggaagcatgtcccccgaaaaggtcggaaacatcgtccggcagatcgccgatctgcgcgatgcggggcacagcgttgtgcttgttacctccggctcgatcgccgccggattccgccgcctcggatacggctcgcgcccgacatcggtcgcggcaaagcaggcatgcgccgccgcaggtcagggacttctgatggaagagtatacgaaattcctgctcgaccgcggatatgtcagcgcacagcttcttctcacgcgcggagacttcgttgaccggaggcgctacacgaacgcattcaacgcactcgagctccttctgaagaagggcgccgtcccgatcgtgaacgaaaacgacacagtatcgctcgaggagctgaagctcggagacaacgacaccctcggcgcatatctcgcggcaatgcttcacgcaaatcttctcatacttctaaccgacgttgacgggctgtacaccgcaaacccgtcgaaggataagaccgcgcgccggatcgacaggatcgacaaaatcacaaaggatatcgaaaatgcggcagcgggcaccggatcgtcaaacggcacgggcggcatgataacgaagatccgcgcggcgaaaattgcgacacgtgcgggagtgccggtattcataacctcctcgtcgggcgaaaatccgatcgtgaaagccgtctccggcgaaggcgtgggaactctctttaccgcgcgttattcgctcaagacgaagctgcagtggcttgcattctatgcgcaggcatcgggaaatctgttcgtcgatgcgggcgccgccgacgcggtgatgaaaaacgaccgcagccttctccccgccgggatagtcgcggtcgagggagatttccgccgcggtgacgtggtgtgcgtatacagaacggaaacccacgaatacctcgggcgcggcatcgtgaaatattcgcgcgacgagcttgccgagatgatcggctcggattccgcggcaggcgaatccgaagcgataaaccgcgacgattgggtcggcgcaaaggactgaacacccacttcgggaaggagcatcacatatgaacgaacttatgacaaaagcaactcttgcgcgcgaggcggctccgctcatcgcctcatgctccgcggaagcgaaaaacgacgcgctgatgcgcatcgccgatgcgctgatcgcgcacaccgacgagatcgccgaagcaaaccgcgccgatgttctgcgcgcgagagagtcgggcacctccgacgccatgatcgaccgtcttacgctctctaccgaacggatcctctccgtcgccgagggtgtgcgctccgtcgcgcttcttgatgatccggtcggcgaaaccgtagaaaaaaccgtccgtccgaacgggatgaccatcgaaaaggtgcgcgtgccgctcggcgtgatcggcatgatctatgaggcgcgtccgaatgtcacggtggattccgccgcgcttgcgcttaaatccggaaacgcgatccttctgcgcggctcgtcttccgcgctctcctcaaacgaaaagcttgtgcagatcatgcgcgacgcgctcgacatgagtgaggtccccgccgacgcagtacagctcatcaccgagggcgggcatgagaccgtcacggaaatgatgcgtctgcgcggatacatcgacgtgctgatcccacgcggaagcggacggctcatttcaagcgtggtcgagaatgcctccgtccccgtgattgaaacgggtgtcggaaactgccacatcttcgtcgatgcgagcgccgatcccgaaatggcaaagcggatcgtgataaacgcgaaaacgcagcgccctgcggtgtgcaacgcggcggaaacgcttatcattcaccgcaattttcccgacttcgaggggctttgtcaggcgctgatcgacgcgggagtgacgctccacggaaccgtcgaggtctgctgccgcatccccggcgcgcgccccgcctcggagaaggatttcgcagaagagtacctttcgctcgacatggcggtcatactctgcgcctcggtcggagaggcgatggagcacatccgacgctactccaccggacacaccgaagtgatcgtaaccgaggacgcatctcacgcggagcgttttctcgcgggtatcgattcggcgtccgtcaattggaatgtgtcgagccgcttcaccgacggattcgaattcggcttcggcgcggaaatcggaatctccacccagaagctccacgcgcgcggacctctcggtctgcgtgagctgtgctcgtacaaatatatcgtgcgcggaaacggtcagatacgcggataagcgcgccgcacatttcgcataaagatttgcacaaagacggtcgtaaaaccgcgcgccgtgtgccgaagggggctctcgcacgtccgccgggcgcggacggaaatcacgcgccgccgacatcggcagaagaaaggaaccatcatgaaagatataaaggaaataaagcttgcatttctcggaagcggcttcatggcgcaggcgatgatccgcggaataatcaacgcgggaactctccccgcagaacacgtttacgcggtaaaccccgtcgatcccgacacctgcgtcatgctctccgaaaaatacggcatcgtcgcggcgatgccggagatgctcgcggatgcggatgtcatattcttcgcaataaagccgcagacgttccccgaagcgtgtgaaatgtacgccgaatacttaacctccgacaaggtatacctcacgataatggcgggcgtatcctgcgcaagtgtcgagacggcgacgggcggcgcgcgcgtcgtgagattcatgccgaatcttgcgctctccgtaggaaagagcgcaaccggattctgcctcggcagaaattccggcgaggaggaagccgcgcttgcacgcgcgctcttcggtccgctcggcgaggcgcgcgagctgcccgaggatatgctctcgtcggtgacggctctttcgggaagcggtcccgcctacttctactacctctgcgaggcgctgaccgcagccgccgtcggcgacggaatggatgaggagaccgcgcagtcccttgcggtgcagacgcttatcggaaccgcagctctcatcgaggaatctggcgaaagccccacggaaatgcgccgccgtatcacgtcgaagaagggcacgaccgaggcgggaatctgtgcgctcgaggcggcgggcttcttcgactgcgtgcgcgaaggatacctcgccgcgcgtcatcgctcggacgagctcggaaagaaatgatatgccgcgcgcttccgacggattacgccgcgcgaagctttacaacacaataatcccggccatactgcccgcgcaaaatccgcggcggcatgaccggatacgttttttcggagagtccttccgaaatcggatttatttgacacggaggaaagcaatgccgagatttttcgtaggtccggaaaacataaacgaacgcagcgcggtgatcacgggcgacgacgcggcgcacatttcgcgctcgctcaggatgaagggcggcgaagggctcacgctgtgcgatgcgtcgggaaccgaatacgactgccggatagtcacggcggcggcggacgaggtcgtgcttgaggtgatctcgtcgcaccgaagcgaaaacgagccgccatatcgcgccacggtgtatcagtcccttgtgaagggggaacgcttcgacacggtgatacagaaatccgtcgaatcgggcgcggtgcggatcgtgccggtgctgactcagcgcgcgaccgtccgattgacaagagcggatgcggagaaaaagcgcgcgcgctggcagcggatcgccgaagaagcggcgaagcagtgcggacgcgccgtcatccccgagatcggcgccctcatgacattccgcgaagcaatatcgacgggaggcgtgcgcctgttctgctacgaaggcgagcgctgcgtcagcctgcggggagctctcgcgggcagtgcgccggagggtgagatcggtatattcatcggtccggagggcggatattccccggaggaggcggaggaagccgcggcggcgggcgccgtttcggtgagcctcgggaagcgcatactccggacggaaagcgctgcgccgttcgtcctcgcgtgcctctcatacgaatacgagctgtaggacggtacacccgcgccgcgaggcaggcggcgaggtgatcgaagaagcggcgacgggatcggcgatgcagcgtgagaccgacgggcagcgtgaaacctatgagcagcggtggaaaaaccgcagtcgcgcaggaaaattcgaccgtgcggaggacacctcaaccgctgaggcaaattcccgattacgcacggcgcggcttataggctgtacataaaagcccgcggcataccgagatgcggcggcgcggacggcataggcgcagccccggcgaaaccgacgcagcggacggcggcatcgtcgcgcggcagacatcaaacggcacatcggatacgtttttaatgttgcggttatatgaacaaactttaaatttttcgtttttctgcgcaaaaatcggaaaaagcggcttccgtttttataaatattcccgtttcactattgaattgtcacaaataatcgtgtaaaatatagtggagaatatacaattgataaactgcgatattttattattttatatatcaggaggagcaaaatgtctaaccgattgtttcagggaattattcaccagatgggcgacgcggcaaaccgcacgatcggagtaatcgacgatacgggcgttataatagcgtgcagtgagcttgtcaagataggcgaggcccggcacggtatccacgacgaacttgcttacacctcggatgcggtcaccgtcgagggctacacataccgtcccatcggaaccgccgcaaaatgggaatacatcgttttcgtcgaaggtgaggacgatacggcggagcgtcttgccgatatcctctcgatctctctttcaaccataaagaacctctacgacgagaaatacgacaagaattccttcataaagaacatcatcctcgacaacattctgccgagtgacatatacataaagggcaaggagctgcgcttcaacaccgaagaggtccgcgtggtattcctcatcaaattcctgtcgagaaccgaagtgctgccgttcaacatggttcagcagatcttccccgacaagaacaaggattatgtcatcagcataagtgagcaggacatcgttgtcgtcaaggagatcaagggcggcaccgacatccgcgagatcgagaagcttgcacgttcgatcgccgacactctcggcaccgaattctatgcgaaggttgcgatcggcatcggaaccgccgtcgacaacatcaaggatcttgcgcgctcctacaaggaggctcagaccgcgatcgaggtcggcaaggtattcgacaccgaaaagacggtcatcagctacgagaacctcggcataggacgtcttatctatcagcttcccaccacgctctgcgagatgttcctccaggaagtattcaaatacggttctctcgaaagcctcgatcacgagacgctcatgacgatccagtgcttcttcgagaacaacctcaacgtgtcggagacttcgagaaagctcttcgtacaccgcaacactctggtctaccgcctcgagaagatcagaaagctgaccggactcgatctgcgtgaattcgacaacgccatcacgcttaaggtcgcgctcatggtcaagcgttatctcacaaccaaaccggttaaattctgatcatgatagatttcaacaacgtaaaaaaatcctacccgaacggcacgcttgctctcgacggtgtggatcttcatatcgaggacggagagttcgtcttcatcgtaggtcattccggagccggaaaaacgaccatgatgaagcttcttctgtgtgaagaaagacccacatccggaaagatcacggtcggcgactatgagctgagcacgctttcgcgctttaaggtcccgtactaccgccgcgagctcggcgttgtgttccaggatttccgcctcttcccgaagatgaccgttttcgagaacgtggcatttgcgatgcacgtcgtcggtactccgtcaagggtgatcaagcgccgcgtgcccgccatactcaacaccgtgaatctgaccgacaagttctcctgcttcccgaacgagctttcgggcggtgagcagcagcgcgtcgcactcgcccgcgcccttgcgaacaatcccaagatcataatcgcggacgagcccaccggaaacatcgacccgcgcatgagcatcgagataatgaacctcctgctcaagataaacaagctcggcaagaccgtcatcgtcgttacccacgaaaaggggcttgtcgattactacaagcagcgcgtcgtcaagctcaacggcggaaagatcacggaagaccgcgtcggaggtatgttcaagtgagaagattcagtttgaaatacgctctttcgcaggcgtttcaggggctctggcgaaacggagtcatgtcgtttgcttcgatcgcggttctgatgagctgccttgtcgtcatcggcggctttgcgctcatcgtgcttaacataaacctcaatcttaactccctaggcaatctcaatcagatcgtcgtattcgtaaatgaggatatgacggaagaggatatcgtcgccgtcggagagaagatagcctctctcgataatgtggataccgtcgagagaataacgaagaacgaagccctgcgccagctcaaggctcaggcgggcgacaagcaggatgcctacgactacatcaccgacgaaaacaatccccttgtggatgaattcgtgatatcgtactccgaccccgcgaaggtggtcgatctcgactacgcgctcaagcacatggacgggattgccaaggtgaacaaccgcctcgacctcgcgtcgcagctcgagagcttccgctccggagtgctcatgatattcgtatggttccttgcggtgctcatcatcgtcacggtgttcatcatcgtgaacacgatcaagctgtccgtctattcgaggcggcacgagatcaccgtcatgcgctacgtcggcgcgacgggaatgttcatcgccgcgcccttcatccttgaaggaatcataatcggtatcttttccgcgatactctcatattttcttgagtggtatgcgtattattatgttgaacagaagatttcaagtgaccttcagatgatatccttcgtcggattttcggaagtatcgggttatgttctcggcggcttcatcgccctcggaattctcaccggtatcgtaggaagcttactctcgctgcgcaaatatctcaaggcttaacgcgcaccgtgctcccttttccgaacagaggcgccccctcgcggcggcgccgatgatcttctgcggttttccggcgatgtgccgccgggcaaagcccgaagaaaggaagtctaaggaaaatgaaaaaaacagtttcaaaaatcaaaaccaaaaccgtactgtacgcgctgtgtgcgattctctgcgccgcgccgctcatgatgtgtcccccgtcggtcgaagcatcgaacgacgccaccgtgaagagctacaaggaccagcttgccgatcttcaggcggagcaggaccgtctcatgaccgagatagactctctccgcagtcaggcggcgcagagcgccgaatacaaggcaagcctcgatcagctcgcatcgaccacgcaatacaaaatcgtcctttcgaacaacctcctgacccagctttccaatcagatctcgatgaccgaggattcgatcaccgaaaccgaagcgcagatgtcggagacgatgaacaaataccttgagcgcgtgaaggaaacctatgaggacggcaatgcgtcttatctcgagcttatcctcggatcgcagaacatcgcggactttctctcccgcatagacaggatcaatgcgatccttgaatacgaccgctcgctcatggacaaatataatgagcagaagcaatcactcgaggatcagaagaaaactctcgagaattcaaaggctgccgaagagaagacaaacgccgagctggcggcagacgaagcctcatatgaatctctctccgcacagcaggatgcgtatatttcaagtctcacgcaaagcgcggaagacaagcttgcaatgtataacaaggttgcggaggcagaacgtcagctcaacgcggagcttgaaagctacattcagcagcagcaggcacagaaccaggtcatctactccggtgaaggctttatccgcccgatcgccggcggaaccggatatgtatcctcgggctacggctggcgcgatctgtggggtcaatcggatttccacggggcggttgatgtcgcatgccctgccggtacgccgatcatggcatcgagcggcggaaccgttatacgcgcggaatggcactggagctacggaaactacgttataatcgaccacggagacggcatatcgaccctgtacgcgcactgcagcgcgttgctcgtctcggtcggcacgcaggtaagccagggcgacacgatcgcacttgtcggaatgacgggctccgcggacggtaaccacgtccatgtcgaagtccgtataaacggtcagcgcgtcgatcccaacggatatatcgcgttctgacgcgcgccccggtttacggggaggcgggaagtccggacgggcgaacgctcaaacgtgcaagcggacgaacgggtgaacggtcaaacgtgcaagcggacgaacgggtgaacggtcaaacgtgcaagcgaatgaaagagaaaaaaggcgggcggagacaaaccgctccgccggtccttcgcacgatatcaaaaagaaaggctgagattgtaagatgcagaagaaagtatcggtcggagtattcacggtgtgcatactcctcgcaatactgctttccgtcatgacgacatttgtcctcacgcgcgaaagctttgtcacgcgcgcacgcacatcggacaactccgccgaaaatctcgccgcgaagctcaccgagcttgacggcagattcaatcagcattacatcggtgaaaccgattacgagacagcggagaaatacgtcatgtcggcgtatctcgcgggcacgggcgacaaatacgccgcctactacaccgccgaagagtacaaggagatgatgagcgcctcctacggggattccgaggggatcggcgtatccgtcatctacaattccgaatacggcgtgatacagatcgtcgagattttccccgattctccggcgcttgccgcgggacttgagatcggcgatctcatcgcgtatatcgggatcggcgaaaaccgcgaaagcgtggcggaaatcggatatgacgcggcgcttaccaagcttcgcggagccgccggaacgactgcggaattcaccgtagtccgcggcgaaaactacgaaaccgaagtggaattctccatcgagcgcgggcattactccgaacagaccgtcctctctcgcctttattcgaaggacacaagcgtcggcgtgatccgtatatcgcagttcgagggtgttacccccgagcagttcaagaatgccgtctccgagctgaccgcagagggtgcgaagaagctcatcgtcgatctgcgcaacaatcccggaggcgaccgtgattcgatctgtcaggtgctcgactgcatcctccccgaaggtcctctgctccgcgtgaagcagtccgacggcgagatcgaggtgacaaacacctcggacgcatcctgcatagatatcccgatcgcggtagtggtaaacggaaacaccgcaagcgcggcggagctgttcacctcggcgatgcgcgactacggccgcgcaaagatcgtcggtacgacaacctacggcaagggatgcatgcagaccttctatccgctttccgacggaagcgtattcaaggtcacgaccgcgatgtactatccgccgtactccgacaactacgacggagtcggcatcgtccccgaccgcgaggtcgagcttgacgaatcgcttcacggcaagagtctctacgtcatcacggacgaagaggacaatcagctggccgccgcatacgatatactgaaatagcaaaaaatcaaatggaaataaagaggtagagaaatggctgaagaaaagaaaacgctttataccgaagaaggctttaaggtcctttcggacgagctcgattatctgaaaaatacgaagattcaggaagtcaaggaagcgctcaaggaagcgcgcgccttcggtgacctttccgagaacagcgaatacgatgaagcgaaaaacgagcaggcaaaggtcgtttcccgcatcgccgagctcgaagagctgataagcaacgcgcagatcataagcgaaaccgaaattcaggaggatgttatcaacctcggctctgtcgttcaggttcacgacttcgccttcgatgaggatatcgaatactacatcgtcggctcgaacgaggcaaatccgctgctcggcagaatatccgacctcagcccgatcggctccgcaatgctcggacaccgcgcaggcgacgaggtgattttcgaggctccgaacggagaggcgaagatcaagattctgtccgttcacagggcgaacaaggtctgaccgaaaacggtgaccgcacggcggcattttaaccggcattatgtgcgtcacgtcgggcaagcgaaatcggtcgcatttccctcacggtcaggctgcgcttttgcccgcccccgcctgacgcgccgttccgggcacggcgcggcttttcttttgcatataccagacgctttttcggcatgacttttccgccgctgcacaatacggagctcttttgcagcgacttttgcatggttctcttatgccgcatccggtgatcacccggcgcaccggcaaaatgccgcaatgataccacgaatccggtgcgcaccgtacaaacggtgcgcacacacggaaccccgtaaccggcggctctgccgatcggtgtattatccgacggcaagcgttggttatttttgccgcccacggcggaggaatggagaaattttatcatgaacgaaaacattgaaaacaccgcggccgagccttcgctttccgaagtccttcagattcgccgggacaagctttccgctctcgtcgccgcaggacgcgatcccttcgagaaggtcagattcgactttgacgcatacacgaaggacataaaggacaatttcgacgagatggatggcaagaccgtccgcatcgccggaagaatgatgagccgccgcgacatgggcaaggcaaacttcatcgacatcatggacgcatccggcaggatccagtgctacgtccgcataaacgatgtcggcgaagaaaccttcgacgagtaccgcaagtgggatatcggcgacatcgtcggcatctccggcacggtgttccgcacccgccgcggcgagatctccgtacacgtttatgagatagagcttcttgcgaagtctcttctccccctgcccgagaagttccacggactgaccaacaccgatatgcgctaccgtcagcgctacgtcgatctcataatgaaccccgaggtcaaggacaccttcgtgaagcgcagccttatcctccgcgagatccgcgcttatctcgattccaagggatttctcgaggttgacaccccgatcctcactccgttcgagatcggcgcgtcggctcgcccgttcgtcacgcatcacaacacgctcgacatggatatgtacctgcgcatcgagacggagctttatctgaaaaggctgatcgtcggcggattcgaccgcgtatacgaggtcggcagaatcttcagaaacgagggcatggacacgaagcacaaccccgaattcacgacggtcgagctttaccaggcgtacacggattacaagggcatgatggaccttgttatcgaaatgaacacgcagcttgcggagaagatctgcggcacgacgaagatcacataccagggcaccgagatcgacatgggtcattgggaaaagctgactatggcagaggcggtaaagaagttttccggcgcggattactatgcgtgggacagcgacgaggcggcacgcgcgtgcgcgaaggagcttcacgtcgaggtcgccgaaaatgcgacgaagggcaccgttcttgcggagctgttcgacgcatacgtcgaggaaaagctgatccagccgacgataatctacgattatcccgtcgagaacagccctctcgcaaagagaaagccgtccgagcccgccttcaccgaaagattcgagtacttcattaatgcgaccgagttcggaaatgcattctcggagctcaacgatccgatcgatcagaaggaacgcttcgagcgccaggtcgccgcaaagcgtgcggaggatccgaacacgaccgcgcaggtcgacgaagactacgtcaccgctctcgaatacggtcttgctccgaccggaggactcggcttcggcgtagacagactcgtaatgctgctcaccgacagcgcatcaatccgcgacgtcctgctgttcccgacaatgaagcccctctcggactaaaaacccacaaaaatcaggttttgacagcgtttgcggcgttttgttaatccaaaaaaatgtcgtaaaacgggggttacgacaaatttacgacaaatgaccttttgagcatcgctcgtcttttacgacaaatgcgtgtcgtaaatcacgagaatcgtaaattgttaatccagtggcttcattgtaacggctacattgtaaattgaacaaaaaggccttgtaaactcggcatttaacgatgtttacgacagaacctcggactgtatagttcggggttctttttttgcatatttgaagctggcaacgattatggatatactgtagtcgaatggagggactacaaatgaagaagtattatatcaatctgaccgagcaggaacgctctcaaatcatacattcgcttatagataagaagaacgcacttatggatcaaggcagatacaccgacgctgttgatgaagtcatcttaaagatgatgaaggcaaagaaaaaggctttcatagtgcgtactgtttcgtagtcatttccttttcaaaaaataaaatatagagctatataagcaagccgcttattcctttatcgggataggcggcttttttcattttcccaactcaaaaaaatttttcaaactatttttcaaaaacacccgataatttgacctctcccagtccgaacaagtgaaagggttatttttaactccgattaggagcaactctttcactgttccttgacaactgaatatataggcacaccggactttagttctgatgatgagccaccttatcgggtacgccaagacctctgaaacggagcgagcgagaacccccggtaaaagtgtcaggctgcacctgatacggcgatgacagtcagaatgataatgatacttctctacggagctggcggagaacccggcagaggtgaaattcctatgacacggtttcgcaaaccgtgaccgatgtgcttcccacacaaagcaacagctttacgcagggggtgttgaaaacaaatactgcgttgatacatagccgtctatacacagtcggctataaatctatcgaaaggaggaaagccaatgcctaactgtaaaaccattgctatctgcaatcagaagggcggcacaggcaaaacgaccacaacggttaatttagggatagggcttgcaaagcaaggtaaaaaggtactccttgtagacgccgatccgcagggcgacctcacgacctgtcttggatggaaagataatgacagtctgccgactaccattaccaccaagttatccgagataatgcgtgaagaaaacggaaacccgaattacggtattctgcatcacgaggaaaatgttgatttgcttcccgcaaaccttgaactgtccgctatggaaatgatgcttgtaacgactatgagccgtgaaaccgttttgagaacctatctgaataaggtaaagaacgattacgaatataagcagggcttatataaagatattgcagcggagacgggtcgcagtaaaatgcgcttcgcctttcccttttctgccgtgtggtaaccaaaaagccgcaaaaaacgaatccatcgatttataaaccgttgcgtttttgcaagaaatgtgctattatattctcaacagccaaaatcgactgttcctgttttctgagtaaatcctgtttgaatcgaggctgacggtatggatataagttacaaaaaactctggaaattgctgatcgacagggatatgaaaaaaaaggacctggaaaaggctgcgggcatcagcaactatgtcatttccaaaatggtcagaaatgaaaacatcacggttgaaaccgtgggaaaaatctgcaaagcgctgaattgtacgccgaatgacataatggaattcgtgtccgacagcgagacttgatgatgcttttgtatgccgtctttggtaaatgcacatttggagcctcccagccgagaaacacataaaatcgccaatggagcgatccttgtctgcgagagagaaagcgagagattcacccgatgaaacggaaaacgaaacggctgctcccgatgatccttgtttttacgatcattgcggcggcttattcctgcaggatgcttgccatgtcagacatcggcggtgattgcataagctatatccgtgcggcgctttatttgctgctgtttgccctgtggggcttttccctcgaccggcgcattatacagacgcaggcgctgcactgcatgcgtttgacagccgctcttatgcttgtgtggcttgttttgcgcacactgaaatatgaagttgtcaccgacttaacagcagcacggtacatttggtatctttactatctgccaatgcttttcatcccgttgcttggggtgtacattgctttatctctcggaagatcggaggaattccgcctgaccggaaagatgggtgctttggccatcattccggctgtgctgtttttgctggtgatcaccaacgatctgcaccagcaggcatttacattcagcagcggcgtgccgggagaaccggacaattattcctattcccacggtcccgtttacttctgctgcctcggttggatggtggcctgcatgtttttttctcttaccctccttttgaagaaaagccgcattccgggcaacccgaaaaagaagatcacaccgtttgttataggctgcgcaacggttctgtacgggatcttgtatctgtcggggctgccggctgtacgccggtggttcggcgatatgaatgtgatgttttgcctattatatgcggcaatttatgaaagctgtatacactgccggatgatacaatccaatacaggctatgtcgagctgttcgaggcaacgacactggctgcctgtattgcggatcgcaacggaaatatcgttctccgttcccgtgccgcaggtgaagatatggtttgcccgaaggaggggctccaggttatccgccccaacggaatacgcatttcttcggcgccgatccacggcggatatgccgtttggcgggataatgtgcgcccaatgaccgagctgcgtgcgaagttaagtgaaaacagatcaaaaataaaaaataacaaagagaaattacatgaagcttatctcatacagaaaaagctgaatgagttgactgaaaaaaaccgtatttatgatgaattggaggaaaagtacggaaagcaaataaccagaatcgggcagttgctgaaacaatgtgagaacgccgagcctgccgaagttcaaaacctgctgaaaagaattcttctgctcggcacttacatcaagcgcggtgcaaatctgtactttctaagcttggaatatgagcttctgccgcagcaggagctccggttgactgtagacgaggcggttagggtcatgaccgtttgcggcacggaatgcagtgcggtttatcataccacgaagcccatgctcacgtcagaggtggcacgtttgtttgatcttttgaagacagttgcggaaacgacgataaacgggctgcattctatgtttatttccgtgtccgacagcaagatggatctgtcggtagagtgtgctgccgatctgtcattccttgtttcttcgaatgtaacggttaagcaggaggacggcttatggcttattcgcacactgataggaggtcataacggtgcgtaaaatgaaacacctgggctttaatgccattaaggaaagctttgaccgacttcacactgcggtatgcttttttgattgcacgggcagtattgttctctgcaaccggcagatgtatcaattgagtcggtatctgcttgacagcgatgtgcagtatctcggtgaacttgaagaagcactgtctattccttcagagggcattgtgcagattccggatacggagaatgcctaccgttttccggataaaaccgtatggaggtttgaaaaaacgagggtcacagatcggtacggagagacctatatccaacttaccgccgccgatgttaccgagttgcatcgagctttggtattgcttgctgacgataacaagaagctggaggaggattcggaaaagttaaaacagctttccgataatgtcggggcattagcgcgggaaaaggagcgacttgccgcaaaatctgtcctgcacgacaaccttgccgcatgcattacattgacaaagcagtacataacgggagactttgatggtattgatacggacactgtgtgccgtgagtgggagaaagttattgcatttcgggatgcgatcggtctgccggcaaagcaaaagctgcttgacagtgcaaagaccggcggcgtgaccgtgagaataagaggcaaagaaccggcgggcggcggggcagagttaatgtacaccgctatgcaagtctgcttgaccaacgccattcagtatgccaaagctaccgagatttctgcaaacatttgggaaaacgaagacagctatacagtgatgatacgcaataacggcaagccgccggagaaaaagatcacggagggcggcggtctgtccaatctgcgccaccggatcgaaaattcgggcggaaagatgacagtgcagagcttaccggagttttccctggtgattgagataccgaaatacgaaaatcaagagagggagtgacacacgtctgtgagaaaaatactgattgttgaagaccaggcactggcaagaagatatctatgctcctgcgtagaaaagtgtacagactgcgaggtcgcgggcacgctttcccgtgccgatgcggcgcttcgccgttgcggagagggtcacatcgatctggttctcatggatatatgcaccgaaagcgactcggacggtctgactgctgccgaatcaatcaagaagctctatccacggataaagatcgtcatggttacttctatgttggagggacgatttcttgaccgcgcaaaaaagatcggtgccgacagcttctggtataaggattccccttcaggcgaccttgtgaatgtaattgacggcactatttccggtaagcgcttctggccggacagtgcgccgagtgtacggctcggcaatacgctttcctgcgaactgtccgaccgtgagatagagaccctgcgtctgctctgtgagggaaaaacaaatgccgagattgccgtaaaactcaacgtggctgaatcctcggtgcggacctacatcagccgcatgttggaaaagacaggttatacaaaccgtaaccgcttgatgatcgctgccgtcagcaaacggatggtcgtgcccgggtgctggcttgaagaagaagaaagctaatatatatgcaacaaaagggatagttatatgcattcactcacaaccgccctgctttttataagcagggcggtttttctgcttttcggagaaaaagcggccgtgcgttaacaatttgtttacaattcatcctgcatttgtcctcgcttttggggacagacaagaccgctttattttgatataataatatcggaaaacaaaaggaaacagattcatcggatatatcacaaaaggaaagggggggggttcgatgaataaaattgtggtcgatatgcagaattttctgtttggcgattctgtagcggccgctttcaagaattcggactatgatattgacgtagttcgtgcggagtccccgaaagatacagtcgaactttgccaagtgtataagccgtttcttcttgtgatggaagtgacgggatacactccgtggatgctgtgtgagaggctgaaactccgagacgaagtaaaagcggtgtgtcccaagtgcaaaattgccctcattgttgattccaacactgaaaaacaggcagcaaaggatgttcgtgatgccaagaaaaacggtcttatcgatcagtttttctacagttctatgaccgctgaatatttgatggatcagatttatgcgatgtgatagcattgtgaaaggagaaaacagaatgagaatgagaatgagaatgaaaatgagaacgataaataaaagaggactgctcagttttctgttaacgcttataatgattataggtgtgttgccgctgtcggcgccgacggtcagcgcggaggacgatacggtggaggtctccacgtgggaggagctgaaaagagctctggaatatacaacgtcttgctcagtggtgaaggttgtcgcggatattgaaacaaaagatctcaacggacacaccggtctgcatcaggacaacatcatttttatgacgatggcgatggataaggtgctggatctgaacggacacaccgtcaatgcgtatgttaaatactattcggaggtcgggcagggatatctgatcagtatccgccacgcggatgcccggctgaccatccgcgacagcgtggggggcggcgccctggtcggtgagtttaatcaggaattcctttatcagttcatcgatgttaataaaggtacactggtcatggagagcggcatagtcaaaattctgtgtccctcccgcgatgatcggtacacgaaatgtgccgtcagcgtctccggcacggcaattttcaacggcggcgaggtgcagacgcaggtgaccagtcccaacggagaaccgaaagacctcatcttctcccgtcggctgcaagccatcaggggcgaaaaaggcggcagcgtcaccatcaacggcggcaccttcgaccgggtggttctgcacagcagccccacgccggagaatttgggaaagtatgagctggtggtaaacggcggccttttccgccggtcgatcgccatgatattgaccggagatgtctatgccagccatttcgatcatctgcctatgaggatcaacgacgcgtttttcatgcgcaccaccgatccgacggatcagtgccgtctggcggtcggcgggaagccgaaatggggatatttcaccacttgggactaccaatttcataacgatattccgggcgcgacctttgaggaagcatggaatatggagtgggatctggtaccgcatcttatcagtgaaaacggcgcggttttttccgatgtacatgacggcagctgttatgtgcggggaaacataaatcaggtagttgaagacggcggtccgataatggtcctgcagaacgagatgatcggtgttcagggcagcattgtacgtgtgctctccaatgccttcggagtgaaggaggttctgctggacggcgagccgatagcgtgcggagagcgggtattcaatgcgccgcaggtggataccaccgcagagaatgagcacaaggtgacgtttgttatgtgtccgatatctcctgtgctgcgttcggtcggatacagctatccctacggagccgggtatggatccagctatgtacggctggtcgtcgaggatataaaagggcaggatactcatcattacgagttctcggacaacgaggataagccgttttcgttgagttaccccatcaatgaatccgatgtggatacactaacctcgatagagctgcagtatacccttatgctggcggcaaacggggaaaggaagccggttatgcacggctacaaaggtgcaaaggtggcgcagtgggtagatcggtctcaagctatagaggatgtctatttggatatcagccagcccttggtgcagggtgattatacaagcggagtcattactgcggacgaaagcgccccttataccgtcgaggatacggcgggctactgggaacatgaggacatttgggatctgaacgggaacagccccgttcccgcgacacccggcgatgagtattatcgttccttccgggtacgcatcggggagggttatgataaatataaattcgacaagaataacccgccgaagatcaagatccgggggctcaaccgggaatgcgacaaaatagtcgttcaggtcgcgagcgacgaaaagtccgtgtgggtgtccctgaccgcccatccctccgagctgcttcaaaacgcatggggcactgtcgtcggactgcgagcgggaagtccggtcggcggggtaagtattaaaccgaaagacagttattttgattttaacataacggagatccagcgaattgaaaacggcaccgtctacagcacaaacccatccgatttgatcgatcctgcctacacctatcgagtcaacgtggtgggtgtcggcaagaagaacatgaccttccgcaacggtccgcggcagtatgatataacgtttggctattatctcaacacgaacgtcaggctgcggatgaacaacgattttgacaccgccgcggactataaagaggtgtcgtatgatacatcctctcaggcatattccattgatctgacaccggagccggatgttacctgctacgaatatctgtcgttgggtgcgccctatccttgggcgggtacctgtccggaatacagcaattatatgatcacaggggtgccgggcggcatcacggttcgaaattattcctggttcgatgttgaaaatgcagcgcagatggaaaaggatacgccctttgtgtccggcaggtcgtaccgttttgaggtgatcctggattgcgaggagggctattacttagccgactccgaagcgctggatgccttcgtgaacggaaaaaaggcgcaggtctccgaagcggcggacaacggcgttgccattacgatcgaatattccgataccgtttcctcgggcttgcgcggtcaggtggtgagcttcgcggacgacagcaatgtgaccgtatccctgtttgccgagggcagtacggagccccaatacactaccattgtgcctgcaggggaaaagagcggcgggaaatacaccgctgtctacgaaattcccgatgtttcctccggcagctacaccgtgaaggtgtcgaagaaggatcatgttaccggtgaatatgaggtaaccttgggcgcagaggcagtggaacaaaatgcggaaatctatcccgtcggcgatgtcaatcaagacgggaaggtgaacatgaccgacatagtgcttttgataagatatcaggcgggatggagcgtatccatatatgaaaaagcagccgacatgaatgcggattcaaagataagtatggctgatctcgttctgatgattcgcaaggttatgaaataacgcagcacagccacccccggaccggcagtccggatcgtatacgcaaaaatctccggctgccgtaaagcttgattaagcggtgtccgagtacaaaacgaaacgaaaaaggagattgataatgaatactgcaagaaagaaaaacagattgttaagctttcttttggcacttgtaatgattttcggaatgctgccgttggcatcgcttctcccgacccgggtcgctgcggcttcttatccctcctccctaaataaattggtggagggaaagaagatatatgaaggctaccgttacagattctattcgaacggtacggtggaatcatacacatacaacatagaccccgagtatactgattacagcacgcagctcaagttcgttaaagaggagccgggacttgtaaagtatgtggcatactcaaacggcgttatcctgtattggacgaaaagcgagaatgatttcctggatctttcggagttcaaaggtctgacgctgtcgctcagattttttgacaatatgaagctctccgccatatatgccccgggagtaaatttgaagcttggattgttcctggacgcctatgtccaattacgccacagcacccgatataaagacaagaccggtttctgcccccaaaacggcacaaccggcgcggtcatcgatctggctcagacggagggaagtctgggtgattgcggaacctttgagctgtgcggaaacggggagctgtttatcaacactcgaaatgcccctaaaaaaaccagccccgactatgcaattgtggcgaaaagcacggcaatacgggacgatgtttctttgagcattgcctgcggcaacagtcacagacaggcagtcagtcttattctaacaaccgctcttaccgttgacacaaccaaagatgttcatttcggtatatacaatacctttgccactgcaagtgcgtggagctgtcatatgaacagctgtagctttctcaatgcgagaaatttttatgtccgtgtggcactcggcagcaatttctggaagatttttggcgacaacggcgaatccgatccggtgaaagtgtttaaaaattaccaaaaaaacggcaagatcggcaaagagtggtcgatgagaggtaatacggagagcagtaatcaatatcttttcaccatggatcacggcaatgatgacccgcggatacgcttcaatctcaacctcaaggaagtgaagaataacgatctcgtaagggatctgaaggcgggactgggctatgagatgtctgcggaaatcctgtatttgcccgagtggatgcaaaagctgaaggatgcgggaagaattgaattctatttcttcggccgcctgtgtaatccgggcgtgcaggagggctatgaagccgcctatttgtctgacttttatgtggaccgtaccggaagacaccgtatagagttctactgggtctgcaagtcggcgaccgatccggacaacgataccttcagctctacgggtcagctgaaggattatgaactcacgaatttgggacccctttattatacatataccttctttgatgtgctgatgaacgatgaggtcagcggtacacgctacatatggaacgtaaagcttcagcaggcgggcggcgaattcaccgaagcaaccaacaccagccacaagatctccctgcatccggatacattggcgaaatgctatcccaatttgcaattgggtatcccgtccgagtggaagtatagttccgattcggatgcgtatactatgtacttctggttaaacccacggcacggatacgagtttgccccgtcgtctgcgacggcatccgacggagttacgctgaatgtgcagcataccgaggttacaagaagatcgatcaccaatggttccctcaaagccctcgttatcgaccttgtggcgaagcggaagctgacggatgtgagcggtacgctcaaaaacttccgtctcggcatcgacgccgggttcacggagatcgtatcaaacgattcgagtaagtataccttccagaatacggtggtatacgatcccggctatggctcctcttacggagtagaggccggtcaattgtgcaaagacgatatgtgttatgtctacttcgacataaagccggagtttggctattatatccccgagaacgctccggtaaaggtgatcctgcccgcaggctacagagccaacgggatattcgacactgcggaaacatacagcacggtctataagggcgattggatcagctattcaccgataaaccagaaataccgggtctcccaactgttggagccgaacagcgagggaaaggaatacgggacagatatccgcatacaggagcctgtggtgggggactgccctgttacccttgccggctatgataaaccgttaagcctgccgcaaaatatgaaggtgctgtcgatgcaatggctgggacccgataacgaaccaatgaggaaatttgacaaatttgagctcggaaaatattataccctcgatcttagtatcggatttgagggcggcgaagaaaagggctatgtattcccgaaaaattggaaagagttcaaggtgaacggtaagagcgtaaacgcatggatggaatatgaggactctacagacgggcatgtctggcacgtgtatcacccctataagctggttgaccccagcgccatgggcactgtcaccggcacggtagagagttacggcgatcctgacgaaacaattacaattcaactggtaaacagcggaaacggggaaccggagtatattacgaccgtcaccggcaacagcaccgaatattctcttaccggcgttgaaccgagatcatatgtaatgagagtcgaaaaaaacaagcacatcacggaagaatttattatgcaggttgaccccggtaatgcagtccgtgatatacagcttaaccttctcggagatctcaatcgaaacggaaaggtagacatggcggaca

SEQ ID NO: 2087 - DNA, 6389 bp, Unknown
  16S sequences of unknown bacteria
gagaaaaacaggccgtacaccggcggcccccctccggctcgttttccaggccgtgggcctgatggaaaaaggcatccggttcatacggcccttcccatagcacgatgggtcgaggcagtaccatttggcggagcaggcggcgctgttcacgcaggcggtgctgatactcctctgcgggcaaaatgttgggattgtagaaaaaaacagtgatgtcaaaatgcggcgccaaccgctctagcacggcagagctgcaggggccgcagcagctgtgcaaaagcagggtggggcgggatccgctgggcaaggattcgatctgcgcctgcatttgccgatcataattgatttggttcatgatgccacatccttttgcccatagtgtaaaacggccaatcggttttgtacagaaaaaaagggccgaaaggcccttttgaatgcgaaaggatcagctgtgatggcctccgcagtgctcatggccgtgcgcgccatggccgccgcaatcgcagttgtgctcatgctcgtgctcaccgtgatgatgggtgcaggtgggcaggacgctatccttcaaggtgccgtctaaaaacgcctgcacagcggcgtcaatatcgccggaggcgcccgagacgacctggatgccctgatccaaaagcatttgcttagccggggcgccgatgccgccgcagatcacggtatccacgccgttgtttttcaaaaagccggccatggcggcgtggccgctgccggtagcatccaacagcacgggcgcagaggcggctttgccctctacggtaaatactgcaaaggacgggcatttgccaaagtgttgaaacacctggccattttgtgcggtaactgcaagtttcatatttagcactcctttcaaaccttttctacggcttctaccgcgtttttcaacagatcgccgccatacagctccaaggtgccctggtcgcaggcacgggccagctgcggatcgatgggcaggcgatccaaaatgcgcagattatactgcaaggcggtttcttccagatggctttcgccaaagagctggatgtgcttgccgcagtccggacattccacatagctcatattttctacgatgccgaggatggggacctccatcagggcagccatattgacggccttgccgacgatcatggagaccaattcctgcggagaggtaacgatgatgatgccatccagcggcagagactggtacacggtcagcggcacatcaccggtgccgggcggcatatcgatgaacatgacgttgacatccttccacagcacatccgaccagaactgtttgacggtttcgccgatgatggggccgcgccaaacgacggggtcgttttcacgatccagcaaaaggttgatgctcatcacctggatgccggtgctggtggttacgggatagatggcgttttccgtacccaccgccttttcttttaggccaaaggtgcgggggatggaagggccggtaatatcggcgtccaaaatggcggtggtgtgcccggctttgttggcagcgatggccagcagcgacgtgaccatggatttgcccacgccccccttgccggatacgacgccgatgaccttatccacacggctggcggggttcaaatcggcacggaactgtgctttggtgttttgtggattgctctggcagttgcctgcggaagggcagccttcgcagacgtggttgcattcttcactcatgttgggatccctcgttttcttgattttcgctggtatgcggcagcctgcaatgctggcaggcggcctggcaggtacagcccggatggtgcagctggtaatgcccgccctcaatgcggatgcctttgccgtgaaccagggcatcggccatctggcggcgcgcgccgtacagaatgcgctgcaaggtgccacgggaaatcatcatctgctcggcggccttatcctgatcaaacccctctaaatcgcaaaggcgcagggcctctacctgctctacggtgagcacgacgaaagcgcagggcgtttgctgcggggtaaataccgcgttgggcggcagcgcgcagacgcggcggcatttgctggtacggggcataccgatcacctcctatattgggcatatgcacaaattatagaaccaagaacgcaaaaagtcaaatgaacgcagcaaaaaaccgggaaaagagcaagttgctcctttcccggctaaaacaggaagaacggttagtcctcatcctgcaaggcggcggggccttcttccccggtacgaatctttacgacattttccacatcatagacgaagatcttgccatcgccgatatggccggtgaacagggcgtttttcgcggtctgtatcaccgtttccaccggaacggtggagacgaccacctctaccttgatcttgggaagcagcgccatttccacctctacgccgcggtaaaattcgccgtgccctttctgtacgccgcagcccatgacctgggtgaccgtcatgcctgtgacgccgatggcattcaacgcgctgttgagcgcctcaaacttgttccggttggcaacgatggcgaccttggtcatcttaagcccaggatcgacgcggccggaggcggtgtggacctcgacgggtatggcggcgtctaccggcgcgctctggccgacaaagccgttggtgggcataaaatcggcgtagctgctggccaggccgtgctcggtaatatccaggccggcgatctcctcggccggggacacgcgcaggccgacggtttttttgatgagggtatagatgatgaccatcatcaccgtgacccaagcgatgacggagacaacacccagtgcctgcacgccgaagaacgagaagccgccgccgtagaacgcgccgccgtctgtggcaaacaggccggtgagcagcgtgcccgttgcgccgcaaaggccgtgtacgccgatggcgccgacggggtcgtcaatcttcagctttttatcgatgaattcgatgccaaaaacaacgacgaacccggctatgaggccgatgcaggcagcgccgaaggggttgaccatatcgcaccctgccgttacagccaccaggccggccagcgatccgtttagggtcatggaaacatcgggttttttgtagcgtacccaggtgatgatcatgacggccagggtggcaacggcggccgaaaggttggtggttacaaaaatgttggacatggacaacagcgattcatcgccggtcgcggatacagtggagcatccgttaaagccgaaccagcaaaaccataggatgaacacaccgagcgcgcccagggtaaggctgtggccgagaatggcccggggctttccgtccttgccgtatttgccgatgcgcgggcctaccattttggcgccgatgagggcggcgacaccgcctaccatgtgtacggcggtagagcctgcaaaatcgtggaagccgagctggctgagccaccccccaccccagatccagtggccggaaatgggatagacgacggcgctgatggcaaggctgtataggcagtaggctgaaaactttgtacgctctgccatagcgccggatacgatggtggccgctgtggcacagaatacagtctgaaagatcagaaaggccatggtagggaaggtagaatcataattgccctgcacaaacaggtccggaagcccgatgaagcccccaagatcggtgccgaacatgaggccgaagcccaggacccagaaaacgggggtgccgatgcaaaaatccataaggtttttcatgacgatgttgccggcgtttttggcgcgggtaaagccggtttccaccatggcaaagcctgcctgcatgaaaaagaccagcgccgcgccgatgagcacccacatggtgtcgacggaagagaacatagtgcatacctccttaaacgaaaagataaaaatataaaaaggcgtgcggcggatacgattggggggagagaagggatgtatccgtcacacgcctttgtgcaaaaatatggaaaacgcttaatttacgctgaacagcagatcgctgtatgtggggaagggccaaagggccttatcgacaagcggctccagctggtctgtggcgctgcgcagcgctgtcatggcggggatcaccttgtcgcggtaatattccgcctgggccagtgcgccgtctgccggtgcctgggccagcgcattctccagcgcctctgcctgccgactgacagcatccagcagcgaggaaagccgatggatcagagaccgctccgtttcacagggcagggaggaggaaattgtcatcttggccgcggcggtttcggtcagctgcttgatatacgagacaacggccggcacgatctttttgcgcgccatatccagcatggtaagcgattcgatgttgagaaccttgacatagttttccagcagaatctcatagcgggaatgcatttccggctctgtgaagatgtggtgccgggtaaacaggtcgacgtttttttggctgatgtaatgcggcagcgcatccacggtggtgcgcagattgtaaagcccacgggccgccgcttcctccacccattcgtccgcatagttgttgccgttgaagacaatgcgcttatgcgcggtataattctgcacgatgagattatgcaacgcagattcaaagtcctcgctctgctctagctgatcggcaaactggcgaagggcctcggcgacgatggtattcaaaatgtagttggggcaggcgatattcagcgaagagcccagcatacggaactcaaacttattgccggtaaaggcaaagggagaggttcggttgcggtcggtggtgtccttggtaaagctgggcagtacatccacccctacgctcatcttgcacttgctcttttcgctgtatgcgcgccccgcctccaaagcgtccaaaagctctgtcagctcatcgcccaaaaacatcgagatgatggccggcggggcttcgttggcgcccaggcggtgatcgttgccggcggaggctacggagatgcgcagaaggtcggcatattcatccaccgctttgatgacggcgcttaaaaacagcaggaactgcgcgtttttggagggcgtgttgccgggctccaaaagattttcgccggtgtcggtggagatggaccagttgttgtgcttgccgctgccgttgacgccatcaaagggcttttcatgcagaaggcacaccaaaccgtgctgggaggccacttttttcaagatctccatcgtcagctggttatggtcggaagcgatgttgctggtggtgaaaatgggcgccagctcgtgctgggcaggggccacctcgttgtgttctgttttggcgagcacgccaagcttccacaattcgtcgttgagatcctccataaaggccttgacgcggggcttgatagcgccaaagtaatgatcctccagttcctgtcccttggggctgcgcgctccgtaaagcgtacgccctgtgaggatgaggtcttcgcgctggttatacagcgcttggtctaccaaaaaatattcctgttccgggccgacggtggttaaaacccgcgtggcctcggtattgccgaataggcgcaaaacgcgcagcgcctggcggctcagtgcttccatggaacgaagcagcggcgtttttttatccagcacttctccgccgtaagagcagaacgcagtggggatgcacagcgtcttatccttgataaaggcatagctggtagggtcccaggcggtatagccgcgggcctcaaaggtggcgcgcagcccgccggagggaaagctggaggcatccggctcaccctggatcaggtttttgccggaaaactccatgatgacttttccgctgccgcagggggagataaagctgtcatgcttttccgccgtgacgcccgtcatgggctggaaccaatgggtaaaatgtgtggcccctttttcaagggcccaatccttcatggcgttggcgacgatgttggccacctcaggatccagccggcttcccttttggatggtttcctgaagggcctggtaggtcgctttgggcaggcgcgcctgcatgacggtatcattgaaaaccaggctgccaaacacatcggaaattgttttcatgctgatctgtcctccttaactgatcgttgccatacagggccggcgctaggggatggtggccgccgtgtggacgttgaaaaataaaaaaggcgccgtggcatacaccacagcgcctttgctgatggtggaagtatacgccgaaaaaaagatcctgtcaacccctttttggaaaaaatgcaagggaagctttggggaggggaaaggatgcaatacggccgcttttatcaatatagcacgcaatgaataaagaagaaaaaataattatatataagtaaacataataattagtgaaattttttcttcaa

SEQ ID NO: 2088 - DNA, 4502 bp, Unknown
  16S sequences of unknown bacteria
aatattataaaataaaaatacaaagttgtcaataggttttaaaaaattaattgagaggtaattgcagtatgcaaaaatcagaacttcccctttccgacacaacgctcagggaaaagatgctcggagctctatacggcaggtgcgcggggtgcatattgggggtgcccgtcgaaaatttttccgtggaaaaaatgcgggaaatagcggcggcgggcgggatgacgtatccccccgaggactattggacggaaatagaaaatcccgaaggtttgcaatacgacgtggaggcaaggaaaaactatgggcgcgacaggctgtgttgcgcgcctgtggacgacgacactacctatgtggcgctcaatttgctcctattggaaagatacggctttgagtatacgctggaagataccgccgcgatctggaaggaattgctgccgtatgcgtgtacggcggaggagcaggctctcaacggactcaatgcgggaaaggccgccgaaatctgcggggaaaatccctataacgaatggatcggcgcggcgattcggggagatgcgttcgggtatgtctgcgcgggggatccgtcggctgcggcaatgctttgtttcaacgacgcaaggctgtcgcatcggaataacgggatttacggcgagatgttcacggcgggggcggtcgctgcggcttttacggcggcggagcctttggaggcggcggtcacggcggcgaatctgcttcccgactgcgagctgaaaagacagctctattgggctttcgaagaaagcgaaaagatagaggactacctcgacgcgagaagaaagatcgacgagagattttccgatatgcactgcgtgcacaccatcaacaatatgtgtgcggtggtattcgctctggcgctgggaaaaggagattttacgaaaaatatttcctcttccatagccatcggtttggataacgactgcaacggagcgacggtgggaagcatcgcaggcgcttgcctgggcgtggataaaattcccgcctattggtacagacccttccacgataaatttcagacatatctccgcggtcatcgggagttttcctttgcggagatggcggagcggtttgtcgctctctataaaaagcgggaactgtataaaacaagataaaagaggacgaaaaacgaaaggtctatatgcaaaagaaaataaaaaaagaagaaaaaacaagagcttgataagcgaaaggaggtaaaaaatgacgggaaaaacaagatttgcggcgggaattttggccgtatcgctgggggcggcgcccctttgccgtgcggtcgccctttcgattcccgaaaggactgcggaggcggcttcgacggcgaggacgctgacgcgctcggcatatcgcgataaattgaaaggagcatggacgggagctctttggggcaattttacggggcttcccacggaatttgtctatacggatactcccaatccttcggatacggtgaattgggtggtggggaaacagtatgtcacggacgacgacaccagcctcgaatgggtgttcctgcatatgatggacgtctacggcgccaacgacatcacttatgcggatatgcccgaggaatggctctatcattttcaggactatatctgggaagggaattacaccgcccgcggcctgatgatgagcggtcttctgccccccgaaacgggaagtaaagaatacaataaagattggcgggacatcgacgcgcagatcgaatgcgaggtgttcggactgattacgcccggtatgcttttgaacgcaaagacccgcaccgagtggtggatggccgccgtgggcgacggagccgttttgaccaatgccgccttttacgcgatgctttgttcggaagcgttttttacgtcggacgtcataagcgccgtggacacggtgatggagtattttcccgcagattcggaaacgtatgccaccgccttgcgcgtcaaagaggtgcacaaagagaatccttccgactggcgcgcggcaagaaatattctccatcgggaattttacataaacaacgcgtatcaaccgtacgtcaatatagacagtcaaatcaacttcgcttcgacgctgatgagtattctgtacggggagaacgactttaaaaagacggtggaaatcgccgttttggcggggtacgacaacgactgcaacgcggcgactgcggcgacgatcatgggggcggcgtgcggcgaatcggggcttcccgccgaccttctggaaaagtccggaaatgtctatcaaaatacaaaccgtcccggacttcccgacgatacgatcagcggaatcgcggaaaaatgcctgcgtttcggggaagagatcctcctttccgcgggcggcagaattacgggcgaaggggaggccgccgtatacgaaatacgagatagagagttcgaaccgaaaacggacgatacgttatacaagaaaaagattcctgcctcagacaaagcatgggaattttcaggaatgtctttcttccataattcggaatatctgaacggaaagggcgcgggaacggtgcgcgcgggcgattccgccgaattgacgttcagcggtacgcaaatagctctcaaaggctgtacttcggtaaacggcggcacgttcgagatgtttatcgacgggaaatcctacggggacgtttctttaaagtctgcggaaacgtacacggcatcccgttttatctccatgtcgtatgcgcagaccctgaaaaaggtgcggggactttcggacggaaaacatacgctcagactcgtcagcaaggaatcgggcaagtggcacgccgtagactatgcggtgacggaatgcagcgaggaagaatattactcggatgcctctttgaatctggcccgtacgcccgccgcaacggtgatcggatccgttccctctccttggggcagcggcaacggcggcaatcataacctcggcgtcatctgcgacggaaattatttcacgggcgatttgcagtcgcagaacgacactttcctgggttatgacggcaacggaaaggaaatcgataagaatttcgaggattattacggctacactttctcccgggaattttccgtaaagcgcatcgtctttcaggagggcgcgcagtgggatcagggcggctggtttgcggacggcagtttgcgcgtcgaggcgctcgtggacggcgtatggacgagagtggaattcaccgcgtcgccgctttatccgaacggcagtacgcacgccgaattcggggaaaacggagaaatgtatacctttcttttgacgcaacccgtcgcctgcgaaggcatccgaatcatcggaactccgggcggcaggcaaaaattcgtatcctgcggggaattggaggtctattgtgcataagagcatttatgaaaataaacgcctgcgtttaggcgcggggataataacggcggcgatggtgtctttggctctgtcggcgggtctgcctgtggcgaagagccgggcggctgtcgtcggctatgaaaagaaaatggaaacggatgcggaaggctttaagatttcggagggctttcaactcgtcgaggacgacaaagcttctaaaaattggcagcacggcacctatgcggcgggcgaaagcatttcctaccgtttcttcggtacgggcgtcgccgtctacggcttttccggcgaagagggcggcgatttccaaatttcgctcgacggtgaaaaaaaaggcgaatattccgcttcggacgaagaggaaacctatcaaaaacagatcgcgcggctctcgggactgaaagaatcctggcacgaagtggaaatccgtacgctcagcgaaggaaagtggcacgcggtggattttctcaaaatcaacatcggtaaggaaaactataccgcgacttataatctcgcgcaggtgggaaacgtcatcacctccgtacctgcgccgacgggcgggggaaataaggacttgaacgtcgtcaaaaacgaaaaaatttatcccgtaggcacgtcgggcgtcggtcccgctcaatacgattcttacgtggcgggcacgggagaaaactatttctggatgggctacgatttcgacgatattctcaccttttccaaactcgtctttcaggaaggcgatcattgggcggacggcggctggtttcaaaacgcttcgtcgctcaaaatacaggtgagaaacggcggggaatggacgaacgtgcccctcctcaacgatccgggctatccggcttcgatctcgaataaagcggaggcgggcgagtcgtcggaaattttcgaatttatctttgcgcccgtcgaaggggacggtattcgcatttacggcaaagcgggcggcagcggacattttgtttccgtttcgcagatagaggtatatgctttggcggaagccgaaactttggcaggcggagcggattacagggacgccttaatatacgtatatacgggggagccgtatacggtgactttcgaatcgaacggcggcaccgccgtaccgccggagaaag

SEQ ID NO: 2089 - DNA, 11380 bp, Unknown
  16S sequences of unknown bacteria
tcttaagaagcggatttgtgacgcttaaagatatggcgcctatggcagtatggagtcctatgttcggcaatggacgggcatactatctgaaagccaatctgcaggaaaatacatatgacagttgtccgcggataggcatggtgtatgtgaatcctctgaaggtcatccagcagcacacagtctgtaaagagggagaactgctgccagagcttctgatcggaaccactgatggatgtgcagggcagagccttctgtttgattatccctatgcatataagttttccctggcggttgtgggagaggatggagaggtagaaacctatcattatgcagaagatctggaggaagcaggctacaaggatcgggtattcacatatgaggaagagactcagagcatccgctttggtgatgggatccatggagtgatcccgagacagaataaagatatttatgtgacagggttactctgctctctgtgcggcaatggaaatgtgcaggcaggagaactgaaccggtttgaagatccgaccatcagagcagctgtcagcaatccactgccagtggatggaggacaggatgcagagaccatccgtgatatgaaaaagcggatgcagaaggaattgttcattcagaaccggatggcctcacagacagattatgagacgatcgtaaagcagacaccgggccttatgattgatctggtgcaggtgatccctggaaaagaatatggcgtcatgcatcgccagaaccggagtgaaaatgaagtggttgtggtggtcaagccgtggagcgatgaaaaaaaaccagttttgaaagaacagtaccgcaaagccattgaggactatatcgaaccatatcggctgatcaataccaaggtgacggtggaatctgccagatatgcaggtatctgcgtacatggaaagatcgcattggagcaggattcgccaaagaccagaaaagcggtactggaacggatcagcagggagctttcttatacagaacgaaagcatccttttggaacggtgatctcttacggacagttgtttacagcactggaaaataccgaaggggtaaaaaaggtactggaactgaatctggagagaactggaaatgcagccagaaagaatgacagaggagacgtgcttctggatgcagatgcgctggggatcctggaggggacagatctggaattttgctagaaaggaggaacaccggctatgatggaagaaggaaaaaagattaatttttaccggctgggtctggaaaatggaagacggtaccggatggagctgacagatgaatacagacttaccggaacaggcggcggtgtgttcctgtatctggcgccagtttatgactccagagatcgggatggatcctggcatagactggttctggagggcgatttttatcgttgcaaatatgaagtattggtcatggcgaccaatgagaatctgacagagcagacagaaaaagcatgggaagagggcagttcaccggatctgttctggccggagggctcttatgtacggaaagtaaatacagatgattttctgctccatgaactgaaaggccggtatctatgggtactgatccgaatatcgggagctgccgttgacagtcatttctgtatggaaggatttcgtgtggaatttccgtggaccagtttttctggttatcttccggagatttatcaggaagccggacagaattcattttttgagcgttatatggcggtcttccagagcatgtacgaagatctggagcagcaggtagatcatctgccccggatcctggactatgagagcacaccggacgaaaatcttggaacgcttcttacgtggacaggaaagccttatggaggcgcagaacctggagcggagaagatccgtatgctgatccgggatttaagcaagatccagaccggaaaaggtacggtacgggtgatgaagcagatgatccagtttgttaccggtcgggacgcggtaatcatggagtattttaagtggcatgactggatgcgcagaggagccagccagttagagcggtatgagaagctgtttggaaaaaatgaagatcagttctgtgtgatcctggatttgacaagggaaggtcagccagtggtgccggaggagcttcagaaacttctgcaggaatacacgcctcttggtatgaacagtaatctgatttttcttgactggtccagccagatggatacgcactgttatcttgataaaaacagccggctggcaattccggagcgtgcggataccagtggattctcgctggatggaaattatgtacttggatgattttgatgcttgcaaattaagcgtcagccgtgtataatgttcaaaaatagggagctcaaatagatgggctgagagtagactttttagtcttgacctggaacctgatttggataatgccaacgtagggaaatacatgtcgcaaagaaatgcacttatgtgtcgttgctctctgttttgtgtgaactgggggcaccacttttcacagagtatgacaggcgccgaatgatatgctatgcgtatcattcggtgcctttttgctttttcagggtgtcagaacggtgaaaggagagcttgtcatggtaaagatcaatggagaagacaaagagattgccggaagaaatcttctggaatatctcaatgaagccggatttgaaacagaacgggtggttgtagagaaaaaccttgagatcatcccaaaagatcagttcggacaggtggtcatccaggatgaagatgtgattgaagttgtgagatttgtcggtggaggttgagagatgacaaggatgcagaaggaaatgcaggagcggatctccagggaacagctggatcaggcatttgatgccagatttccagaagagatgcggacaaaattgcgcaatgccagagtggctgtggcaggacttggaggattgggatccaatattgcagtgatgcttgccagaagtggagtcggtgagcttctgctggtggattttgatacggtggatgtgaccaatctgaatcggcagatgtatttgatccctcagcttggcaagccaaaagcagaagcattgccggagattctgtatcagatcaatccatatctgacatatcgctccgtgtgtataaaagttacaccggataatgtaaaggaactgttttcagaatatccgatcgtatgtgaagcatttgataagccggatcagaaagccatgcttgtccgggaactgcttatgcagtgtcctaagacgatcgtggtgtcgggaaatggtatggcgggatatgcagatgccaatgagatccgtacctgtcaggtaatgaaacgattatatgtgtgcggagatcaaagtacggatgttggaaatggaatcggactgatcgcaccaagagtggcagtctgtgctgcacacgaagcgaacaaagtgctgcagttgattatgcagacagaatcatagtttacgaaaaggggaagaaacatggaagataaatttatattaggtggtaaagaatttcacagtcgttttattttgggttcaggaaaatataatctgaatctgatcaaggcagcagtagagcagggaggagcagagatcatcacgcttgctctgcgccgtgccaacacacaggaaagtgaaaatattctggactttattccgaagggagtgacactccttccgaacacctcaggtgcaagaactgcagaggaggcagtccggatcgcacgtctgagcagagctatgggatgtggagattttgtaaaagtggagatcatgcgggatgcaaaatatctgttcccggataattatgagacagtaaaagcaacggaaatccttgcaaaagagggatttgtagtgcttccgtatatgaatccggatctgaatgtggcaagagatctgcagaatgcaggcgcggcagctgtcatgccgctggcagcgccgatcggaagcaacaaaggtcttgcaacgaaagcgatgatccaggttctgatcgatgagatcgatctgccgatcattgtggacgcaggaattggaaaaccatcccaggcatgtgaagccatggaaatgggagcagcagccatcatggcaaatacagccattgctacagctggaaatgtaccggagatggcagccgcattcaagcttgctattgaagccggaagaaaagcatatctgaccggaatgggaagagtccttgccagaggtggaagtgcatcagatccgctgacaggatttctgcattagggaggaacggtcatgaatgaagaaaatcaggtatattttgtagacagtgatacactgcctccggctgctcttgatagaaagcatcgtctggaacaggatccgtccttccgtaccaaccatatggaatacatgaaaggaatggagatcatacagtccgatatcaaggataaagtgctcaaagccatggatgaatttgattatgatgcttacactgcagcggacgtggagagggctctttctcatgagacctgttccgtagaggattttaaggcgctgatctctccggcagcagctccttacctggaacagatggctaggaaggcagaagaagtcacgaagaatcattttggaaatactgtctatatttttacacctctttatattgccaactattgtcagaattactgcatatactgcggattcaactgttacaacaacatccgcagaaagaagctgacttttgaagaaattgagcatgagatgcaggtgatcgcaaagaccggtatggaggagatcctgatcctgacaggtgagagcagggcctattcagatgtgacgtatatcggagaagcagtgaagatcgcgcggaaatattttaaaaatatcggtattgagatctatccggtcaatgtggatgaataccggtatctgcacgaatgtggggtagattatgtgacggtatttcaggagacatacaacacggataaatacgagacgctgcatctgatggggcacaagagagtgtggccttatcgatttgatgcgcaggaacgggcattgatgggaggcatgcgcggagccggattttcagcacttttagggctggatgatttccgaaaggatgcgctggcaacggcacttcacgtctactatatcaaccggaaatatccacacgctgaactttctctgagttgtccgcgcctccgtccgatcgtaaataatgataagatcaatccgcgggatgtgggagagaaggaactctgtcaggtgttgtgtgcatatcggttgttcctgccctttgcaggaatcacggtgtccagccgggagagcgaaagcttccgaaatggaattacgaagatctgtgctacgaaagtctccgcaggcgtttctaccggaattggtgatcacgaagaaaaatacgaaggaaaagaagatgcagatgtgggagacgagcagtttgagatcaatgacgaccgctcctttgataaaatgtaccaggatatggagcggggcggtctgcagccggtcctgaatgactatatctatgtataatccatatgagcatgcgattgtgatcaccaatcggacactggttcagggatcatttctggaacagatggagaaagtggtctgtctgcatcctcaaggggtgatcctcagggaaagagatctgtcagatgaagagtatgaagatctggccgaaaaagtgcttggtatctgtgcaagagagaaggtatcatgtttcctgcactcccggatctcgattgccaggaggcttggctgtacagatatccatctgtcgattccgtatgtgcagtcaatgtcggagacagagagggaagaacttcggaggaactttgcacaagtcagcatttcctgtcatagtatggaggatatggaactggcggtacaggctggtgcttctcagatcattcttggcaccatctttgagacagactgcaagaaaggtctgcaaggaaaaggtgtggaatttgtaagacagatctgtgccaggtgtccggtcccggtctatgcgatcggtggtatgaatctggaacggatctcccttgtgcggcaggctggagcagcaggcggatgtatgatgtccggatttatgaagttataaaatgatttgtaaatggttatgagcggttatataatgaaaataacgactcataaccatttttttgataaaggagaatatacatgagatttttgcatctgggagatctgcatctgggcaaatccctgggagattttgatctgatcggagatcagaaatatatattggatcagatgcttgcagtgatccgggaaaggacggtagatgcggtactgatcgccggggatgtgtatgataaagccattcccagtgaggctgccactaatctgctggattattttctgtgtcgcctggcagaaacaggagtgaagacctttctgatcagcggtaatcatgattctgatgaccggctgaactacggcagccggttattccaggataatcagatctttatttcttctgttttcagaggagaattggagaaatataccgtagaagatgagcagggggaagtggatgtgtatttgcttccatttgtgaaagcatctcaggtgcggcattattttccagatgcaaagattgactcctatgatgatgcagtgcgtgtgatcattgagcatgctcatctggatggtcagaagagaaatgtgatcgtggcacaccagtttgtggcaggcaggtcagaagatccggtactggcaggttcggagagcatcggaacacagagtgtgggactggtggagaagatcagttatgactgctttgatccgtttgattatgtggcgctggggcatattcattcgccccagaaagtaggaagagaagaagttcgatatgcaggatcaccgcttaaatattctttgagtgaggtgaatcatataaaatctgtgccattggtgaccctcggagagaagggaaaggtgtcggtggaactgatcccgctgtcacctatgagagatctgcgccatataaaaggctccatacgagaattactggataagaaacatgtgcagtcgccggaggactttatctatgcaactcttacggatgaagaaatcataggtgatgccatgggaatctttcaacaggtctatcccaatacagtgaagatcgactatgacaattcccacaccagggagatcgagcaggtggatctttcccatattgttgaaaataaatcattttcggaactgatcagtgatttttatcagctcatgtatcagtgtgagatcagtgaagaagagatggactatatgaaaatggcagcgcgggaggcaggagtgatccatgaaaccgagtaaactgatcataagcgcatttggaccctatgcgggacgggtgcccgaaatagattttacaaaatttgaagaaaaggggctgtttctgatctccggagatacgggtgcgggtaagacgacgatctttgatgccatctgttttgcgctgtatggaacgaccagcggctcttaccgggatacgaaaaacttaagaagcgaatatgccagcgatacagcagagagttatgtagatttctacttttctcaccagggaaaaaattatcacatctggcggcagccttcttatgagagaaaaaagcagcggggaaccggtgtgatcacggagaaggaaaaagcggtattttacgaagaagggaaggttcctgttgaggggcttactcaggtgaatcttgcggtgaaggacctgctccatattgatgaaaaacagttcaaacagatcgccatgatcgctcagggggaatttcgggatctgctcaatgcgaagacggaacagcggacggagatcctgcggaccattttcctgaccgatggctataagaatatcgagtacaagttaaaagaccggatggatgcaagctatgcgatcaggcggaagacagaggacagcattgttcagtactttggggatgtgtcagcatctaagacagatgtgttgtcagaagaactgacagagcttaaggacagagccagagagtctggcagtgcgtggaatctggaagaattgctggaattgctggggcgtctgatacagtctgatcaggagaagctggaagtggaaaaggagcggctggagcaagcggagtgtattcttcgctccaagcaggaggcgctggcaacggctcagaccaataacgagtttattgaccggttgctgcatcttcagaaggaaagagcagaacttgcgaccagagggcagaagatcaaagatgccacagatctgctggacaggcagaagacagccaccagggaagtgcatccagtatatcttgcatggaaatcaaaagcagatgctgtgatctatacggaaaaagagattgaaaataagcagcagagccttctggctgcggagaagacggcaaaagaggcagcggagcagtctgcactggcagaagaaaaaagagacagagcagaggaactgcagaaaaaaatcgataaaatcaatgcagaggaacagaaatatcagcagagggaacagttaaaagaaaaagttgccgcattgacaaacgatcaaaagatacttgcagaaaaagaaacaagttatgatacagcggaaaaaaagctggaagaaaacatacagaatctgaaggaaactgtggcagagttgaaaaacaggccgacagagatgcaggagatcagaaaccagggagataagctggcagagctggcagagaatattcgcgtgattctggaagagcgggtatgggacagaactgcggggaaaagaaagctcgctgaaaaacagcaggtatttctgaaagcccgggaaaagtatgaagctatccgggaaaagcgtatggaagcagaacgaattctggaaaattgtcgggcgggaattctggcaaaagacctggaggaaggtcagaagtgcccggtttgtggttctgtgcatcatccggaactggcatctcttccagaacgattcattacggaagaagagcttgaaaaatatgagagccgggagtccgcgcttcaggagcagaaggatcaggcaaacacggaggcagaaaaagcaaagactgctctggaagtgctggaaaagcagttgcaagtggatggcatgacctgcctgagacgggcagggacagaacatcatccagaaatagaatctctggacgaactgttggtgtgtctgcaagaggcatataagatgcttctctatgagaaaaaagcaaatcaggaacgactgcttattcttcaggcagactgtatggtattgaaaaaggcggagaaggatcttacaaaggcagaagaggagagcaaaagactggcagatgacagaaaaacgcttacgatcagaaaacaggaaacagaaagcagtctgattgaagcgaagaccatgctcagttccttaagtgaactgagctttgatacctggaaagaagcggaaaaggtctgcacagactctgcagatgaggtacagcagatagttactcatattcagcaggcactgcaggcgcagaaagatgcggatgagaaagtaactgctctgcaggcatcactggagactcttgccagaactttgggtgcacaaaaagaagatgaagtgaaagcaaaggctgcccttgtaagtgtactggaaaaacagaagtttcagtctgtggaggaactgcttccgtttgtggtaacagaagcagcccttaagaagacggaagatcagatcacagattacagacaggcagtggctaccaatcaaacacagctttcccaggcggaaaaggatgcagagggaagacagccggtggatgcacaggctctgagtgaaatgtgtacgttacaggagcagacggtaaagacatgtcgggaagcagtcaatatgatccgtaaccggatcgccaataattctgaaaaacagaccaatattctttctcagagaagcacctttgagaaagcatcaaaggaatatagcatatcccggagattgtatacccttgtaaaaggaactacaggcaacggcaagatcacactggagcagtatatacaggcggcaggttttgacggaatcattgcggcggcaaaccggcggctccttcctatgagtggtgggcagtatgaactgtacagacagagggattctattggaaagaagatcaacagttttctggatctggaagtactggataactataccggacaccggcggccagtggggaatctctccggtggcgagagctttaaggcttctttaagtctggcactggggctgtcagatacggtctcttctaatctgggcggtattcagatggatgctctgtttgtggatgaaggattcggaacactggatcggaagtccatggaagatgccatggatgcactgatcaatctgtccggaaccaataagctggtgggaatcatcagtcaccgggaagaactgaaagaaaatattccacagcagatcaaagtgaaaaagctccgggatggaagtcagattaccattgagactgatgtgtaaataatcattttagtagcataaattatgcgtgtattctgcctgatttcaaaatatgcagaaataatgcataattgataaatatgcagaaaaagcgcataatttaagcgaggtgatggggtatgcagtattatgcgattataggagatatcaaaagatctaaaaaaattgaaaatcgttgtgagatacaggaaaaattaaaaaagattctggataacgtgaattccatttataataacgatatttctgccaaatttttgataacgttgggagatgagtttcaggggttacttgagataacggctcccatattagaaataatcaaatatattcaaagagaaatatatccaattaaacttcggtttggtgttggaatagggaatgtatctacgttgattaatcacgaagcagcgattggcgcggatggaccagctttttatgcagcacgtgagatgatagaatttctgcgtgaacagaaaaaaaagttgaagaagcaggcggcagatattcagatttctgtgtatgaaaaaaaatgttttgaaacagaagaaataaatgcgatgttttcgcttttgaaaataattgaagatagctggacagagaaacaacgttatacaatatgggatatgatgattcaccaaggaactcaggaaatgtgcgctgaaagaatggatataactcagtcaacggttgcaaggagactggcggatggaaagtatatcatttaccaaagaacaatggaagttattgatgaagcaatacgaagattaggaaataagaaatagtaatcagatatttgttattattggctttggggcatgtgttgttttttgtaaaataattattttaaactaaaatatatattaaatgaagggacagga

SEQ ID NO: 2090 - DNA, 7661 bp, Unknown
  16S sequences of unknown bacteria
cagcgattgccgatacgccatgtcttgtgttatactcttgctcatgagggatatggtctcctttcgccgagttgtgatgtggtaactcaactttagcatatgagaccctatctctctttccttttttgtgtttgtccaagatgtattgtagtcctacaccttcctttttggggatcgtcccctccccgttgcaggggaagggggtggtgtggtatgatggagggagaaaagaatgggggagggaataagcgttgagaagaaggcggagacggggactttcctttggcagcgtagtgatgatcgttttgaccgtggccgtgctggcggggttcgggacgatgatcccccggttcaccggcagcgaaagctttgaccagaacgcggcgcagctggccgtggcgctggatcagaccatcgtgaatttttcctccaatttgggagccatcgcttcccagaaggaaacgacgccgcccgcgcccctgtgggcgacggccacccccatgcccaccgccacgccggttcctacggcggtgcccaaggcaagctttcggctgtgcgccacgggaatgctgaattggagcgcatccattcagaaatccgtgcagacggacagcggctatcagtacgccgacgtgctcagcccgctgctttctcagctgaacgccgatgtgaccgtagcgaccctgcgcaattccctgatcgccgatgaaaaaatctccgacggcaacgcggacgcttcgctggcggccgcgctgttccagagcggcttccgtgcgctgaatctggggcacctcaacaccttggattacggtctggacggcctgtggaagacccagagcaccctgaccgacgcgggggttctgcccttcggagcgtacccgtccgcccagcggcgcagcacgctgacgctgaccaacgcgggcggcgtgaagctggccctgctgagctatcagagcggcgtcagttccgagggccggaaggccgtgtctgccgacgaccgggcctacgccgtaggcgagctggagctgtccgtcattcaggaagagatcaccgccgcccggaacgcgggcgcgcaggtggtgctggtatccctctgctggggcaaggaaaacgccacaaagcccaccaacgaacaaaaagagctggcgcaggccatcgccgacgcgggcgcagatattctgctgggcgtgaaccccaaggccgtccagacggtggagattctcaccgccgatcggagcgacggccgctatcacccggtgctgtgcgcgtacagtctgggcagcctgctgacctccgaacggcagcagcgtaccaatctggcgggcgtgctgctccacgcgacggtggaatatgaccccgccaccgacaccgtggccttcgacgggctgacctacacgcctacctacaactggcgcaccaaggaaaacggcgcttaccgctaccggatctaccccagcaatctggccgaatatccggcggacgtgaacaaggatcagctgaacatcatggccaagtgccggaagatcattcaggacgtgatggcagacagcgggtttacggagcaatgatattatattaggaaaagaaggaatctgaaatgaaactgctggccgtgggaaacagcttttcgcaagacgcctgtacctttcttcaccagacggcgcaggcgcagggactcgatctggaagtgaccaacctgtatatcggcggctgctcgctggaaatgcattaccagaacctgctttccggcaaggccgactatcagtgccaacagaacggccattttgacggacggatgatctcgctgccggaagcccttgccatggagccgtgggacgtgatcgtcacccaacaggccagccatttcagcggttggatggacagctacgagccttttctgacggagctgctggaggatttccgcaaggcccgtccgcaggcgcggctctatctgcacgaaacatgggcctacgaacggggcagcgatcactgggcctttttccgctaccatcgcgaccaaatggaaatgtatgaccggctccactactgctaccgtaccatggcccgtcagcacggcctttcgctgatccccagcggcgatgtgatccagcgggcgcgcacgaaggagcctttccgggtgcaggacggcggacgttccctgtgccgggacggcttccacatgagtctgagttatggccgctacctgctggcctgcgtgtgggtggggcggctgtttcacgtatctgtggcggacaatccctttattcccgacggcgacgaggccgtagagcccgctttactggcgctgctgcggcagacggcggacgaagtgctggcggagcagcgcagtcaggaataaggcgctttccgttttccgctgcacccctccgggtgattttttcgaacttacggaaaaattttgctcggggtatggacaaaaaaacagtcctttgctataatgtaaagtgctgttgtgccaatatagctcagtcggtagagcagcggtttcgtaaaccgcaggtcaagggttcgagtccctttattggctccattttttcggggtgtagcgcagcttggtagcgcgtttgcttcgggagcaaaaggtcgcgggttcaaatcccgccactccgaccatcaaaacccgcaaggcgtaaggctttgcggggtttctctatccatttttcatttcccaatatctcccttttgactcccgtttctgcaccctttgggggtcaaaacgggggcaaaatttttcaaaaagcaccgttatggacggttcaaaggttcaaacttgcccgccttcggcggccgagatacggaacataaagaaagaagactgcctgacggcagccttctttcttataggttatttttccattagttggcgcgcaccttgatgctgggccaatcatagatgccaacgggcgtcatgttgaagtcctccacctgggcggacaggatgacggtctcgttgcggctgttcagatagcagccgaccggatcctccaggtacaggatctccgcagcgcgctggtaggccttttcgcgccattcctgatcggtggtcttggcagcgccgttgagcagctcgtccacttcggcgttggagtagaagccgtagttgttgctgttcttgccgtcttcttcagtagcgaagcggcgcttcagaccctcgtcgccgtccagcgtgatgtagccggcgcccatcaggaacatgccccagtcggggaattcttcgggggtcaggccgttccacgcggcggagaaggtagcgcggtcaaccacgaccagattgcacttgatgcccacttccgccagctgagcggcggcgatttcaccagcctgcacacccttgttgtacacgtcggtgcacatgaggttcatttcgaagccgtcgggatagccagcctcggccagcagttccttggccttggcctgatcctgctggatcacgcccagattgatgtagccaaaagcggcgggcggcgcaacgctgtcgcggggcttctcacccatggcgccccacagagcctcgaccagcgcggtacgatccagcgcgtaggagatggcctgacgaaccttggtgtccttgatgatggggttggagcagttgaactggaacagatggcagccggggccggggatggagaacacgttcagggtgtcgtcctccttgaagcgcagcacgtcctcagcggagatgttgattgcggcgtccacctgatggctttccatggcgatggcgcgggaagcggcttcgggaacgatctggatgcggatgttctcggtagcggcggggccgttgaagtagtcgtcaaagcgaaccaggtgcatatcctcgtccttgttccactccaccagcttgaaggggccggtgccgtcgacgctttccacttccttgcccagttccttgccgtacttttcgatgtagtccttgttcagcagggtgttggcacgcagggtcagagaggccagcatggggccggcaggctccagcgtaaccagattgatggtgtaatcatccacgatgtcgcagtgatcgataaagcccatggtctgggtgtagcgcaccgggtcttccttgttcagcagacggtcgtaggtggccttcacgtcctcagcagtcagttctttgccgctgtggaacttgacgcccttgcgcaagtggaaggtccaagtcagctcgtcttcggagacttcccagctctcggcaacgtcgcccacgatattgccttccagatcgcgcttgaccagataggaatatacctgaggcagcaccacatcgttaatgccctgctgaccccccacatcgcctttgcttctcaggaatccatgattcgccgcgcccgaatcgtcttccagaatatcgaagcctatctggccgggaagccggagaacgtctgccagtactaagtccccttcttttcctcccgttaacacgccgtgccaacgggtttttttatcaagtttgacctatattttactttctcagggtggccgttttttcttttctctggtaaaatgatttttgtatctggaagaagcaagagaagaaacgaggaatgaagatggcttatcagacgattgtgatcgattacgcgcccaaggccaagagcatggccgccgaagtcgagaaaaaggccaacgagatggagcaggaggactgggagctggtgtcgttcgccattaccaactccgccaaggggattctggtctttcaccggccggataacgattttagagattaacgcgtttcatgcaaaaaagcctgtgcctacggacaggcttcagtctgtcgaaaaatcccaagttggccgcctgcgcccgtaaacagcgctttgctggtttgcgggaaatgtgctgcggcacaagatttaggggcactgttccgcaacctcaatcgtcgtctttggcactgccgtgccaaatcctcgtttcggttgacggctgtcagtcgctagctgccttcggcagctgcatccaccggatgcgcgctctttttcgccgccctataaccccggcaggcaccgcagggaagcgggtgcccagttggcacaaccgccgcagacggttagcgacccgcaggtgtgacacgaaacgagcggggactacggcagtagtccccgcgacgattgagtggcagcagtgactcctgcacctccacttttttgacactctgaagcctgtgcctacggacaggctttttttgcgccattttttcggtaaacaggcatagtgctcctttgctttcgttttcttatgccatttgtccaaaaaaatccgccgctctgaaaaaagagcggcgggtcaaagttttatgtttcagccctgcagcagcatctgataggtgggcatgggccaatagtcggcccctaccagcgtttccagcatatccccggcggcgcgcagctccgccatggcgggcacgatccgatcccgggtggcctgcgccttttccagcgtgtcctgaaggggcgcgatctcgttcagagcgttttgcaggctgtcgcagcccttcgtcaaccgatccatctgacgctgaatgtcggtcagcagccgggtctcggtctccatgggcagcgtggggcagacctgcttcttctggacggcctcctgcgccaccgtgccggaataggcgatggcggcgggcaggatcattcgccgggcaatatccagcatactcagggcctcgatgtcgatgaccttgacgtagttttccagcttgatctcgtagcggctgtgaacctcctgcgcgctgaagaccttctgccgctcgaacaggtccagattcttctggtggatgtaatagggcagcgcgtccaccgtgctggacaggtttaacagaccccggcgggcggcttcctccacccaggacgcatcgtagccgttgccgttaaagatgatgcgcatatgatcccgcagggtgcggcggatcagctcatccacggcggcggtgaagttctccgcctgttccagctcatcggccatgtgcatcagggtgtcggcaataatggtgttcagcaccacgttggggccggacacgctctgactgctgcccagcgaacggaactcgaatttattgcccgtaaaggcgaagggcgaggtgcggttgcggtcggtggaatccttgggaaacttgggcaggatgtgcacgcccagccgcatctgatccctctggtggctctcatacttggaggcgttgacgatggactcgatgatctcattgagttcgtcgcccagaaacacggaaatgatggccggcggggcctcgttagcgcccagacggtgatcgttgcccgcgtaggccactgtgactcgaagcagatcctgataatcgtccaccgccgccagaatagcggacaggaacagaaggaactgggcgttctcgctgggggtctctccgggttccagcaggttcacgcccgtatcggtggacagggaatagttattgtgtttgccgctgccgttgaccccgccgaagggcttttcgtgcagcagacacaccatgccgtggcggtcggccacctttttcatgatctccatggtgagctggttatggtcagcggcgatattcaccgtgctgaaaatcggcgccagctcatgctgagagggagcgacttcgttatgctcggtcttgaccagcacgcccagcttccagagttcttcgtccaactcccgcataaaggcgtggacccgcggcttgatcgcgccaaagaaatgatcgtccagttcctgcccctttggcggcttggccccgtacagggtgcggccggtgacgatcaggtcgggccgctggagatacagcgccttatcgatcagaaaatattcctgctcggtgcccacggtgggatagacccgcacggcggtctgattgccgaacagacgcagaatgcgaagggcctgcttattcagggcctgcatggaacgcagcagcggcgtttttttgtccagtgcctgcccgccgtaggagcagtacgccgtgggaatatacagggtctcgtccttcacaaaggcatagctagtgggatcccacgttgtatagccccgcgcctcgaaggtggctcgcagtccgcccgaagggaacgagctggcgtccgtctcgccgcagaccagctccttgccgctgaactcacacagcaccttgccgtttttcggcgcgccgatgaaggaatcgtgcttttcggcggtcacgccggtcatgggctggaaccagtgcgtataatgggtcgcgcccttttccagcgcccagtccttcatggcgttggcgatcacccccgccaggctgggatccagcgaacggccttcttcaatggtccgccggagcgctttgtaggtttccttgggcaggcggttctgcatgaccgaatcgtcaaagcagttttcgccgaagatcacgctgggattctccatccgttgcttcctccttggaatgctcatcctcgaaagcataacacaattcatggatagacacaataaatactttggcaaattgacggtcgggagtgtaggactacaatacatcttggacaaacacaaaaaaggaaagagagatagggtctcatatgctaaagttgagttaccacatcacaactcggcgaaaggagaccatatccctcatgagcaagagtataacacaagacatggcgtatcggcaatcgctg

SEQ ID NO: 2091 - DNA, 4390 bp, Unknown
  16S sequences of unknown bacteria
cactagatcgctcgtcggcagcgtcagatgtgtataagagacagccgcagtggtatgtcgtgcagaacgaaaaccgggagattgtagccggagccggtgtgattgagaacgactttcacgaccgaaacgatctggcgccgaatgtgtgtgccctttttgtggaagaagcgtaccgcgggcaggggattgcccgcagtgtgctggacgcgatccggcaggatttgagcgggatgggaatccgaaaactgtacctggtcacagatcacacggaattttatgaaaaatgcggatggaagttccggactctggtaatcggcggcgacggtttgccggaacggttgtatgaatccggggatggaaaaagcgctgtaaccgactccggggcgggcggaatccaataatattctgggggtaaaatgcagttttccgtataggcgggcgcttcgacggtacaataaccgtatctgtatgccgttatgagaaaacagcctgagcggctcagtaccgtgcacattcgacgctatgccctgtatctgcgggagcaggagcgtgccccggccaccattcaaaaatacctccatgacctgcacgtttttttggaatatctggatggccgccccctcacaaaagccgtgctgatcggcgggaaagaggaactcacggccaaccacgctccggccagcgttaactctatgctggctgcggtgggagggtttctccgctttatggggtgggaggaactgcgtgtaaagcccctgaagattcagcgctctcctttctgtgacgaggaacgggaactgacccgcgccgagtatgcccggcagggaggatacagcactgcccagggcggcatggcgattcggaaatacgtggactatgatgcaatttcccggtacgcgctggaggctatggactgggccaatgccgcaggaattctgaacggtaccagtgccaccacgctggcgccccaggggcaggctgcgcgggcgcaggctgcagccatgctgacgcgcctgtgccagacggcgatgcaggaagtttgagtgttctgttcttgtaccgtcgcgcggaacattctgcttttgaacacaacgctttgtgaacaaccttatcatgcggtgcgccccacaatggtcattccgaccactgtggggcgcgctgttttttgtcccttgctgccgctgtgcagttcccggcctgcggtatttcgaatcttccgagccagtatagaataaatacgttttataaatttagttcttattttataggtaaaacacacgccggcgcagtgggagggggcagatactgaaggatggatcgggaaataaaacaaacagtgtgatggtatctatgcgctttgtacaaaacgaatgctggaaattttatgaaatggcgcttgcgcggatctggtttatccggtatgatgaaaacataaaaacaaatttttatttttgttatttaattggaaaggaagggagcgtgccatatgccgcgcaaagcttattcagaacaggagcgggagcggatccgggaagcactgctggccgctgctctgcagcacattgccgcgcatggactgaaacatgccagcgtggagaccatctgtgcagcagttggtatttccaaaacgtttttctactccttctttccctcgaaagaagcgctggtgctgcaggcgttgtcttaccagcagccaaaattgctggccttcgcccggacgcttatgagcgacccgaagttgagctggcgggaaggtttggaaaccttcctgcgccgctgctgctataacagcagcggcatagctgtgttgtctgctgaagaggaacagatggtgttccggcgcttgtcgccggaggaataccaggcgttccagcgtagtcagctgatcctgtttggcgaactgctggctgtattcggtatcccggtggcgacgattgatccaaggttgttcggcaacctggctctggccatgattatggtgcgcaaggctatgccggaaggcctgccctttctctttccggaaatggcggatgaaatggtgtcttttcagatcggtgcgctggccgatgcgctggagcgagccagggacgcaaagcctccacacggggaaaatcgtcctgaaacagaaaacgaaccctgagagtggggttgtacccgacggaacgtctgcagctcggacaattatcatgaaacggaattcaaaggaggaacttgttatgacattaatggaacaatgccagatctggaacgacaacgatgaataccagaaaatcgttgacgccatcgaggttctgccagaggaggagcgcacgccggaactgtgcagcgagctggcccgcgcgtacaacaatctggcggatcccggtacggcggagggacgggcacagctgcggcgcgccctggatctgctgcggccctacgaggaaacgctcaaagacgatcactgctggaacttccgcatggcgtatgcctattattatctggaccaggaagggccggcgctgccgtattttgaacgggcgctggagaagcggcccggcgacgaagatacgcagtattttattgatgcgtgccgccgcggcctggccctgcccaggttccagcggaatttccgtgaacggacgcaggaggcatgggaggcgtttgttcagggcgaggcggaactgcgcggcctgatggatcaggaagaccgggacgccgtggcagaggaactcattgccaaatgcgatgcaattttgcacctggcgtttgaaaccatcgcttttgagatgggttataacggcgaaaaatacgaactgatcctcacacctgagggcgaccggaccaggctgtttgagctggtgtatttccagcgtcatgcgccggcggacgtccggaaacagtggaatattctggtgggccgacagaaaacagcagggtttgcgctgcggatcgacgactgggagattgaggcgcaggacgtgcaggtgtggggagaagcgcagggagaggaaaccgcggccctgacgttgtactgcgaaaagctgctcccgctgctgcgggaagaggaaaacaaagtctggtggatgctgtccaccctgacagatcaggtgctgggcgagatccctgccatggcgctgatcgatggctttgatgtgttggatgcgccccgagatggagtgtctgtatccctggaagagctgcctcagaaactggcggatatgggaatgcggaccgactgggatgccgcggcctatctggaaaatcactatacggcatatgaactggaaccgaatcaggatgtggatgccgattggcgcatggatgtgtttgctggctccacctgctgcccggcgctggtcaacggttacctgagcaatcaaagcgagacgatggatgctttccaccaaaacggcgcggtgccggggttcttctgctatccggtggatgggttcaccggcgcagagcggggcaaagttctgctcgatttccgcgatgccctggaagaagcggtgcggaaggcggccggagaagatgctgttacctttgtgggtggtgcgtcgggtctgcgctgtggttatctggactttatcgcttgggatttgccggccgtgctgaacgccgcggcagaatttttggaaacgagccccgtagcctgggcgaattttcacacgttccgccgggatgtaggtaccgtgcggctgatcaatcgcgaaaacgatgcgccggtggtggatgaacagactggttcgctgctctcacaggaggatatcgctgcgctggcagcctttgaagagggcagcagcggatacttcggccggatgtggtcgtatttgaacgattttatcagtactggcgtggcagaagggcgctttacgcagcagcaggcccgggaggaccttcagattgccttgtggtacgcctatgcctggaataatcttgacgaatatgattcttactataaggcggcccagtggatgccggcttcggagaaaaacgcgcagggctgcggcacatggtattatcgttattctgtggcgctgatgtactgcggacggctggaagaggcatggcaatatgccgagacgggcgcacaggaggaaccggactatccctggatctggctgcaggtagcgaaactgcgcagccactttggaaatcgggagggcgctttggaggctgtgcggcgcggcttggcgctggagccgggcgaccatgaattccagacgctgggccgggagatcgaggcgggtgcacctctggaaacgatggaatatcattggattgatccggactgcgaccaggcgctgcaggacggtttggacgaaggggcagacgacaaacggcgggcgatttcctgtatcgtgcttgatccggagagcctgaagtgggtcaaggagctgcttcagcc

SEQ ID NO: 2092 - DNA, 16374 bp, Unknown
  16S sequences of unknown bacteria
gcattttccgcctgttttatgaaattttgcctggctctgaacagttacaaaatatcacataataagcaggtaagaccgggagtggcagcattcccggtctttttgtggattcgggcaagccaccggtgaggccgcgcggaacggtaagcagagaatttatctgtatcagggagaaggttgtgaactgccgctttggctttgccatatcactcctgcataagttacaaaatgaactcatattgttatcaaattcatatcgaaaaaattacgaaaattaaaaaatattaataatacttgacatttgagttcatatttgttatgattacgccataataaatgtaacaaattcgtaataaatatatttggtttggtttttttggaggtttgatagcaatgaaaagagcagtattacagtttacagcatgtgttctggcggcgggcatgaccgtgtccggaacgggaatcgcagcatttgctgcaaaggacgatgcgctggccggatttggcggtacagcggtacagagtgtatcgggaagtacagcagaagatacgcaggagagcgagacaacagctgagacacagacggaagaagctgtgacagaagcgacaacagaagccacacaggaagctgcgacagaagcagttcaggagactgcggcggaagcagcgcaggataccacggatgcgtccgcaggggaagagacagagaacagcgcacaggcaggcgtactggatacaagcatgaatggccagatggcgtttgcacagtgtgaggaatatattaacgtaagaaaagaagcaagcgcagacagcgaggtagtcggaaaggtatacaataacggttccgtcacaatcctcggtgcgattgatggatggtataaagtacagtccggcaatgcgacgggttatgtaaatgcagagtattttgcgacgggtgcacaggcagaggcgattgcggaagaagttggttataatgtggcaacggtttattccgatgccctgacggtacgttcccagccaagtgaggattctgaggcgatcggtaccgtgtacagctccgatcagcttgaagttgtagcatacgaaggagactggatgaaggttgcccttggcaacgatgtttacggctatgtgaatgcttactacgtaggctatgatacgtattatgcgacggcagagacgctggatgaggagcaggcacgtctggaccagcagtggacggactaccttgcacagcagaaggcagaggaagacagacagaatcagcagtggcaggagtacctggatacacaggcagcacaggagagcgcgtcagcagcatcctatgaggatcagtcttacgaggctccgcagacagaggcagtatcttatgactccggaagcgatgcacaggcgcaggcagatgcagcatatcagaattatctggatgcacaggcagcggcagatgcagcgaccactcaggctgatgagcagcaggtatatgacaccgcagcggcagcgcaggaagcatatcaggagtatgtaaatgcgcaggcggcagctgatgcgcaggcagcaggcggttcctatacagaagattcttcttacacagaagagactgaggctccgcagtattacgaggagacaccgcagacggaagcaccgtcttatgattacagctataccggtgacgcacaggcagcagccgatgcagcataccagagataccttgaagcacaggcagcagcagacgcggcaactacccagggagatgagcaggcagtatatgatactgcagcggcagctcaggaagcataccaggcatacttaaacgcacaggcagcggcagatgcgcaggcagcaggcggttacaccggagagacaacgcagacagaagcaccggcctacgaagagacagaagctcctcagtatgaggaaacagaagcaccggcctatgaagagacggaggcacctcagtatgaggaaaccgaggctccgcagacggaagctccggcatcttctaccggaatggcaatcgtaaactttgcaacacagttcgttggcaacccgtatgtatggggcggtacaagcctgacaaacggagcagactgttccggatttacccagtcagtatttgcaaacttcggtatttcgattccgcgtacggcagctgcacaggcatccagcggaacaccggttgacttaagtgagatccaggcaggcgacctgctcttctactacggagacagcggaatcggccacgttacgatctacatgggcaacggtcaggtcgtacacgcaagcaacgcaagcacaggtattactatctctgactacggttatcgtacaccgtgcagtgcaaggagatattggtaatatacaaaccaaccaaaaaaccaaaacccaaacaacccaaacaaaccaaaacccaaaaggaaacggcacgcaggtagaaaaacctgggtgccgtttccttttttgcggatggaatcagtaaagcagcggcctgatacaaaggagaagaatgtgatttcccttgtatggcggaagggatagtgttatactcgaagcaacatgaaagcaaaagttggcagcttggtacagggcgttacagatggatggctctggaagatctgcgcgacgcagtgatttgggagatttttatgacgaagaaagactggtacgaggccggagatcagatccgaaatctcgtacaggatgcaattgataaggaagatttttcacagctgagcagcacgatctcgaatgtggtgaacgatacgatgagcgggctggagaaggcgctgaaggattcgcttggaaacggaattcagcagccgggcggtgcggccggagcagaaaaagacagttccggggcacggcatgagatgaaggacgcgaggtatggcggcgggcaaactgttcaggatcaggcagacggtcagacgggcgccgctggatcaaaccgcggcggtcggacacagagtgagtcgggagatcagtatcgaaaccgccgtccttaccagacctggacgacgcaggcaaggcaggaggccgccgaccgtattcgatccaacatggagaagacacatcgtacgaacgatgcggagcatgctcagaaagagagcaaagcccttgtgccggtaaaagcgccgggaaggatcagcgggacggtaatgaaatgggttggctacagctgcagcggcatgttcggtctgtcgcttgcgatccttggcgtggtcggagcggcgacgggagtctctctggcagtgccggtcagtattttgagtgtactgtttgccggttcgcttggggttggcatcggagggaaaaaacggctggagcttgcgcagcgcttccgaaaatatgtgagcgtactcggaaacaggacgtactgcatggtagaggaattggcagattccgtcggtgagagcagcaaatttgtgcggaaagatctgaaaaaaatgatccggcaggggtttttcccacagggatatcttgatcagagggagacatgcctgattacggacaagcagacgtatcagcagtatcaggacgcgcagcagtcgtatgaagcgagaaagaaagcggcacagcagagcaaagatcctggaagacaggatggtgatggacagcattttgagactgcatttgattccgaaagcaggggcgggagtgaaaacgcagctgcaaaacgaaacggaacgaatcagaacggagcagcttctgagcattttgcggacagtgatattcgggcagatctggacccgaaatgcgcagaactgatcgcgcagggacgaagctacattcgccatattcatgagtgcaatgaccgcattttggacgaagcgatgtcggaaaagctggctcggttggagctggtagtgaccagaatctttacggaggcggagcggaatccggaggtggtggatgatctcaaaaagatgatgagttattatctgccgaccacgaagaagctgctggatgcttactgcaacttaaatgagcagccggtaggcgggcagaatatcgacactatgaaaaaagagatcgaggagacgctggatacgttaaactcagcgtttgaaaaactgctcgatgacctgtttgaggagcaggcatgggacatatcctcggacatcagtgtgctgaacacgatgctggcgcaggagggactgaccgggaatcggtttgaacgcagataagcattcaccaacttcaggtgcgcggagcgctaagtggtagacgggatgcttatctgcgttcatgagcaagtagcgaagcggattgcgaatgtctgctttaccgcagggcacaggaaacaaaacagaaaacatcaggaggatcaggagatgagcgacgaattcaaggaatttgacgaggcaccgacgccggtgctgacatttggtgcgccggttacagaagaaaaggaagttccggcagagccggaaaagccggaggaaccacagctggatgacagcatccttaccgaggaagagcggaagatggtggatgatttcagcaaacagattaatctgaatgatacgaatggcattctgcagtacggagtcggtacacagaaaaagatggcggatttttccgagactgctttaaaaaacgtaaagacgaaagacctcggcgaggttggaactatgatctccgggcttgtcacggagctgaaaagctttgacgtggaagaggaggaaaaaggttttctgggatttttcaaaaagtcaggcaataagctgacgacgatgcgtgcgcggtacgaaaaagcagaggtcaatgtagagaaaatctgcgaagtgcttgaaggccaccaggtgcagctgatgaaggatgttgcagtgttggacaagatgtatggactgaacctgtcatatttcaaagagctttccatgtacattctggccggaaagaaaaaactggcacaggtgcgggcaaatgaacttgcagacgcagtagcgaaggcacaggcaagcaatctgccggaggatgcgcaggcagcgaaggatcttgaggataagtgtgaccgttttgaaaagaagattcatgatctggaactgacgaggatgatcgcgatccagacggcaccgcagatccgtctcgtccagtcgagcgatacagtgatgatcgagaaaatccagtccacgatcgtcaatacgatcccactgtggaagagtcagatggtgatcgcacttggtgtggagcatgcaaatcaggcagcaaaagcgcagcgcgaagtgacggatatgacaaacgagctgctgcgcaagaatgcggcagcgcttaagacagctacagttgagagcgcaaaggctgccgagcgtggtattgttgatcttgagaccttaaagaatacgaatcaggctctgatttctacgtttgacgaggtgatgaagattcaggaggatggacggcagaagcgccgcgcggctgaggcagagctgaatcggatggaggaggagctcaagagcaagctgctggagatccggaaataagaaatgactgtgcgatgaaaacggaaaaagaatataacaagggcggctcctgcgggaaccgcctattataattatatttagacagattcttatatttagacagattcactgcgaacgcaatccgtcagtccgcatcaatcatccgatacccgattccgatctccgtaaaaatgtattccggctgagcaggattctgttcaagcttccggcggatatttgccatgttgacgcgcagaatgcggttgttgtcatccgcataaggtccccatacgtgggaaatcagcgtgtcataggtgatgactttgccggaattttttgcgagcattgaaacgatcttgtattcaacctgagtcaggtgaacctcctgatcgtgaacaaaaatacgacgtcggtcgaaatcaatgacaagaccgtgtgcttcaaatgtatgagtctgatttccctgaccgtttgcaccggaaagatggcggacggcggtacggatgcgggcgagaagctcggaggtgccgaatggcttggtgatatagtcatctgcgcctgcatcaagcgcaagcaccttttcctcttcctgtgtgcgggcagaaatgacgataatgggcatggaagaccactggcgcacttcgcgtataatatccatgccgtccatatccggaagtcccagatccaggagaagaatatccggacagcgagaggtgatctgtgaaatgccatcggtgccggaatagctcttaaaaacacgatagtcctgattgagcagggcagtggcgataaaatcacagatatttttttcatcttcaataatcaaaacagaagtttttgtgttcatttattttcctccgtttgtatgatatcctgttcttcacgcggcagtgtaaagcagaattctgcaccttgtgggtcagcggtcttttctgctgcagtgctgcagcggtggaatggtgtcaggcggcgctgaccggcttcgctctccggggatggaatgttgcgcgcggtgatcgttccgtcatgcgccgtgatgatcgtttgacagatagaaaggccaatgcccatgccacggctgctgtcggaattgtcagtcggtgccgtgccggtgccatcgaagatgaccggcagcttttcttccggaattccggtcccgtaatcacggatgtgaaaggataccgaggtgtcatcgtacgtgatatagcagtcgatcggctgcgtgcttttcgcatgcaccactgcgttttcaagcaggttgatgatgacctgctcgatcagaaccgcatccatcgggatcatcagaaactcatccggaatcctcacgttgatctgtgcatccggcagtcttttcttgagccgctgtacagcctcggaaagcacttcctcgacaggctcaagtgacttggtgacttttgcgcttgaggtattgattcgtgtgacagagagcagattttctaccatattcaaaagccagtcggcatcctcctggatgttgcagatcagatttttttttgcctgatcatcgagctggctgtcgttttcaaggtaaagattggcagcaccgatgatgccggtgagcggtgtacgcaggtcatgcgagatggcccgcagcagattggcgcgcattttttctttttctgctattgcaagctgtttttcctgtttgatacggatccgtgtctgtgctttcaggttggttgtggtggcacttgtgatggatgagattacaagcatggaaaagaaggcgatcggataaccgtccagcgtaaaattgattcgcatataggggtaggtaaaaaagcagttgatggacataatgctgataacggaagctaggattccgtaaagatagccggtcgtaaagcgtgcaattgcaacgacgatcataagataaataaaagaagtattcaggagattctgcgttgcttttcgtgtgagaacgcaaagaaccgttccgaaggcaaggagtgcgatcgagacgagaatgtcgtgtaatggggtatctgtgcgcagatgcctgaatttatcagaaagaaatttcggggtggtcaagggatgcagatctcctttctttatgggatggagccataagatatatttccacaagaggggccattcttatgggatgtcttgtgagatagtatactataatttcttccgcttgagtatggctggatgttaagaagacgctaaaagtggtgaagaataaaaaagttataattcttttacatagcgaatcccgtccagctggcagatctcagacaagattttattgtgagacatattacaggggagttttacggaaacagttgcacatacgtccctgatataccatttattcagttcttttcgttccagatttgtaatttgaattttctgcgaattgaaataatcaataagaacaagcataaattcttcgttttgtccgtcaatacacaaaaccatataaggcgaatacttcattattttcttatcaattatctgaaagaaaatggagattatatgtacaatgcaggtgccggaaattgcgccaaaataaaaaccagtgccgatcgaaatgccgatagcggcggttacccagagcgaggcagctgttgtaagcccttttatccggttgtggttggtgatcatgatggaaccggctccgagaaaaccgatcccgcttacaacctgtgcagccatgcgtgataagtcaccactgccctgggcaatatagcgaaaaatataatcatttgtaatcatgatgagcgtggagccaaggcagacgatggaaaatgttttcagtcccgctgagtgccggtgtatttcacgtcccagtccgatcgaaccaccgcagacggcagagagcagcatttttaggattgcactggtttcaaatgaagtaagatcaaaaaagaacagcaaaaatgtaaaaaggttcatcttcagtacctcctgaaattattgaaaatgttgttctgttattacggccaaataaatgaagaaacttgcaaaaacaactatataatgataatattttagtaaaacagataaaaaatttctatgtgtggttgttgctgcaatttttatttatgttgttttatgggaggggcatacatgaagcggaaaaacgggtatttgtatgaagatctttcgaccagaaagcctttgctgaatgagatgaagatgaatgatttttcggcattttttccgccgacgcatacagcaatgacgctatatgaaagcggacacaaatatcattgtatgccaggacattatacgtatcaaagaatttatgatcattatctgctacattatattttggacggaaagggaacctattattgcccctctggaacgtactccataacacagggagatttgtttctgatcaggccaaacgagccgattcattatcaggcagacttagagcggccatggacgtattattggatcggatttaatgggaatgaagcgtttcatgttatggaaacatgtggattcacaaatgaatgtgtggttctgcaccatggaaaagatatggaattagaggctgctctccatggaattgcatatccgaaaaagacaggtatttcgagagagtatgaattgctgggatatttgtatcgggtgtttgcatgtatcattcaacaacatctgaggccgcagatggataattcaagacaatatttgctgaatgcgatagatttcattaatcaacagtacagttactgtaatctcagggttcaggatattgctgactatgtaggaattgatcggacatggttataccgcatttttgatacctgtcttcatgtttctgtacaggagtatctgcagcagtttcgtttagataaagcgaagtcgttgcttcgtttttctgcaataccagtcggaacagtggcagaaaaatgtggttttgaaaatcaggcatatttttctactgtatttaagaaacattataatatgacaccaatacaatacagaaaacagaggaaggaggctgtgataggcctcccctccgacataagcaaatgagatatttaactgatttttgggctgcgaagcgttacggtgtcagtcagatgcaaatgaaaggtgtttactatatttttggctgttttcagtgcctgtggattccatactttttccggctgatgtgcatcggctccaaaaacaaccgtgttttgtacctggccggcgatttcccagaattttaaattgggataatgacggtgatcccagataccaagaaagttgatctcaagcgggatgttcaattcctttgcaccttggcagagcattcgcatgtggtgttcgtagactgcgtcatcgccgacaaaatagaaaagatccggatgagccaggtaagtaaaacagcccgtttcaagtgcctcaaggcattgcatacagtagcgttttaaagccacttcgctttgggtgggaagtgcgctgtttacatcattgatctcgtttccgagaaagtgttgggccagcagaaaataatcaaaaggatatgcgcgggtaatagtaagcagattgtgaaaataagcaggataatattcaacctcaagaccgagcagtatctggatatcattttcgtactctttttttaaagaatgcactgtggttacataatcttccagctgatccagtctcatttttaagggactgacatatccatttgggtaaggcattggtgtatgatcggaaaaaccgagaatctgaagaccgccctgaattgcattttcaacatattcccgttctgtacctgtcgcgtgcatacagcgccaggtatgtgtgtgataatttgcaatcatttttctttttcacctcaaatgataaaagttataacaaaacagaattaaaaggaaaggtccattccatcgtatgcggcgataaatcctttttcctgaaacagaggagtgattcgctcgtgcagcggattaaagtaatggtagaagtgtgtcaggataaagagtgtttgttctgtcgcaatattgttgtcaagcatgcgtttgcgtacaaggatattatccggaagacccatatgaccttcgaaaatgcctgtgtgatctaccatggtacagtcaagaacaacacagtcgaaatggaaatcacctaaaaattcccagactgcctcagaaaagaaggcactgtcatgaccatagagcaaagtttttccattatgttcaataacatagatatagcagcattcgcggggatcatgactggccggcaatggtgtgaccttataaccatccagttcatacgttttgtaggcagataacgtgtgaaatgcaagatatttttcagtgttttcaagcgagaggatgtcacccacggactgatttaatttatcggttacagtggaattgccgtagatatggagggggattgtgcggtttaatccatatggcggagcagcgcgtagcagatcgacgggataaaaatggtcttcgtgagaatgtgtaataagaatatgtgtaatgttggtagtatccattcctctgaacagggactgcgcgtaaccatccgatgaaaaatcaattaagatgtggtcatcaagctgtacgcttgtgcgcagacggatgttttttccgccaagggtacgaatctttttgcagtattcgcattcacagaatactgcagggacgccttctgatgcgccagtgccaaaaaaatgaagtttcatagattttgtctcctgtataataatattgtttgatgtttatccttttacgccggatacgacaacgccctgaatgaaatatttctgaaaaaatacaaatacgattaaaattggcattgcgacaattacggcggctgcaaaaacaagattccattccgtggaattcattccactgaagaatgaaagcccaacggaaattgtctgttttgagtttgaattaatgtaaattaatggctccagataattgttccactgatcttgcatggacatgattgtgacagccagaagaaccggtttgacctgtggaagaatgacgtaagaaaatctttgccatacgctgcagccatcgatcgttgctgattcatccatttcatttgggatgcccatcatactttgccgaatcataaaagtataaaaaggttttgcaaaaaagaacggggcaatgatcggaaaccaagtgtcaagcagcccacactttgtatagatgagataaagtggagtcagaacgatttctgttggaatgatcatggtaaggatgaccagaacaaagattttgtcgcgtcctttccatttgattctggaaaacccgaaagcaacaatagaggaagaaatcagtgcgccaatgatagaaagtaaagtgatcagtcctgagtttttcagcatttgttcaaaccgaaatgccggatagcggaacgcctccggatagttggcaaaccgaagcggccatacgaaaaatttcgggggaaactgaaatagctgttcgtagcttttaaaagaatttaaaaaaaaccagtacagagggaaaagaaatatgatagaaagcaggataagggtaagatagcagcctaactttcgcataccttttccactaagtaagtgctgtctcatatttattcacctccataaaagacccatttatttgatgagcggaatacaagaatagtaagggcgccgacaatcacaaacagaagaatggacaatgcgtttgcataaccaagattgaaattgacgaaagcagttttgtaaatgtaaagcatgtaaaccagactggcattgcttggaccgccatcggttaaaatcttaatctgagtgaatgtcttgaatgcgccaatcagtccgatcagcagattcataaaaaggacaggggacatcatcggcagggtgatgtgaaatacctggcgtagtttgctgcatccatcaagatcggctgcttcatagagcacagtcggaatagcctgcagaccggacaggttgataataatcatctttccagactgccagatgctgataaaaacggtacttgcgatgatcgttccggttgaaccaagccaggatactttgccaaggccgattcttgtcagcagatagttaataattccgaaatctgtttcgagcatctgtttccacaagagagtggaagagacaacaacgattaaacagggaatataaaaaatggttcgaaagattacgattccacgtaatttctgatttaataaattggcaagaagaaatccaaagatcagttgaagcggaacggcaaaaatagcgtataaaaaagtaatgccgagtgacttccagacaagtggatctttcgtaagcatggtcacgtagttttcaagtccaataaacctgcttccggtaagaaagctgaaatttgtcaggctaattttaatggcatagagcagggggataagcgtgaagcttatcaccccaatgagccacggggaaatgaataacagaccaaggcgaatgttctttttttctcttgctgtacattttttcatgacacatccctcatttgatgtataaattactaattatattttgcctcattttctgcaacgatagagtttatttctgtggtaagttcgcttaacatatctgccatggaaagctgaccgctatagccttttttgagtgtttcgttctgcaactgggtgaactgctggtacgggatgtactgggatagtacgttcggatgaacataggagagtgccttttcgtaagcggtaatattttccggcacatctttgtcgaagaaaggcgcacgtgcggattccagtgcagggatggttgcgttggtttctgcatacattttctggcactccggctgaacaacttgctcgagaagttttatagcagcctccagatttttggtgtttggattaataatcaagccgattacgttgctggagcatctgcgtttaccagtgtttggatcaagtgggagttgcacaacatcccaattgaaagaagtaatattggtgtaagtggaaatcttccatacacctgcggtaaccattgcaatttttccgctcatgaacatatcgtctccggaagaagtcgaagtgacttcaacactcggggatataccagcctgatacatgtcagccagtggctgaagtgcctctacaacaccaggctcatttaacagacaggtttttccactctcatcaaaaatttcatatccggcagaccagatcatttcccatacaggcatgcggtcggcaggaacgtaaaaaccatactgagtagtatttccactgtcatcctgtacagtaagctgtttggcaatttcctccagatccttccaggtccaggtatcttcgattgcctttaaatcaattccggctgcgtctgtaatatccttattataagcgatcgcagaacactccacattaatcggaattgccatctgttttccgtcaaatttataagtgtcaactaataccggatccagattgttcagatattcctgaagcagaggggaattggaaatgacatcggtgaggtccatggtctggttggatgcagcataggattcaaaatccggacgcgtcatctgatatacatccggccctgtgccggcggcaatagcgaccggaagttttacccagtaatcagctgcggctgcaaactgcaggtcaacagaaatgtctgcgttttcttcggcaaaagtggcctgcgaagagagcgcttcagttgcttcagtactccatgaccaccaggtaacggtatcttttgcgcaagcagttgagaaggttgctaaagatgcgagggctgcacagacaaaggctaaagattttcttttcatttacgttcctcctaaaatgctatttttgatattcattaatgttgtttttggccgcgcggatttactgatccataatatcacaatttacaatttatttgatctgtaaaaatcttgtaaatggaattttacataaaatactttgcaatattgagaaaattatgttctttatgcctatattttaaatgcgcatttgggaatcatctatatatcaatgttgccatttttttcagttatgttgttttataaaaggcaaaagagagaatatctgttttgggctgagtcggacagtgagggaaattgattcgcagtgctgattttcaatgacaatccgcgtaagctgtgctatactgataagaaatgatcgcctgcggattctggcggcaaaaatgatgtacacaggggatcgcagacggagggactgagtgaaaaataaatagcaaaaaacgaaaagcgaggtgcagagtatggacagtggagtattacttgcagtattgattctgttggtcgtgattgtgacagtagtcgtggttgcagcggtggtgtcagtcgtttccggcgtgatcgcagcggaagaagatgaggaagaataaaaattaatggaaagcgcatatcagcgtgaatccgggcggcagagcagacgctgaaaagccgttttggtaatgaaaaggaaaagaggagggggaaaatgacagagtataccctgtcacagtggctgctgtttttttacatttactgctttttcggctgggtctgggaaagcacatacgtatcagtatgccagcgaaagctcgtaaaccggggatttttgaaggggccgtggctgccgatctacggaagcggggcaatctgtattctggtcgtgaccattccggtacgcgggaatatcccggcgatgtgtattgtcggcatggtatcggcagccgtactggagtatgtgaccggctacgtgatggagcggctgttccgtgtgcggtactgggattataccggaaaatttctgaatattaacggctatatctgcctggcatccgtgctctgctggggagtgatgacgattctggtggttgatgtgatccatgtgcggattgagcagatggtcatgatgctcagtacgcagatgactgatctgatcgtgctcattgccactccgctgtttacgatcgatttcgtgacatcgtttattgctgcaatgcggctgcgcgacatcctgatcagcaaggaacgcattgtggaagaactgaaaaagctggcagtgaagaaagatgagctggaagctgcgcttgaaaaggcaattgcgggtaccggcgataaggcgaaggagcagatccgtcaggagctgggcgagctgtatatgacggtcggagcaatgaaacagaagcttcagatcagatcgccgaaatcaattcgcggtctgctcaggagaaacccgacagcggtatcctttgagtataaagaaacattttcagacctgaagcggtctatggcagaaaagctggacggactccgcaatgaagtggatttctcagcgatcaaagagcagacaggcaagtggttgaagcggtgagcgataaagcaatgctgtattgcaggtgcatctttgtgaagcgaaaaaaacaagcaacgagaaagatacagaatttctgaagaatgaacagtcagtgaagctggttgtgaatacggatcgtgtgagcgtatcggattgagaaaataatcttttaaacacgttttagagcagctagagggcaggaaaaatggaagaaaagaagcaggctgaaaatgaaatggatgacgacgacatcattgaagaatttgcaagcggattttgtaaggcacagaatcagacacgaatggtgatgtgcgagcttaaggtgctgtcggacggaaaaaaggagattgtctcttcggactgtgcctggggaagatgcgagcatacgaaaacatgtctgctgatggggcagattatgaatgagttgtagcgtgttttggaacgcagggcgtgaagcggattgcgaatgtctgctttacagtgcttttggcaggatgtgcgtacagattgcaggaatagttttttgaacaggcttcggagtcggtgggaggttattaacagttaaatataaattataaaatcatataagtacatgttgagt

SEQ ID NO: 2093 - DNA, 6009 bp, Unknown
  16S sequences of unknown bacteria
atagatttccgtctttccgctgctggtgacgccgttgagcagaaaagtacgatgctctttcctttctatgtgaggcagaatctgcgccatcgcgttctcctgttctttcgtcagaaccggagcctccgagggaatgcagaccagatcttcatagggatcttttctgacgttccccgttcctttcactcccggcggaatcatgcatctcaccgcgtcgatatagcggcagaggtacgcatccctcatccactcgcagacgctcaccagatcttccggaagagagacttcttcctctacgctttccacccgtttgatcttcgacgtctccacttccagtcctgcttcgccttctctggaaacctcgaatacataagcgtctctgaggcggtttcctctgccgaaaggaacccgcactttagagccccggcgtacactgtcgaaatcgcaggcataagtataaaatgtatccgtatgatcactcgcattgtcgatgacgacttttacatatttcatccgtcccgctccttaaacccgtttctcttctgaaacaccgcacgcagctctgtcctgtttctgcggccgcgatgagctgttcccgccgcaccgccgcttccctcgtcccgatgcctccgcatccggctttcgcatccttttaatcccgcttggaaaaaacacagccgcagtaattctgccgatagatgccgtactcctttgacagttccacagacctgcgaaatccgtctttctttttaaaactctcgtcgagaaaggaagcagacacgttcttctccaattcgtaaccgacggcgttaatccggccggtatttttgtgcgggctgacggaaagtgtcgtcgcgaattcatcaaatccctgtcgctcagcaaccctggccgtctcctccatccgcagacggaagcaaacatcgcagcgcgctccgttttccggttcctcttccagcccctgaaccgctttcagaaaacgctccggatcatacgttccctcgaaaagcgtcaccgcgtcttccgcgcttctgtctctgttaaatttttctatcacctgacgctgcgctttcagacggcgctcgtattcccccggatcggtaatgttcggattgtaaaaatagaccttcaagcggtatcggtccgccagccgttcgatcaccgccgtactgcacggcccgcaacagctgtgaagcagcagagacggtttcgtttcatcttcattttttctctcttcgcactgactttcgccgcctttttcgtatttcttcgagaaattttcttccctccggctaaaaccgctgccggcctttgcttcttctctgtttaaaaggatcgacatcagatcaccacctgttttcttctttgtatctcatcctgtttttcggtataatcagactgaaccgctctccattgagagccttatcagtataacacgaaagcctttttttgtgaatcggcggaagacagtcaggcccgtgaaagacggcgccggaaacgacaggagagtgattggtatgtttaaaaacggcgcgcattataacggcatcggcccctatctgaaagatcggttcggcacgagaattgcaaaagtatccatcgacggaggcttcacctgtcccaaccgcgacggttccgcaggtctgggcggatgcatcttctgttcggagaccggttccggcgattttgcagggaagaggattcttggaaagaaaaccgggccgaaaaccggcggcatcgctgtctccataccgtctatgcgaaaaaacgctctccgtgaggttccttctgtcacggcgcagatcgacgctcagatcggcattctgcggaaaaaatggcctgattttcgctgcgtcgcatattttcagaatttcaccaatacctatgcgccggtcgccctgctgaaagagcgatttgaagaagcgctccgccaccctctgtgcacgggactcgctgtcgctacccggcctgactgccttggcccggatgtcgaagactatctggccgatctgcacgacagaacgtttctctgggtggaactcggtcttcagacctccgacgaaatctccgcacagcgcatccgaagaggttatccgttctccgtatacaaagaagctgtaaaccggcttacagcgcgtggaatccgcgtaatcactcatctgatcgccggactgccgggagaagacagagaaaactttctccacagcgtacgccgtaccgtctccgatgatattttcggcgtcaaacttcagctgctccacatcatgaaaaataccgaactgggccgcctgtggcaggttcagcaggcggcttcctccccggacggctctgtcctgggcacacagcgcgggcagggaaaagccttccccggcgcaggacttcccgaaaacaccctctgcgaacccgcttcctttccccgaatccggcctctgggcaaggaagaatatatctcctggatcgccgacgccctcgaaatcattccgccgcagattacgatccatcgtctcaccggagacgcgccaaaggacactctgctggctcctctgtggagcagggacaaaaaagcggttctcaacggcatcaacatggaattgaaaaagcgcggcacctgtcaaggcagccgcatctgactccttcgctttttccgtttaaaaatatccgctgcacggaaatggctttgtctttcaaagctgtttccggcgcctccttttccaagcagctgtattcctttccaaaattaactgcgacatcgtatcgttatcatcccgccgtttttctcttccttcccctctccgcacaccgagatacaactcatctcctcctctaacgacagaaatccccgcttcgccgcgcagcagaaatcctgttcaaagagaccgcagatgggaatattcaaaacgtcggtaaaatatttcagttcataatctgtaatcagccgtttgccgttttcaattctgctgattgtcttctgtgtcagatccaacccgttcaactgcagtttcacagccagatcttcctgagataaattgcgccgtttcctcattttctgcagcctttcaccgcagatgttatgtttctcaccgattttgatctttttcaaaatgatacctcatcatcctttacaaaaaataacgaatcaattttgaacataacacaaaataagcaccataattttttaatcgtccaaaacacctgcaaaactctgccgtatccgcccaaagcagagttctgcagacaacttcggcataattccggaagactccgccggcagcttcctgaattatgccgtgaaacagaaacagcgctcattccgccgcagcggacccggcaaagaaaaatgataatccacgaatcccgtctctttcagaaagacgtcccgaaacaaaaagccccggaccgcggaaaataattccgcggtccggggcacaaaagaacaggaagatgacaaacatcttcacgttcagagatatagcacaccttttatatgactcaaatcgtgacccgttcttaaccaatgcgttcggaccgagcgcccgaaagtttcagcgccgctcccgttaccggccgccgtcgattcgcccgtcattataatgctttctgcagagagacacatacatattgttgccgccgatctcaatctgctctcccgtacggacaaattttccatccacgatacgggcgaccatattcgcctttcttccgcaccagcagattgtcttaatctcctcgattttatccgcatacaccagcagataatacgaaccttcaaacagctcgttgcgaaaatcgtttttcagtccgtagcacatcaccggacattcgcagctgtctacgatctctaccagttcctccacatgatgctttttcagaaattgcgcctcatcgatgagcacacaggcgatctccttttcccggctggcttccatatagatttccagaatattcgtatcgtcaaagacaggaatcgccggtctcgaaagaccgatgcgggaacggaccacaccgacgccgaaccggtcgtccagtcccgaagtcagcacgagcacatgcttaccccgctcctcgtaattatatgccaccttgatcagctcgatactctttcctgcgttcatcgtactgtatcggaaaaacaactgagccatctgttctcacctccacacaaagcgcctgtcaaaacattaaaaatacatatgaaaaagcatagattccatctctcccgtcaccacacgaatccaaggaaccccatccgtccgcacgattccgtgaacgtggcttcccccttcaagttcattcagaagataatcccgaatttctttcgtaatctcctctcccggataaagcacgggaattccaggcggatagactgccacgtcaaaagcggctgtcctcccgcaggcttccgagagaggaaccgtctcatgccgggaagaaaaagcctttcgcggggtcatagccgggcggcggcgaaaccgggccggcgcgatattccgctgcacgccactctgccagttttccgccctgttcttccggttctgctttccggagtctgctgcggctgatttcctctgtgccgctgaaatttcctgcagcgcgttttccaaaaacagaaattccctttccgtcgttccgcttcccgccgtcgcgatgatatacagatgatctgcaaattctacatctatatgatatcttcgggagagaagatctgcaagatctctccctccgattcccatctcccaagcggagatgagaagacgcgatctctcgattttacgcgggacaccgtcggcgtccgtatattcgctgatacagcgaatttccggaatactgccgattcgaacggccgcctcatccactatagaatgtatcttccgccatacttctgctccgttgcgcgccatattcccgcgcactgcatccagcgaagccatcagcagataagagggactggtggtgctcatcaaatggaccagataacgaaggcgttccctgtctacaagatcaccgctgacatgaagcatagaactctgagtcaggcttcccagcatcttatgcgtactctgtaccgagatatcgcaccctgcagtgagcgcgctgcagatcccctcctgaggggcaaattgaagctgcgcaccgtgagcctcatcggcgatcacctgcacgcctctgctgtgacataattccgtgatctctttcaactgactgcaggttccgtaataggaaggattggtgagaatcaacgcccggacgccgggattgcgttccatcgccgttcgtactgctgacacgctgataccgcagggaattccgagagacgcatcaaattcgttttccacataaaccggcatcgcaccgctgaaaatcaatccccgtatcaccgacttatggcagtcgcgtcctaccaggatagtttctccctcagaagcagcggccgccaccgccgcgatgataccggacgtcgttccgtttaccagaaaaaaagtctcctctgcaccgaaaaggtctgccgccagttcctgcgcccgggcgatcactccctccggacaatgaaaatcatcaaagccgtcgatctccgtgatatccgcccgcaaaacctcccgtgagaacaactcttccaattgcgccgtaccttccgaaatccctccgcctcccttatgaccgggaatatgaagcgatacgcggtctgaacggatatattctctgagtaaatctgcaagaggcttctctttctgcgatttctttatcatttctgcgatttcctctctcaattcacctttatacatttccgccagcgataattaatgtgttgctgcagacgaaaagcggtattttaaatacgaaaaaagatgtctaaaaacagagtttatagacatcttgcatggtgcccagactcggaatcgaaccaaggacacggggattttcagtcccctgctctacctactgagctatctgggcgtatggagcggaagacgagattcgaactcgcgaccctcgccttggcaaggcgatgct

SEQ ID NO: 2094 - DNA, 32759 bp, Unknown
  16S sequences of unknown bacteria
agacaaacggaatgccgagagaggatggctacgatatcacggttgcatccgagattatggcagttctgtgcctggcaaatgacatttccgacctgaaaaaacgtcttgcaagaatcatcattggttatacatatggaaaagtagcagaacagaagccggtaacagcaggcgatctccacgcagaaggtgcaatgtgtgccctgctgaaagatgccctgaagccgaatcttgttcagacgctggagcatgtaccggcgatcgtacacggcggaccgttcgcaaacatcgcacacggctgcaactccgtcatcgcgacaaagatggcgctgaagcttggtgattatgcgatcacagaggctggattcggtgcagaccttggtgcagagaagttcctggatatcaagtgccgtatggcaggcctgaaaccgagcgcagttgtgatcgtggcaacagttcgtgcgctgaaatacaacggcggtgtggcaaaagctgatctgaacaacgagaacatcgaggcacttgaaaagggtatcccgaacctgctcaagcatgtttccaatatcaagaacgtatacaagcttccgtgtgtcgtagcgatcaacgcattcccgacggatacaaaggcagagcttgatttcgtagaagcaaaatgcaaggagctcggcgtaaacgtagcgttgtctgaagtatgggcaaagggcggtgaaggcggcgtcaagctggcagaggaagtcatccgtctgtgtgaagagccgaacgactttacttacagctatgagctggaaggcacgattgaggagaagatcaaccagatcgtacagaagatctatggcggcaagagagcagtcctgacagcaaatgcacagaagcaggcaaaacagcttgaggcaatgggctacggcagctgcccgatctgtatggcaaagacacagtactccctgactgacgaccagacgaagctcggtgcaccgactgatttcgagatcaccgtgcgcaacctgaagatttctgcaggtgcgggatttatcgtagcactgactggtgagatcatgacgatgccgggtcttccgaagcgtccggcagcagagcggatcgacgtagatgagacaggaaagatttcaggcttgttctaaacggatcggataagcagtggaacggcggtccggctgcaggaagattacgaatacggactttgtgtgtatcaggagcggctgggtctgctcctgatacattgtaaggaatatgagcgatatacgataggacacagggaggacagggtgacatgtttaaagatgaagtgacagcggttggaaatgccgcaaaagggaaattaaatttactggaaaataattttgcggggtatgttctgatgtcgattctggccggaatgtacattgcactcggcagtatcctgatgggaatcgtcggcggagtatttaccggaggcggtgcattttcgacgaagcttgcatgcggaattgtcttttctgtcggcctttgctttgtaacaatggctggcgcagaacttttcaccggaaataatctggtgatggcgatcggcggcctgaaaaagacggtatcctggggcggtgtggtaaagctctgggtggtttgctggattggaaatctgatcggatctgtggtttcagcagcgatctttaccatgaccggcattccgggaagcggagacatcggcacattttttgcaaatgcagcagcaggaaaaatgggaggtactccggcaaacctgttcgcaaaggcgatcctgtgcaacatctgcgtgtgcgtggcgatctggtgcggaacaaagctgaaatcagagggcgcaaagatcgcaatgaacttctgctgcgtgaccacatttgtaacgtgcggttttgagcacagcattgcaaatatgacctttctctccattggactgatgaaccagaacggcgtggcaggtattacaatgggcggtttctggtataatcttgcaatcgtaacactcggaaatatggtgggcggtatcctgtttgtagcaatcccgtactatctgatttccggcatcaaagaaaaatagaaagaatggctgcatggcagcggttcggatctgaaaaagacgacagatattcctgataaaaaaacattcctgataaaaaaacattccggcagagtgatatgctttgaccgggatgtttttttcttggcaagacaggagaacggtggatctgcacagaaattatgcagatgctgcccgctgcaaaatccccgagataacagagagcagcagctgtgaggtgtatctgttttcagccggtgcggtgacctcgtctgtgctctgtttggcaaggatctgggaagagatgttttcaaaggcaggagaaacgagcggaaaggcggccgcagtcgcttcacttaagtttacaagccggattgcctgaatgcggtctgcgtttaaagtgatttctacatcagccgcggaatctccgagcggaacagatgcagtataaacgccggggatgtagcgggaattatggatggaaaagctggtattttttccggtgcggttcgtatttgcaggatcaggatcggtaccggaggtactttgcgtctggctctcctgtgtcatgcttctgaccgtgtcaggaaggacctgtccgtcttgtttctgctttggggaaaacatgaggacaaggcagacgatgagcagtatcccgaaaaagagcaggagcagcgtgtagataaggctgcgcagtttgaaaacaaggattttagggctggaattcatttttaggctccacgaaagataagatttgctatactatatgttggatcagcggaaggcagaacaggaagtatctctggttgcgaagcctgaaaaaggatggtatgataggcgaaagaaaaaggatgcataggaaagcgaagaggatgagaacggaaaaggaggggagcagcagaaagatgaaaaagagaaaaacggcggtgctgctggcagcagtgctttgcctggaattatggattggtgctgcacctgaaagcgggcggcaaaaaagtttgatccacgcatctgcggcagaactgtcagatcagacgggagtggaagagactgcagatgcattgattattgtggagtcagaggtgccgtctgaaccggaatcagaacttacgccggagcaggattcggaatcggatcaaaatacagagacagaattgtcatcagaacatgcattagacgaactggccgacggggcagtgattctgaatgtggaagaagtgccggaaccggagtccctggagggagaagcagaactttctgagacagaactggaaccggaggaagtgacatcacacagtggaagggcagaagacggagatgggatgctgcgtgcagcttcaggagctgtttattccgggtcttatggaaatcagctttccgggcaggctgcgcagctgtacaatctgatgaaaaagaatcttttgcagagcgggaaaaaggacagctttacaatgaagctggaagggtttacattttcggtttatccgcagacgatgagcgacggaaaaaccaactggaatctggagagcaacgaggcgtatctctattcgatcaagccagagatcgcagcgatggtgcaggctgcttacgatgcatttgtttacgattacccggaggtattctggcttggcggtatccgctatggcacatccatttccctgaagaaagaggctggaagcgtggagggaaccggtgcggtgacacagatcacgcttacaccggtggaagaatataccggtgcgtggtcagagcgggcttcttttcagaaagctgcagcatcgtggaaaagcgcgatacagaaagcgtttccggacggtgcttcgcaggaagaaaaagtgcgggtgatacacgattacgtctgtgcacagctttcttacgatcacagctttggttcggcgtgggactggtcagcagggggagcactgctgcatggcggaaatgtggtgtgtgagggatatgcaaagacctttaaaatcatgtgcggtgtgtttggcattgagtgtgtgctcgtgtctggcaaagcgaaaagcggcggaagctggcaggatcatatgtggaattacgtctgtatggaaaacggaaagtggtatctcgttgataccacatgggatgatccggacaaagcaggcgaggatgcggtgagaacgtattttctgcggggcagttccggaacaggcgcggatgggacaacacagatcgggatggagcgcatgatcgacagcagtttttcacgcgcggattcacagatttttgcgcagccggagctggcatcgggagattatgcggaagatgacggaacaacacataagcataagtgggtggttgagtcggagctaaagcccacatgcgaacgcaatggtctcatttattacagctgcagcgggtgtgaggcgacaaagattgcatatatcaatccgaccggacataaatttacaaattttgtttccaatcacgatgagacatgtgtgaaagacggaaccaaaacggcgctctgcgattactgcaggatcaaaacctctacgctgcggaatgtaaattcaaaaaaaggacattcttataagtatgtatacaacaaagatgcaaccgtattcaaaaacgggaccaaaacaggaacgtgcatccggtgcgggagaacgatcattgtttctgcgcctggcacgaaactgacaccgacaataaaaacgaatgtatccagtgtacggctgcgggtcgggcaggtgacatcagcagtgaaagtgagcggccttgcaaaaggagatgaagtgcgaagctggatctcggaaaatacttcgatcgtaaaggtggatcgtaccactggaaaaatgacagccggtacaaagacaggaactgcggcagtaacgatcacgctgcgaagcggattgaaaaaaacaatccgggtcatcgtacagaagatggcggtccgtacaacgaagctgacggggcttccatcttcggtcacggtgtcaaaagggaaaacggtaaaacttacaccggtgcggacaccggtgacaagccaggaaaaagtgacctatacgatcggaaataaggcagtggcttcggtcacttcaaacggagtcgtaaagggtcggaagaaaggaaagacaaatctgacggtacagtcaggagcgagaaaggtgacagttctggtcattgtgacaggctgatgagccaatgctttcttgcaggcagaccgcaggtgtattcacggtctgcggaagtataccgttcatggcaggaaaatttactgtgagctggtggagcattttgcaccgcactgtgaagcaggaataaaattttcaattccggtgcatattacaggtacaggtgtagctgcctggggaatctgtagaaaaaggagatcagatatgatgcgctggaaaaaagaagtgttgtgtgtactttgcgtctgcgcggcctgtgcgcttagcggctgcggcaatcggaatgatcagaaatccaatccgcagtcggagacgatcacaggtagaaacggtgaggcgcaaagcgaaatgggtaataatgccggagataacacgccggtaccggaggatggagccggtgacggtgtcggaggaactgtggaaaatcgcggggacagtacagaaccagagaataccgcggctccgaatggtgacaatgccagtgggctgacagacggcaacgcgaatggaaacgtgaatgatattacggatgacagcaatgtaaatgatgccacggacaatggaactggcgtcggaggagctgcaaaagatatcgtggatggcgttggtgatgccggaaaagacctgattgacggggtggaagatgccggtgatgcgcttgtgggagaagaacctgcggatacagcgcggtaagcgggttgtatccaggtctttgcagggctgtgggagcgaggtatggtggcatactgctccttacggctctgcatggacttctctgactggataaagcggctgcggtcagttccatatggaaactcgttttcggctggaaatggatgtggcaggaaaccgtcagatagtctcacgaatatagtggctcgcccgtgacaggcgggaagaatcagaggtacaaacagaaaaaggaggaagcatcatcatgaaatttcgtccctgtattgatatacataatggaaaggtaaagcagattgtaggaggaagcctgaaggatctcggagatcaggcagaggaaaattttatctcggagaaagatgctgcattttacgcgcactgttatcagaaggatggactgacaggcgggcatgtgatcctgctcaatcccaaaacatcaccgtattatgaagagacgaaatgccaggcgctgcttgcactgtcacaggcaaggggaacattgcaggtcggcggcgggatcacagaggaaaatgcggaggaatttttaaatgcaggggcttctcatgtgattgtaacttcctatgtgtttcgggatgggaagatcagctatgaaaatctggaaaaactcgtaaagacagttggaaaagagcggcttgtgctggatttaagctgcaggaaaaaagacgaagtgtattatattgtgacagaccggtggcagaagtttactcaggaggtactctcagaacagctgctggatatgctggcagcatactgtgatgaatttcttgtccatgcagccgatgtggaaggaaagtcgaaggggatcgaaacaggtgtcgcaaagctgctcggagggtggggcaaagcgccggtgacatatgcaggcggaatcggaagctacgaagacctggagcagctttgtatccttgggagagagctggtagatgtgacggtcggaagtgcgcttgacctgttcggcggcccgctgtcttatcgaaagatccttgaattgtgtgaaaaataattgaaaaaagtaagaaaaaagaataaaattgaaaaatttcattgaaaaaatatgaaactgtgttataattagaccacagaaaccaatcaggacgaagaagtcagatcagattggtccgagtttttaggcgaaggagttggtcatatgaagtttacaatcagtggaaaaaacatcgaggttacggaaggactcagatcaacagtaatagacaagcttggaaagcttgaacggtattttacaccagagacagaaattatcgtgacgatgagcgtggaaaaagaacgtcagaaaatagaggtaacgatcccggtcaaaggcaatatcattcggtcagagcaggtaagcaatgacatgtatgtatccatcgatctggtggaggaagtcattgagcgccagcttcgcaagtataaagaaaaaattgtagcaaaacatcaggacggcggcaatttccgcagagaatttattgaaagagagacggagccgcttgacgaagtaaagatcatccgtacgaagcatttcggaatgaagccaatgtacccggaagatgcatgtgtacagatggagcttctcggacataatttctacgtattccgcaacgctgagacagaggaagtcaacgttgtatataagagaaaaggaaatacgtacggactgatcgagccggaatattcataaacagcctcagaagtattgcggcgtagctgcaggaagtcagacgggcgggcgtgaattgtgaacacgcccgccttttttgttcataaaaattttaattgtgttgcagtatagaaagtgatacaataaacaagaatgttcaaaacagataaaagatcagggcatgaaacgaatgccggtccggtctggaaatgaaactggaaatggagaaaagttatggcaattaaatttgttgagaaaattttcggaagccacagccagcgggagctgaaaatgattctgccgcttgttgacaaggtggagagtctgcgtccgcagatgcagtctttgtcggatgaggagctgcgggggaagacacaggaatataagacgagatacgcaaatggcgagtcactggattccctgctcccggaagcgtatgcgacggtgcgtgaagcagcaaagcgtgttttaaatatggagcattaccgggtacagatcattggcggtgtgattctgcatcagggacgtatcgcagagatgcgtaccggtgaaggaaagacgctggtgtccactcttccggcttacttaaatgcactgaccggagagggcgtgcatatcgttacggtcaacgactatctggcacaccgtgacgcatcctggatgggaaaggtacacgaattcctcggacttaccgttggatgcgtactgaactccatggacaatgacgaaagaagaaaacagtacgcgtgcgatatcacctatgtaacgaacaatgagctgggattcgattatctgcgtgacaacatggttatctacaaggaacagctggtacaaagagagcttgcctacgcaattatcgatgaggtcgactcggttctgatcgatgaggcgcgtacaccgctgattatttccggtcagagcggcaagtcgacgaagctgtatgaaatctgtgatatccttgcaagacagctggaacgcggcgaggcgagcggcgaagttacaaagatgacggcgctcatgggcgaggagatcacggagacaggagattttatcgtcaatgaaaaagataagatcgttaacctgactgagcagggtgtcaagaaggtagagcggttcttccacatcaccaactttgcggatccagagaaccttgagatccagcacaatgtggatcttgcactgcgtgcgcacaatctgatgttccgtgatcaggattacgtcgtaaaggatgatcaggttatgatcgtcgatgagtttaccggacgtatcatgccgggacgtcgttactctgacggtctgcatcaggcgattgaggcaaaagagcatgtaaaggtaaaacgtgagagcaagacgcttgcgacgatcacgttccagaacttcttcaataaatacaaaaagaaatccggtatgaccggtacggcgctgaccgaggaaaaggagttccgggatatctacggtatggacgttgtggagattccgacaaaccgtccggtacagcgtatcgattacgatgacgctgtttatatgacgaaaaaagagaaataccatgcagtggtggaggctgtcaaagaagcgcatgccaagggacagccggttctggtcggcacgatcacgatcgatgtttccgagcatatcagcaatatgctgcgccgtgagggcatccagcataaagtattgaatgcaaaattccatgagcttgaggcggagatcgtcgcagatgccggtgtacacggtgcggttacgattgcaacgaacatggcaggccgtggtacggatatcaagctggacgacgaggcaaaggcagccggcggtctgaagatcatcggtacggagcgccatgaatcaagacgtatcgacaatcagctgcgtggtcgttccggacgtcagggagacccgggagaatcccgcttctacatttctctggaagatgatctgatgcgtctgtttggctctgagaagatgatgaaggtcttccagtccctcggtgtacaggagaatgaccagattgagcacaagatgctttccagcgcgattgagaaggcgcagatgaagatcgagtcgaacaactttgcagtccgcaaaaacctgcttgagtacgatcaggtcaacaacgagcagcgtgagattatttactcagaaagacgccgtgtattgaacggagagagcatgcgtgattccatcttcaagatgatcacggatatcgtggacaattccgtagatatgtgctttggcgaaaattcaaacaaagaggactgggatgcaaatgagcttaattccgtattgcttccgaccattcctcttgagccggtgactcaggagacactggagaagattggcagcaagaacgagctcaagcagcagctcaaggagcaggcagtcaagctgtatgaggcaaaggaagcggagttcccggaaaaagaacagcttcgtgagctggagcgcgttatccttctgaaggtgatcgaccgcaagtggatggatcatatcgatgatatggatcagcttcgccagggtattggactgcaggcatacggtcagagagatccgcttgttgagtacaagatgagtgcctatgaaatgtttgacgcgatgagtgcaggcattcaggaggataccgtccgtctgttgttccacgtaaaggtagagcagaaggtagagcgcgaagaggtggcaaaagtgaccggtacgaataaagatgagtctggtccgagagcaccgaagaagcgcgcagcggacaagatatacccgaatgatccgtgcccgtgcggaagcggaaagaaatacaagcagtgctgcggccgcaaggcgtgaaaaacagcgcgaatctgccagacgtagtttcaaaaaaattttatctggctctaaacagttatgaaataaaaaaagaaagaaagcgggtgaagctatggtagaactggatcagttcaaaagtattttaaacagttatacgaaaccattagtggaagtgagggattcactttgacctggtaaacaaagagcagaaaatccaggaaatggagcgtaaaatggaggaaccggatttctgggatgttccggagcgctcccagcagcacatgaaaacgctcagcgacttaaaagaggacgtggccacctacaaaaagctgcaggatcagtacgaggaaattgaattgatgattgagatgggctacgaggaaaatgatccggacattgttccggagatcgaggaaatgctgcagaatttccaggatacttttgatgccatccggatcaagacgctgctttcgggcgaatacgatacgtatgatgcgatcgtgacgcttcatgcaggagcaggcggcaccgaatcgtgtgactgggcatcaatgctctaccgcatgtatacgaggtgggcggataagaagggcttttccattgaggtactcgattatcttgacggtgatgaggccgggatcaagtctgtgaccttccaggtaaatggaacaaatgcatacggttatctgaaatcggagcgcggcgtacaccgtctggttcggatctctccgtttaatgcggcaggaaagcgtcagacttcgtttgtgagctgtgatgtcatgccggacattgaggaggatgttgatgtcgagatcaatccggatgatctgcggattgatacgtatcggtcaagcggtgcgggcggtcagcatatcaacaagacctcatctgcgatccgtatcacgcatttgccgaccggcattgtggtacagtgtcagaatgagcgttcccagcatcaaaataaggacaaggcaatgcagatgctgaaagcaaaactgtatctgctcaagcagcaggagaatgcagagaaagcatccggcatccgcggtgaagtgaaagagatcggctggggcaatcagatccgttcctacgtcatgcagccgtatacgatggtcaaagatcaccgtacaaatgcagagaccggaaatgtggacagtgtaatggatggaaatattgatctgtttattaatgcttatctgaaatggatttctgtcggaggtacggcagaggaagaagcatagggcatccgtctgctgaaagatattttatgcagacccaaacagaaagcacagagaaatgaaacgggagatgcggtttttacgcatttcctttttctttttcatattaagaaggttttccttctgattgtatggcgaaaaaggcttgcgtggcgcgaaaaaatgtgataatatccttggagtgtacacaaacgtacacgatacacaaacacgatatagaaataacaggagagacaggggaaaccacgcatattcgcgggcgcacagaacctgctgtgaaggatatgaaagagaaaacaaagtattttgtagtgcgggaaaaggcagttccggaagtgcttctgaaggttgtagaggcgaaacggatgcttgatacgaagcgtgcagggacggttcaggaagcggcggatcaggttggaatcagccgtagttctttttataaatataaagatgatatttttccgttccgtgataatatcaggggaaaaacactgacgtttgtgcttcagatgcatgatgaacccggattactttcggatgtacttaaggttgtggcagaatatggcgcaaacatacagacactccatcagagtattccgatcaatggggtagctacgctgacgatcagtgtggaggtacttgcaacgaccggtgatatctccaacatgattgagacgatcgaatcaaaagaaggaatccagtatctgaagattctagcgagagaataagaaataaaggcgttattttgacaggaaaataaggaaaggaagagtcgaaagacaggagaaaaaatgatacaggcagcagtattaggatatggaacagtaggttcaggcgtagtggaagtgatcgatgtgaatcatgacagtattctgaaaaaagcagatgttgatctgaatgtaaaatacattctggatctgcgtgattttccgggagacccgaatcaggaaaaggttgttcatgattatgagacgatcgtaaatgacccggaagtaaagatcgtggttgagacaatgggcggtgtagagccggcgttcacatttacgaaaaaagcactgatggccggaaagagcgtctgcacttcaaataaagagctggttgcaagacacgggacagagcttctggcacttgcaaaggaaaaccatgcaagctatatgtttgaggcaagctgtggaggcggtattccgatcatccgtccgctgcggacctgcctgtgcgccgatgtgatcgacgagattacaggaattttaaacggtacgacaaactacatcctgacgaagatgatcgaagaagatctggagtttgatgaggtattaaaggatgcacagcagaagggctatgcggagcggaatccggaagcggatgtggaggggcatgatgcctgccgcaagatcgcgatcctttcttcccttgcttatggaaaacgcgttgattttacggatatttatacagagggcatcacaaaaatttcttctgcagagatcacctatgcaaaagcgatgaagaaaacgatcaagctgcttgcttccagccgtgtgacggatgacggcgtgatcgcaatggtggctccgcatcttgtgaatggagatgatccgctttacagcgtaaacggagtattcaatgcgatttttgtgcatggcaatatgcttggtgatgcgatgttctacggacagggtgcaggaaaagaagcgactgcaagcgcagttgttgctgatgtgatcgaggaagcacagtgcctcggcactggaaaaatgtccgagtggagtccggaaaagcaggagcttctggatgtatccgagacaaagaagcgctactttgtccgctttcagggcgatgcatccgaccttacggaggcagaatgctgttttggcaaagtaaacgcagtcgtagctccgcttgcaggcgaattcggttttaccactggtgtgatgacagaaaaagagtatcaggcgtgtgcagcaaaaacggaccgtgtgatctcgatgcttcgcgtgagagaaaaataaaacggacgggatagaatttttgagttttgaaactgccgtctgacaaataagagagaaaataagggagaaaggttctgaaactgggcttttctccttttgtttttaaccgagtcaggcaagttcccctgtttctgtatattctgcgaagatgttgctgtaaaaagttcttatttttggttgacaattgaaaaagcacttgatattataaatgataagaggatattaaaaaataatatgacttatttatcgggaacagcaagtcatatgcaggaatgaattcattatggtgatacaagcagtgaagtggattgcaaatggtttctttatcagaaacagatggaaaaaagaacagaaacacttgacaagaacgccaaggtatattattatggaacaagatacgaacgtgagttcgaaaggagaaaagatatggtacaggaagaaaaattaaaagcattagatgctgcgcttgcgcagattgaaaaacagtttggaaaaggttctgtgatgaagcttggcgattccggagcaaatatgaacattgagacagtaccgaccggatcgctcagccttgacattgcactgggactcggcggagtgccgaagggacgtgtcgtagagatctacggtccggagtccagcggtaagacgactgtagcacttcatatggtagcagaggtacagaagcgcggcggaattgccggattcatcgacgcagagcacgcacttgacccggtctatgcgagaaatatcggagtggatattgacaacctctacatttcacagccggacaacggtgagcaggcgcttgagattacggagacgatggttcgttccggtgcggtggatatcattatcgttgactcggttgcagcactcgttccaaaggcggagattgatggtgatatgggagattcccatgtgggattacaggcacgtctgatgtcacaggcactcagaaagctgacaggtatcatcagcaaatcgaactgtacggttatttttatcaatcagcttcgtgagaaggtcggcatcatgttcggcaatccggagacgaccaccggaggacgtgcgctgaaattctactcatcgatccgtatggatgtgcgcaggattgagtcgctgaagcagggcggagaggtgattggcaaccgtacaagagtcaaagtcgtaaagaataaaattgctccgccgtttaaagaagcagaatttgatatcatgtttggcaagggaatttccagagaaggtgatgtgctggatctggctgccaatatcaatgtcatcaataagagcggcgcatggtatgcctatgaaggaagcaagattgggcagggtcgtgagaatgccaaagtttatttaagagagcatccggagatcatgaaagaggtggatcacaaggtgcgggagcattatggactgatcccgtcggaggaagcagcacagtcggaggataagactgcaggaaaaccggtgaaggaactgaaatctgtcacgggaaaccgcactgcccaggtggaagtaaagccggaggcggttccggatacagagaagaacgatgcatctgatcagcagaattgagaaacgctcctccggcaggtatcagatcctgctggagggggaggattccttcccgctctattataaagaattgaggcagtatggtatagaagagggcggtgtactgacagaacagtcatatcaggagatcatgagggagcttttgccggtacgtgcaaagaaaaaagcactgcatcttctggagcggatggaccgcacggagcaacagctgtaccgaaagctggcagatggcggctatccggatcaggttgcaaaggaagctgttgattatgtgaaaagttatcattatatcgacgacgtccgatatgcccgttcctatattgaaagccgaaaggcggcgaaaagcctgcggcagatcgaaagagagctgtatcagaagggaattacaagagaagattttcagtgtgctgctgcgcagctggaggcaccggatgaagagcggcagatcctttcctggatagagaaaaaaaggttttgcgtcgcgcaggcagaccggaaagagacggaccgctttattcgctttctgctgtaccggggatatggaacggcagtgattcagaaagtgttaagaaaatgcgctgagtttgccgatgaaaacgttgagttgcacaaaaattgaaaacaggggcacaattacttgacacatttaccaaaacagtataaaattgaagtgttgtttacggacaatgaaaattgaataaggaggtgctcctgtgcctgtagtgatgactataattgctgttgtaattactctggttattgcagttccggttagtgctcttgttgcagtcaactaccgcaaaaaggtagtagaagcgaagctcggcagtgcggacgaaaaagcaagacagataatcgacgatgcactcaaggttgcagagacaaaaaagcgtgaggcacttctggaagcgaaggaagaatctttgaagacgaaaaatgagttggaaagagagacgagagaacgcagaacagaattgcagcgctatgagaagcgagtattgtcaaaagaagaaagtgttgacaagaaagcggatgctctggagcggagagaatcagggatcacagtaaaggaagaagagttaaagaagaagaacgcagaagtggaaaagcttcgcggtcagcgtattcaggaactcgagagaatctcaggacttacctctgaacaagcaaaagaatatcttttaaaaactgttgaagatgaagtgaaaatcgacactgcaaagctttacaaagagctggaaagcagagcaaaagaagaagcaggtaaaaaagccaaggagtacgtggttacagcgattcagaaatgtgctgcagatcacgtagcagagaccacaatctctgtagttcagcttccgaacgatgagatgaaaggacggatcatcggaagggaaggaagaaatatccggacacttgaaacccttaccggtgtggatctgattattgatgatacaccggaagcagttattttgtcagcttttgatccgatcagaagagaggtggcaagaattgccctcgaaaaactgattgttgatggcagaatccatccggccaggatcgaagagatggtagaaaaagcacagaaagaagtagagacaatcattcgtgaggaaggtgaagctgcgacactggaagttggtgtacatggcattcatcccgaactggtacgtctgcttggtcggatgaaattcagaacaagctacggtcagaatgcattgaaacactcgatcgaggttgcacagcttgccgggctgcttgcaggtgaggttggagcagatgtgagaatggccaaacgtgcaggattgttgcatgacatcgggaaatccatcgaccatgaaattgaaggctcccatgttcagatcggtgcagacctttgccggaagtacaaagagtccccgatcgttatcaatgcggtagaatcacatcatggtgatgttgaagcagaatcactgatcgcctgtattgtacaggctgcggatacaatttcagcagcccgtccgggcgcaagacgtgagacgcttgaaacatatacaaacagattaaaacagttggaagatattacaaatacctttaagggtgttgaaaaatcatttgctattcaggcaggtagagagattcgagtaatggtagttccggatcaggtcaacgatgcggacatggtgctcctggcaagagatatcgcaaaacagatcgaagcagagctggaatacccaggtcagatcaaggtcagcgttatccgcgaaagccgggtagtcgattacgcgaaatgagaaatggaacagtatggctggaaaaggtcatgctgttcttttttatcttattttgtaactgttcagagccaagcagattttcatgcaaaagtgtgaatcatgcttgcatgaatgaacacttttacatggaaatctatttggcggatacgccacaccgacgaaatgcgcagcattttggaggttggctctgaacagttaccttatttttaagaaagctttgcgtgacaaaaagaggatttccgattatactgtagaaagataaaaatgatttttgccggagcgtttccccagaagattgtaaagatccgcttatagcaattcaataaaataatgcaggcaagacgatttgacagagtgcgaaagacaaggatgaaatctgcaggcgtgctgacgcatggcaaagatttctaacgcagtatttacgccctgacagatcggaagggatgcattattttgcagaattgctatagatatacgcttcgaaaatcatgataatttaggagacggttttatggagaaagaaattcgaaaagaaattcgaaaaaaagtagtctgtatggcagctgctcttggcattgcgcttggagcactgtcttctggcagcttccggatgcagagtgcggtggcgctggcagaagagaatgcttcgactgccatgaccggcagttattcggtggactccgattgggtcagaatcgagcaaaaaagcgatacggaaaaagacgtttaccggcaggaagcaagtaaggatgtggaggaaacttcggagattacctgcagttatctcgatacgaattactctgtggctgagtatgagcagttgagggacatgctgaccaacaatctgatgtacagcgatgtaaatgcacagatcagtacaagtgccggatataccgatgcaaaagattatctctatacgctgacggcagatgacagcggtaaggactaccgggatatctattattacgtagtgggagaccacagatgtttctgtgtgacggtgcgcgaataccgggaggaagcggcacaggcagagtcgtcggatgacacgccgcaggcagttggaaaaaagacggcgcaggaatttacctgggatcagcaaggatgagtgaaagaggagatttggctgactcagttaaaattaaacgtcaggggagtgtataagttgattcaggatattgggacattaagatttcataatgaatacaaaaagcaggatccggaagaaaaaagcaggattctctgctatcgaaacggagaagcgctggtacgggaatcgggcaatgggcagattacatttccgacttaccgggaactgcaggcaaaggggacagacgaggcaaagacagatatttatgagtttacctatctgtttcggatcgatgaggtggcttattttctgataccggaagaagcagcgaacagatttctggagggatttgtctggaaaccagtttctgttttccgaagcgcagtgccgaaagatgctgcgtttgccggtattaccggctatcagctctggcagtggtatgatcagagaaagttctgcccgagatgcggtcagaaaatgaagaaggatgacgtggagcgcatgatgcgctgtccggtctgcggagaaatggagtatccgaagatcagtccggcggttattgttgcggtatacaaaggaaatcagcttctgttgacccgttatgcagggcgggcttataaaaaatatgccttgattgccggcttcaccgagatcggtgagacggtggaagagacggtacagcgtgaggtgatggaggaagtcggactgcatgtgaagaatcttcactattataagagtcagccatggtcgtttacttcgactcttctgatgggcttttttgcggaggccgatggcgaagagacaattcgtctggaccagacggagcttgcagaggctgtatggtgtgatgccgcgcagattccggaggatgatggtgtgagtctgacccgtgagatgatgcaggtctttaaggcgcatgtcaataaaaaacttgagtttcataaatgattgtaatataataaaaccaatttagaaacaaatgatggaggaagagtcatggatattatttgtatgggagaagcgttgattgattttacaccgggaaaagaagagcggagttatgtgtgcaacccgggcggagcaccggcaaatgcctgcatcgcgatcgcgcgcaacggtcttaagaccgcgttccttggtaaactcggaaatgatgattttggaaagcttctgaagactacgctggagaaagatggcgtggagctgttgtgtccggagcttaccgatgaggcggtgacgacacttgcatttgttactctgtatgagggcggtgagcgttcctttacatttgtgcgtaagccgggagcagatattctcctgagcaaggatgatgtgaaggaggagatgatccggaatacaaagattctgcatgcaggatccgtaggaatgtccgcaaatccaagccgtgaggcacatttcaaggcaatggagatggcaaagaaggcaggaaagctggtaagctacgatgtgaattaccgcaacatgatctggagctttgaggatgcgaaggccgttgtagatcaggtacttccgtacgttgatctcctgaagatttcagatgaagagcttgattttgtcggcggagaggcaaacattccgagcgttatgaaagagaacaacatcagtgtagtgatcgagacgcttggctccaagggggcaaaattcttcttcgatggaaaagaagcggtagtagaagggcataaggtaaaagcaatcgatgcaaccggagcaggtgatgcattctggggcggtttcctttcaagcctgctgatgagcggcgtgagcaagacagaagatctgaatgaggatctgctgcgcaaggcactggaatatggaaatgcttccggcggtttgtgtgtacaaaagatgggcggtattccggctcttccgacaaaagaagacatcgaggcatttctggcataaagaaaacagaaaactgcgaaagaaaaacgaatcagtgtacggtggcggtgctgctgtacactgatgttatgttagaacacagattgcggagaaaggagaattttatgtatcgcgagaaactggatgcgtatattgacagcaaaaaagaagaaatgctggaagatctgatgacactggtgcggatcgacagccagagaggtgaggcgaagacgggtatgccgtttggcgaaggaccggtgcacgccctggaagcggcacaggagctgatgaaaaagtatggccttgccacgagaaattatgaaaattacgtggtgaccggagatttcagtgagaaagagaaggcacttgatattctggcgcacctggacgttgtgccggtaacagaggactggacggtgacaaaaccgtttgagccgaagattgtggacggaaagatttatggaaggggaacagcagatgataaaggaccggcgatcgctgccctgtatgcacttcgggcgatccgtgagctcggcattccgatgaagaagagtgtgcgcctgattctcgggtcagatgaggagtgtggatccggcgatctggagtattactatgcgaaggaacaggaggcaccgtatacctttacgccggatgcagatttcccgctgatcaatattgaaaagggaagctttcacggtgtattttcctcagaattaaaggaaaacgctgtggcgtgtgtacgttctttccagagcggagataagatcaatgttgtaccggggcgtgcttcgatgattgtggatggcgtggcagaagatgtgatccgtgcagcggcagaaaagacagaaggtgcaaccggtgtatctttccgggtgacggcacttgcagatggtggtgtgcaggtggacgcgaaagggcaggcggcgcatgcttctacaccggaagagggaaaaaatgcgctgacagcaacacttcagctcattgcagaacttccgcttgagcaaagcaagggaaaagaagcgctgctcggtcttcatgcaatgttcccgtatgaggatacctgcggaaagaccgtcggtatttaccgggaaaatgaggaatcaggggcagtgaccgtctgcttcagtattatggattatacgaaaactcatctgcatgcggcgtttgatgcgcggcttccgattggctgcaatgaggagaatacgaagcttccggtgaaagcggcagcagagaaatatggaatggaactggaagaccttccgctgaatccgccgcattgcgtaccgggtgactcctggtttgtgcagacgctgcttggcagctatgagcgttatttcggcaaaaagggcaaaccgctttcaaccggtggtggcacctacgtacatcatctggaaagaggcgtggcgtttggctgcatgacagaagatgtggataaccatatgcatggagacaacgagtttatggtgatcgagcgccttctgacaagtgcgaagatttttgcagatgcgattgtgaagatctgcaatgcatgacagaaagagcagctgactacttgagtcaaagcggatatatgctggataagatgtgagtcatgagatcattcttgattttcagctgctgccgctgatactggaaaaaatatggcacctgccgcagaatgcaaaaacagaacggcggaagcgctgcacagagaaatgacagaaaacctcaggtgatttctggtgtccgtttaatcggacaccagttttatttttgagatatcagagtcgatcatcatcgaataatttgtataataaacgacgaaaccaggctttgcgccatttggctttttcacatgcttcttttctacgtagtcgatctccaccttttctgcattctgatttttagaataatgggcggcaagtcttgctgcctcctcaaaggtggaatcaggaagttcttcgcctttggctttcacgataacgtgagaacccggtgcccccttggcgtggaaccaccagtcgctgccggaagcgatcttgaatgtgagctcgtcattctggtaattattttttccaacgtacatgtcgtatccatcagaggagacgtagtggtacgggcgtgaggtaatctttatccgtttccctgtatatttgcggcggatgtatccggcatctgtaagctcctccctgacttgaaccagatcgtcctccgagagcgcaagatccatgaacgtgcagatcgattcaagctgatcgatgtcggcttttgtctcagctacctgtgtggtcagtgcttcaaaggttcgtttcagcttgttgtatttattgaaataatgctgtgcgttttcagaggcacttaaggtagggtcaagcgggatcgtgatcatttcattcgtataataatttaacgcctcatactgctttgtgcccggggcgatgtcgtatccgtaggcgtggagcagttcgccgtaaagctggtatttgtcacgtttttccgtatctttgagctggcgtgtctgcagttcatattttttgcggcagcgttccagtgccgtcacggcgatatgacgcaggtccgaagacttctggcggatacgggtcacggtgttcttcatcgcgtagtagcgctcaagtacttcggagattgtcccataagaagtcgtcgtcaggtcgtgatacatagtaagctggagcgaggaaaactcaaccggatcgccatgcggatccgagatgatgagtggggtgaatctgcctgattttacatcttccatcatcagatcaaagagatgatagaggtgcgtctgcgcaagaggtggaattgtattggcactctggtcggattcgagaccggcgcggcagcagagttcctccgcaataaccggactgatgccggtgtaggatgtatagattgccttggaaagcttcatcggctttacaaagactgttttggaaaattcttcctcggtggtgtttaagggatcatatttttcctgtgtctgggcaatgaaataagggcggccgggaagtacttcgcggatggagctggtctgggcggatacacgcttaatgctgtcgatgatcgttccctgatcatcgcagaagatcaggttgctgtgtttgcccatcagttccagtacaagatccttgcggcacagatctcccatttcattaaaatgttcaatctcaaagtggatgatgcgctccagacccggctgccagacgcgcagaattttgccgccgccgatgtgcttacgcaggagcatacagaatgccggagcagtgacaggggagggtttgttgatggaagtcagatagataagcggaaggcttgcacctgcggagagcagaagccttgcctgtccggcagggcttttacaggtcagcaggatttcatctgcttccggctgtgcgatctttgcgatccgggcgcctgagagacggtcgtttagctctgttactatatttgaaattacaataccatctaaagccataaaaaatctcctttggtgtttatatcatttctgttcagatctttgcaaaattttaaaagcatctttaaaaatgcaggtattttcctgctgctttatgaaattgacccggtgctgaacagtaacatgatatcagatttgactgaaaaaaacaattggcattgacggcagagaagcaatcgattataataattcaatatgggtaaatctgccgtaaaacggcgaagtgacagcaaaagtaattgcagaggagaggaatgacaaaagcaatgatcaagagcatgacaggctttggcagatgtgaaaatcatcagggcagcagaaaatttaccgtagaaatgaaggcggtaaatcaccgctattttgatgtgagcatcaagatgccgaaaaagctgagtttttttgaggcggccatccggaatgtcctgaagcagtacgtgcagcgcggaaagctggacgtgtttatcacgtatgaggattatgcggaggagaatgttgcgctaaaatataatgaagaacttgcgggacagtacctgaaatatttccgtcagatggcggaaaagttcggtttgaaggatgatatcagtgtatcttccctgggacgctgtccggaggttttcacgatggaagagcaggatattgatgaagaagagatctgggctgaactgaagaaggcagtggaaggtgcctgcgtccagtttgtgaaagcaagagagcaggaaggagaggcattaaagacagatcttcttgacaaattggagagaatggacgaaaatgtaactctcatagaggatcgatatccgcagattgtctctgaataccgcagcaggcttgaagaaaaagtaaaagagcttcttggagacctgcagatcgatgaggggcggattgcggcagaagttgtgattttttctgataagatctgtacggatgaggagaccgttcgcctcagaagccatatcgcgacaatgaaagaggcgttgattgctggtggaagtatcggccgcaagcttgatttcattgcgcaggagatgaaccgtgaggcaaacacgattctttcgaaggcgaatgaccttgctacatccaacgtagcgatcgacctcaaaactgagattgaaaaagtccgcgagcagatccaaaacatagagtaagcagtttggggtgtacgcgcagaacgtccggagaatacaccgcataagcaggcaaatctgtgaaaaaagaaagaggggaacgcgatggcaggactcgtaaacatcggttttggcaatctggtaaatgcccagaaggttgcggcggttgtaaatccggatgcagctccgattaagcgcctggtgcaaagtgcgaaggaacagcaaaaggtgattgatgcaacgcagggccgcaggacgaagtccgtgattgtgctggagacagaacagatcattctttcggctgtgcagccggacactattgcgaggcgttttgcggcgacacagctgacagagcaggaaatgagaggagaagaataatgaacagaaagggaattctcgttgtgatttccggtttttccggtgttggaaaaggaaccctggtaagacgtctgatggagcgctataaagaacagtatgcgctttctgtttcagcgacgacgcgggaaccgcgcgagggagaacaggatggccgggaatatttcttcaggaaaaaagaggagtttgagaagctgatcgcaaatgatgagcttctggaatacgccagctactgcggcaattattacggcacgccgaaggcatatgtggaggatcagatggcacagggacgtgacgtgattcttgagattgagttgcagggagcgctcaagatcaaggaaaaacgcccggatacatttcttgtctatgtgatgccgccggatgccaggactttggttgaccgactgacaaaccgcggaacggaaactccggaaaaagttcatgagcgtctgacaagagcacttgaagaagcggacgaagtagccaaatacgaatttgtggttattaatgatgaccttgatcgaagtgcagaggaactgcatcagctgattgaggttcagcataataaaatagacagaaatctggaatttatcagccaggttcaaagagaactcaaagcatatttgaaaggagaacaataaacatgctgcatccatcttattcagaattaatcaaagtagtaaacagtgatgtcgaggagggggaggctccggtagtcaacagccgttattccatcgtacttgcaacagcaaagcgtgcgcgccagatcatcgaccgtcagtcgaccggagatctggatgttccggtgatctcaaaacctctttcaaaggcagtcgacgaactttacaaaggagagatcaagatccttccggagcaggaagagtctgaagaaggctgagaaagggacgatgctttttgaaagaagtaaagcagtttagtaaaagctatatttttatctctgcgttatatgtggtgcttggtatcgtgctgcttgcatggccgacgctctccgtgcagatgatctgttacgggtttaccgttgcgatgattgtgatcggcttttcctatgggatcatgtattttacaaaagataatctggaagggttccagcagatggatctggtgatcggtatcatctgtctggcattcggtatttttatttttctgaatccgacctttttgagttcggtgctgccatttgcgatagggatcattctgctgctcggggcaattgtcaaaattcagagcgcctttaatatgaaaaagctgcgcttaaaaaaatggtatctgattctgatctgtgcgcttgtagttggagcgctcggagcggtgcttctctggaatccgttccaggaggaaaaatatatgattctctacatcgggatctgcctgatcctggacggactgacgaacctgatcagcctgatctgcattcagacacgtcttcggaagctgaaaaagattcagaaagcaaatccggatatcgatctgaaggagctgcttgagcagcaggcgcgcgcagaggcagagaagaatgtggtgattgtgccgggacatacggaagatgccgggaaagaacaggagtaatacatgaaaatattttttgtttctcttggatgcgacaagaatcttgtcgactccgaggaaatgcttgcgcttctggaaaagcgcggatatagttttaccgatgacgagacacaggcagatgtgatcatcattaacacctgctgttttatcaatgatgcaaaagaagagagtgttcagacaatccttgaaatgtccgagtacaaaaaagaaaactgtaaggctctgattgtaacaggctgtatggcacagcgctacaagcaggaaattctggatgaagtgccggaagtagacatggtgcttggtacaacggcctacgataaaatcgtggaggcgatcgatgaggcgcttgccggaagcagaaaagtagagacagagtctttaaatacgcttccgaaaaccggtgcgggccgtgtgctcacaaccggcggacattatgcgtatctgaagatcgcagagggctgcaacaagtgctgtacgtactgcatcatcccgaaggtgcgcggccgttaccgcagtgtaccgatggaagaactgattgcgcaggcaaaggatcttgcagataagggtgtaaaagagctgattctcgtcgcacaggagacgactgtatacggtgttgatctttatggaaagaaatcattgcatcttttggtgcgggagctctgtaagatcagcgggcttcgctggattcgtctgctttactgttatccggaggaaatttacgatgagctgatcgagacggtgcgtgatgaggaaaaggtatgtcattatctggatctcccgattcagcatgcaagcgatgcggtcttgaaacgaatgggacgcagaacgacgcaggcagatctcaaggagattattgcaaagattcgcaaagagattccggatatcgtgctgcgtaccacgctgatcgccggtttcccgggagagacgcaggagcagcatgaggagacgatggcctttatcgatgagctggagtttgaccgtctcggcgtctttacctactcgcaggaggaggatacaccggctgctgtgatgccggatcagattgatgaagaaacaaagctgacctggcgggaggaactcatggagcttcagcaggaaattgcgtttgacaaggcacaggaccgtgaaggaagcatcgtgacggcgatggtggaaggaaaagtcgcagatgaaaatgcttatgtggcacgtacgtacggggatgcgccgaatgtggacggcctgctgtttattcagacagcggaagagttgaattcgggcgactttgcccgtgtgcggatcaccggatcggcagagtacgatctgatcggagaacttgcagactgaaaagaggagtgaaaaaaatgaatctgccaaataaactgacggtacttcgcgtgtgcatggtaccagtgtttgtggtatttatgttgtggaatggatttgggacagcatccaaatatgtagccgctgcaatttttattctggcgagtatgacggactggctggatgggtatctggcgagaaagaacaaccttgtcacggattttggaaaatttatggatccgatcgcggacaagctgctggtttgctcagcactgatttgtctggtggaaaaaggtgcacttgctgcatggattgtcattattattatcggccgagaatttattatcagtggcttccgtctcgtcgcatcagacaaaggtgttgtgatcgcggcaagttactggggaaaattcaagaccgtatcacagatgctgatggtcattctgctgattctggatcttggtggtgcatttaatgtggcagcgcaggtgctgatctggatcgctgtcattctgacggtcgtatcgcttgtggattatctggtgaaaaaccgcagtgtacttgcaggagagatgtaaattatgttctgctggtatgcacagaagtgagaacagggaaaggctttgataatgtgaccgagaggacggagtgtcagatgacatatccgtcctttttggtcggggcaaaaccatagctttagcgttgtataaaaaacctccggtgaaataataaaaatatggggaatcgaagcgggatttgcttgattcgcttaaaaaggcagacaggtgatataaagaaaaatcgcaggagaaagcctgacatggaagaaaggagcggaaacgtccatgaaaaagaaagaagaggaaaaacagaaaaatgttaaaaagggcaggaggattgaaaaatcagaaaaagtaaaaaaggacagtaaagaatggaaagaacagaaaacggaagacaaaaagcacgataccggaaagatggaaacagaagtcgaaaaagatttaaatgaaacggcaccatccgcgccggaacaaagggtagtagctgtattgaaagaaagaggactcaccatgacgacggtagaatcctgtaccggtggaatgattgcggcggcggtcacttcggtagcaggcagttcttctgttttccatcagggatatgtgacgtactgtgatgaggccaagcatgagatggcaggcgtgcgcaaaaaaacgctgagaaagtacacggcagtaagccgtcagactgcaaaagagatggcagctgggggcgccagggctgcgaaggcagactgctgcatttccgtgactggctatgcaggtccgccttctggaaaacctggggaagaagtaggactggtttacatcggatgtgcgtttcggggaaaagtaaaggtaaaagaatgtcatttttccggaacacgtggtgaagtgcgggagcaggcgaagcaaaaagcactgaaaatgcttgctgtacgcctggagcatcaggggtaaatcgaatactcacaatgtgttgcatggttatcagctgccgctttgccgggaaccacctcgggcgcctgctgcgcgaaactgccgcatcagtgcgcaggcacggtcaatctgctgaatttcctgaggtgattttccaatttttaatacctcaacaatagaatctatttcggatggctgaaaagaaagctgttttccctgtgcgcctgctgcggcagacattaaaaagggaagcagctcgttttgttttttgtttccggcctgtgaggcaagagagagcagaagctgcagtttgccaggatcgataccggagagggcagggttttgcatcagagaatccggattcataaaaattcctttctaaaagcactggttttcctgttttttataatatgtggcagcgattatttcgtgtaaaaataagttgcagggcgattgcaaacatctgcgttgccctgtcgtcagcagctttcggatgaaacatcatgaaatgccctgttttcggaagcactattttccgggaaactgttttgaaatatcatggtgtcagaggtgcttttggacatcgcactgtacagttcaagcatggagagtgtctgcagcagctgatcgatgatggattgttcactttcgtcacagtaatttcggatatcagtcaggatttcggccggactggcagaactggaatcttcaatggactgtgcacagcaggtgtggctgcggtaaaaagcagagatattctgcagttccatcattttgatacaatagcagagatttttctggtttgcaggcggaaggtagggaagcatggcttttatcagctgcaggtggttctgatttgccacctgatcgatcatcgtcatcataaaaggagctccttcgcagcatcttatcctatacatacgggaaaaggaaaaaaaatagaacacgttcttccttcttctgaatagggtaataaaaacgggaaaaggattttgatatgagttctcatattgtaattgatggaaacgcgttttatgaggtggatgatgcctgcatgcgtgaaaaggagaaggaaagagaaagactgcggaaagacagggaaaagaaaagtggggaagaaaaagaaaagaagcagcggcagtacggaaatggggactgaatgctcgccagtcccctgaaaagtgcgtgatcgtgtttttgacatggaagcagatgcttgcataagaaaattttatctgcagtgcaaaaagacagagggcgaagcccggtgcttcgccccatcctggagccgcccgccagacgaagatcagggggcggtcactttctgcctgatcagatcaacatccgcagccgttgttgccgcatccatttaggaagttagtgccattgccgcagccaccgcagcaaagcaggagaatcaggatccacatgcagctgttgtcaccgaaaccatttccgcagccattgttgccgcatccgccgcagcaggaaagcagaaggatgatccagatccagttgcaacatccgcctgttgtgtttgaattctcgcatccgcatccacatccgcagtttgttgctgccaaatcgctcatttcgtattcctccgaaataatttttacaatgtatcttatgcgtaagagactgtaaggtgaggaaataattgaaattttttatttgaccgatttgatttttatggtcgtccgaatgtgtcaaaaatccgcgacaggttcatggttccgtagccccattctcggttgggataggaataggagggattttgagaggcagcacgcaaaaaaaggttttttaattcacgcgaggaaagatagcgcgttttataacgctgccgtccccattcagccagaagtgcggtgcttcctgcggtcagtgcggaagcagcgctggaaccggtaaaattccggtacgtgttgcctggtgatggggcggtgagagagacacctggcgcagcaaaatccggtttgacgacaccgctgcgcggataaccccgtccggaagcgcgaaacaggctcccgttgtaagcattgtaagagcctgctgagagaagcggctctgcgcaggaaggaatgacgagggtggtgtccggatctggggaggtgaaggtaatgccaggtgaaacgagcccagagaccgggagccagaggtggaaattgccgttgggaatcccctggcttgtaatgcgcagacgccagacaccaggggaggggttcagcatgcgaatcagtgccatctgatgcccggtgagcatttcaagtgcagtatagtagacctctatttttgtattctccagaagaaaatgaaatgttctggaagtgatcggcccgtggtagaccggaagaatggattcaccggttggagagagaaaaccgatgttgtaaagagaaagggagtcactccagaattcaaggggaacacctggaatttcatgattgatcaggagttcaatgtcgatggaatcgtcagcagaagaaagccttccggaataatggtgggaagcgccaacttcatttccggtgccggttgctgcataggtgccgtttacggcctgggcggcagtcagcacttcctcaagcggtgtgtttccggtgtggccgccctgattggagccgagtgcaaaacagattacaagcgggcgctgcagtgatctggcggtctgcatgagataacggacgccgagcatcagatcgttttcctggtaggcaatcgcatcacctggaatgagaaaataatcacgcagatatgcttttgccggtttcaggcggacgaaaagcagactgcttcgaggcgctgcgccggtaaagtcggattccggatcagggcttccgcaggcaatccctgcgacggcagtaccgtgcccctcctcgtctgcttccggtacgattgcgccggggctggaagaaaaaagcgctgcgttgatctgttcgcccgtgtaggaagagccataaaggaatcccggagg

SEQ ID NO: 2095 - DNA, 7076 bp, Unknown
  16S sequences of unknown bacteria
aataaaaataatggataataacagcggattacaaagtgtacttctcatccgttttccaacctgtacggcgcaccagtagcccatcagggtaataaaaaatccaaagtaagcagagttctgcatcagactatccatggaattcatcctccttatctctctttctgcgcaccagtgtctgcgcgatcagtcctgtcagaaccataacaaccatggtggacagtacagagattataaggattccaagcagagaatctttcataagtccaaaagattccatcaaggcaactccaggccccacaaataccagcggcatagctaccagcataaaatctgcggtctcctggatctgatccagcttaatgaccttggtacaaagacaaatcaacaacagtaacatgccgtatacgctggccggaaccggcagcggcaacagataattcagaagctctccagccagagagattccaccgataatcataacctgatatgcgtatttcataatatttcctcgaatgttattttttccatttggtaagtttcggataatttttccgacctaccatatatttcctcatataggcaaaagtaaattcctcgcccttttcatcaagcatatgaagcatatactccagaagtgcccgcgtctccgggtggatcatataagaatccttacccttttcataatattccagcggcgaatgctgcgtataactttttccttcatagatcttggatgctgcgatccggtccatgatcatctcattgacatatttcaacggcatcttcatgcctgccattcctttgaccggtcccagactgtaatcgatccagtactcatagtggtgcttgttgcgtcccttatgatgcagccacgcagcagaatatcctttatcctcgcgttccgcattgtttggacttcgatatccctggtaatacttgcatccctgccagaactctgacggggaatatttggacagatcatgggtcagtccctgccagtacatgccgaccttgaagcagtgcttcgccaccatgatcttatgctccgtaatcgtatgaaaatgcttccatatattaatcagtctcatatttcgcgccttccagtatcaagattgtgtgaggttccaccaggatcatcttctgctttcgtggaagcggcttctcccgttcctttaagaacacatcttcccgccccgtatcagccagaagataccattgctctttgcccggcagtgttggcagtgccagctcatgcacgatcgcatccatattatataaaatatataaagtgtcctctccggtgtaagctcccgcatagagaacgccgatctgacggctctcattctcaaagtccccgtaccatgctttctttccatggtaagacagatccggaattccgtgagacttcagatctctcatctgatactcagatgcctgcccaaaagccggatgtgcttttcgaaatgagattgtctcacgcacaaactgctgcagctttctgttagcagacgactttccccattgtatccaggacagcggattgtcctgacaataaacattattgttgccctgctgagaattacccatctcgtctccgccatagatggccggaaccccctgcgacaacagcagcaacaaaaacgcattgcgaagctgtctggatctgagcttctggattcgccttgatgtggtcggaccttccacgccataattacaaccataattataattgcttccgtccctgttatcttctccattatcctcgttatgcttggacgaataagaaaccgcatcatttaatgtaaatccattgtgggaagccagataattgattgtggtacaggtggccgggttccttcggatactctccgcaatctgtccggtcatattttcatctccccgcagaaaccggcgggctttgatcagaaaatcatcattgtatgctgccagtcgacgatacaccggtacttccttttccgcaaagatctgatccaatgggaaatattcactcatgatcttggttcttgacaacaccggatccaacgccagtgcccgaagtggagccaccgcacaattcacatgtacaccatctatgtgatattctttgacccaataatggatgcagtccatgatcagattggggctggttctctctgcaaaataaaactccaggatcagctcgattccattcttatggagtgcccgtaccagctcttttaactcctgcaccggattaccagacgcactgtatgcagtctttggtgcaaagtactgtgcctgtgtatatccccagtaattgatcttatcaaaatatcccttcggcaccggctgatgcttcttctgaggcggtcctactgaccattcaaaaaactcatagactggcatcagctccagctgcgtgattcccattccttttaaatagggaatcttctcccgaatgcctgcaaaggttcctgggtgtcggaccttcgccgacggatccatggtgaaccctctcacatgcgtcgtgtacagtatacactcttcataaggaagcttcagcggtcggtcacctttccaggaaaaatgtcccgtctccggcacacaccttacctctttgccttcctctggtctttctccccagtgctctcttcctgtaagctgcactgcataaggatcctgtacaacttttccgtcgatctggtaattatattcatatgtatctgctggaaactgactgatgcgaactgcacagacatctccaaatcgcatctcttctgtaaacggaatctcctgctcaatcttgacagagccttttttatacaacaacagactgcaatcccgattttccggtactgcagcggcaaaattcagatccctttgaagcctcgtgacacccaggcgttccggttctcccggtctaacatccatgcgcaatgtcctctttatcttcttttttcggtagtcgatatttaacccaattatatgtattatagcatctggcggtgcagttggcaacaaaaaagagcttccgggcctctatgacccgaaagcctgttatatcaatgcttattgctggttttcgctcgtctggtctgtgttctttttatttttcttacttttcttaaacacaaatttccgaagcaggatcacaaccactgcaaggatcacaccccagaccaccaggattggaagggagcctaagatacctattgcaaatccacgcagtcccatgagtactacatagacgctgtcgctgaatctggaagccacttcctcaaagaatccctgtttaccggtatcagtcactctggacacttctgaaatatccacatagacagtactgtaatcgatctgattgtctaataaccggatctggctttcataattttccagttcataacggacatctgacagacggttttcaatggtaatgatatcttccacattttctgccttctccagcagtgccagcagcctctcctgttctgtctccaatgctttcttatgactttccacatccacatagcgaagagtcacatcatccacactttcatttttataggtcacatttcccagtgtctccaccacatcgataaattcatccagcttgtcagacggaatgcgaagtgtatagcttgcggaacggctgctggaatagtccgagctgttgccccacacagaagaatcctgaatatatccgcccagatcttttaccttctgactcatgttatcaaggacggtgtcaaattctttcgtctgaagacttagattcacattccgtatcagctttcgatcagtttcctgcacctcttcgattccattttctgaagtcacagcaccgcttccagcttcctccgcagatgccgcttccgttgtgtcatagccactgtcatatgccatatcatcataagctgcgctgtccgccactgcactttctgtagccatcatagacttgcttccgcagccaaagatcgacactgccagtattcctgataatacacaagccaatactttctttttcatttactcctccctttcctttcgcatctcctccagggtctccatctgctctgagaatacttcttcaaaggtaaattcagcactgagcatatgctctccgatccgaacaaccagccgatacctttgtgcaccatagtcgatctgatactgcgtcaggtcaatggcttcatccatggccatcttctcctccagacgtgtccaggtcggctctttgctctcggtactggttgtcgggatcacataccagccatcatccagccacacttccagaattggcggcatctgataagatgttgacgtctctcccgtattggcgatggtcagtgtcaacgtcggattctcttcatccagtaccgggcagttcaccagagtgtttacattttccagtgcctccggcatatcctggatctctgccagataaatggtctgcccacaatatgtcttgccctttgaagtatccacatctgctgtcttctctgcttccaggccgtctgccgcaccagtatctgccgcatcctccatagcatcttccgccacttcaagttctgcactctcttctgcaacgtctgcactttctgctgtcatcattgccgtggtatccgcgttccctttgcctccgctgtgctgcagatacacagttcctgccaatgctccacatacacaaaacactgcaacacatgccgccagttgtccccattggaaatggaaatgcttctttaattccttttcctgcatcttttgttctgcttctgtcatcatagcttccatctgttcctcaaaccccggtgaaaaccgatgctttcctgcaatctcccgttcatgaggaacaaaacttaaatcttcttccaggcactcgtccagtacccgggtcaataattcttccccttcagtccgggcaccgtttctaagcctcttcaatgcttttttcctcctttcggatcatttcctgcagtttttttctggcacgaaaataccgtacattcacattttttgcagagattcccagaatatccgcgatctcctcgtcactcatctggtacaggtacttgtactcaaacaccacccgatagctgtcgtcaagctccagcacacaactgatcagccggttataattctccttcaccagaagctgatccagaatatctcttcctgccttaccttccggcagctcatccgtcaattcctcctgtggattgttcttccgtatgagatcgattgccttgcttctgataattgttgcaagaaattttttcgttctggggctgtgtgcatcctccactttatccagatgcctggtcagtgccagaaaagcttcctgcactgcatcctccgccagatgggtatccttaagtttcttctgggcaatgtaccacataaaatgccggtagttctcgtatatctccctgaacttttcctgttcttcctgcgtgtccagaagtgccagaaacagaaccatgtcttatcctcctgtaaatgcatctacatctatataaacgcgtttttctttcattttactacaagacaggaagaaaatcttctaaaaaaatcttaaatgtttctgaacgaacatttctaatatatgtgtcctacttcacatttacagtctcgttcagggtgaattctacgcagcccatagatccgggagcgacatcgtattcgttgaagcagactacaatgtgtccgtcttcattgacgtagaaatcctggtcttctgcgatcttgtcaaaattccactcttctacctctggatcatccagccagtactgtacagtttcatcggctgccatctgttctctcatctgcgtcttaatttcttcactgatggtatcaatatagtcatctccgcacagatctttcagcgacagttcttttccggtctttttatcaacggtataatgcttgtgctgttcataaccactgcctgctccctgatagaggatcagttccagggagaaaagatcgtcggtgtccagcttcacgttgctgtcaatgtagatgttctgataaccttcttcattttccatgctctttttgaactcttcgatcagcttattggtctcttcgttgatatcaaaattaatggcatctgcggatacttttgcctgctcaacggtgtcactgtctgcattctcatccgtagcagctacttctacctgcggcacttttacattcgcactgttgcgctcctcatccacctgatactcgcggacagtcaccactttgaacagattaccaagtaatgggatctgctgcatggctgccgctgcagtctggctggtattcggaagaatcaacacgatggcaagtactgctgccatgcttccaaatgttttatataacgttatttttttcatacgtttcttttctttttttgctctgttaatagactgttccagtttctctctcatctcttccggcactttaatattgtcatactcctttttccagtcttccataattcacccctcctgcttccatatatttctttaacttatccattgcccggtacagcttgctctttaccgtactaacattcagattcatgatctgtccgatggtctcgatcttctcttcttcaaaataccggagcactacgatgcttcgttccttttcatccagcttatccagcgcccgctgaagatccacatcctcaatcttgtcttcctgtccctgctctggtacctcttccaccgaagctgtctgtttgtttttcttcaggaaccgcagtgcctcatggatcacaatccggcagatccaggtatctgcgtattccggctgtttcaaaagatcactttttaagattgcccgatatgccgcctcctgtacaatatccatagcatcctgctcccgaaacacatagctgtatgccatgcgataatatttttcataattctgtaccaggcactcatgaatcagcgcctctttgtctgatgccctcatattattcctcctctctgctttcttttacctattagaccttaaggttttgcggaaagtttcactttattttcattttttcagaatctttgataaaaaagggcaaaaagccctagtttcatgcttttcacccttta

SEQ ID NO: 2096 - DNA, 25197 bp, Unknown
  16S sequences of unknown bacteria
tgggcatggcgatttcggattttgaagatttccttgtaagcaacaatattttgccgctgggttcgctggtatatgtgatgttttgcgtatccaagcgaggctggggctggaaaaactttttgcaggaggccaatacggggaagggacgcagcttttcttcgcgcatttacctgtatgccaaatatgtgatccccgtcatcgtgctgtatatctttatacagggatacatcgtaaagttcttcctgccggcaggctgagcgcatagagaaaaaccgaccctggggtcggtttttttctttgcaaacgtgccttggctccgtataatggaggctatgggaaaagaggttttgtcaatgggaaagaggacaagcgcagccagagccgcctttggatataccatcccggtgctggcggggtatgtatgcttgggcgcggcctatgggctattgatgcaggccaagggcttgggatggggatggacgctggccatcagcctatttacctatgcgggcagcctgcaatttgtcatgatcggccttttaaccagcgcatttgagccggtatatgcatttttgctggcgctgatggtcaacgcacgccatctgttttacggcatctcgatgctggggcgctttcagggcatgggctggaaaaaatggctgctggtatttgggctgacagacgaaaccttttccatccactgcgccgccaaagagccggcaggggtggaccggggatggtttatgctgtgcgtttcgctgctggatcacagctactggatgctgggctcgctgatcggctgccttgcgggcgggttgtttgcctttgatacaaccggcattgattttgtgatgacggcgctgtttgtcgtcatctttttggatcagtggaagcagcagaaaaaccacggcccggcgctggtgggcctgggggcctcggcgctgtgccttttggcgtttgggccagatggctttttgctgcctgccatggcgctgatcgtggcgggcattacgctgtgccgcggcagatgggaggaaagcgcatgacgaccttgcaaatcggaattacggtggcagcttgtacgctggccaccatactgacgcggtttctgccgttttggctgtttccagaagggcgggaaacgcccgcatacatccgctatctgggcacggtgctgccgtatgcggtgatggcgatgctggtggtgtactgcctaaagggcgctacgccgctttacgatccgtatgggctgccagagctgatcggcgtgctggccacggcagggctgcacctttataagcgcaatacgctgatcagcattgcgggcggcaccgctgtgtatatgctgatggtgcagtgtgtatttgtataaagaaaaaaggacagcagcgccgtccttttttgattgcatcagatttgcttttgcagggtatgcaggaaatttgggtccgccataaaggggcgggcaaagccgaaaagggagacgcggctatgctgatagatgggcaggatatcctgcatagagcgcagcccgccggtgagaattacaggggtatccaccaggccagccaaacgcacggcagcatccttgtagtaagcgcgctcatccggggtatgggagcgccagcccaggccgctgatttcgatggcgtctatgccggcctctgccaaggcctggcccatgggcaaaaactcttcgacggtgagcccgcccggcatttcgtccgaggagttgatcttgatccatacggggtaatccgggccaacggccttgcggatggcatggtagacttccagcacgatgcgcaggcggttttccaccgagccgccatactcatctgtacgccggttgaagatgggagagatgaaatgggagagcaggtagccgtgggcacaatggatctgcacgccgtcaaacccagcctttttcacgcgcacggccgcgtctgcaaaaagctggacaacggcgcggatgtcgtctttggtcatctcttgaggcgtcagcccactggtgggatgtacgagagcggagggccccaggatgcgggcagagtcggggtatccttggctgtgcgagctgccatgcacgatctgcatgaagatcttggaacccagcgcatgcacggcgtccacgaccttttggtaatcggggatcatgtcatcgcaatagatgccgagctggtttttggcgggctgctcgtaatcggcaatgtaggtatagctggttaaaatggtgccgacgccgccgcgcgccagatcttggtacagggagaggattttgtcggtaggccgcccatcctctgtggcggcgccttcataggtggcggagcggagaaaatggtttttggcctccaaggtaccgatgcggacaggatcaaacagattcataacacaaggctcctttccgaaaagagatagacaatcgaatacttacagtatacgccacccccggcatttttgcacggtgcgaaaaggagcggatattggcgaaaacaagccgtttcccgggaaaagaaaaggccgggcaaaaagcccggccccgcataggcggaaagatcattcaaaactcatctgtgttttatcgccgatggtaacagtggcggtgttttcctggccgtcgcgcacataggtgagggtgatggtatcgccgatattcttgctctccatcagctggatcatctcatccatcgagccgatggcttggtcatccagcttggtgatgatatcgcccacctctagccccgccttttcggccgggccacccttgctgacgctggccacatagatgccgttttccacgttataggcctgcttgccctgttcggtcagcgagctgcccatgatgccgatgccgctgcgcggtacctgctggccttgggcgagctgctctagcacaggggaggccacgtcggaggggatggcaaagccgatgccctcgatgctggtggtttcgccggtgacggtggaaagcatggatttccgggtaatgatgccgaccaattcgccgttggcattgaacatggggccgccggagttgcccgggttgacggccgcatccgtctggataaaggtctgggtagcgctattgagcaccatttcacggttcaggccgctgacaatgccgctggaaacgctgttggcaaacaggccgttgtacgggctgccgatgacaaagaccgtatcgcccagccttaggctgctggaagagccgaacttgacgggtgtaaggccggtcttgtcgattttcaaaatggcaagatcgctgtaagaatccgtggcaacgatctccgcctcgtactgctgttcatcgccgtttagggttacataaatgcggccggcgccctctacgacgtggttgttggtggcgatgaggccatcggcagagtacacaaagccggagccatagccgctggccacctctgtaccggcgcgctgggcgtattgggtggtggtgatggagacaacgctaggcatgacagaatcgatgacatccgccaaattcgatgagcccgtgttgggcgtggtggactgcccattgttcggcgtagccgtagcggacggggaggcggtaggctctatctgggaaatctggccgctgcgcccagaaaaggctagaatgccgatggaaatgcctacggccaagcatagtaccgcgatgcacacctgcatccagatcttgttatgacgtttgggagcgttttgctgttccataaacgatcactcctttgctgcaaaatgaaacagttcgacgttagtatagcccctttgaggggccggctgcaacgcaaatcacaattgttcaaaacctaggcaagattctgccaaaaaacagtccgttcaataaaatgaaacaaaaggaaaagcccctccttgggggcggagaggctttcctgtctatattggggagagtttattttacagacacatagttgctgtccgtaacgattttttggccggcatcgctgagcatgtagtcgatgaacttctgcgccgcttcgttggtgctgccttctttggtcacaaccaggaacgggcgggagatggcatagctgccatccttgacagtttcggcgctgcatgccacgccgtctacctgcaaggctttaacatcggtgctcatggagccgtaggagatatagccgatggctgcatcgttgcccttgacggactggatgacgccgctggtggcatccatcacgccggcgacaaagctttcatccacatcttccaggccgagcaattcctctacggcgctgcgcgtgccggagccggcttcacgatagaatacggcgatttgcttgtccgggccgccgacctcgttccagttggtgatctcgccgctgaaaattttggcgagctggtctttggtcaggtcgttgaccgggttgttggggttgaccacggcgacgatgccatcgtaggcgatggtggtggcggttaggccggtttcctcttctttcaattcgcgagagctcatgccgatgtccgccgtgccatcctgtgcggccgcaatgccttggctggaaccaggggcctgcatttcaacctgggcctcagtataggtatcgatgaatttttgcatcaatggctctacggaggtggagccaatgaccatcagcttgctgcccgatgcggcgttggcatccgcactgggggaagtggtagcgtcgccgctgccgccgcagccggcaaagaccatcatcgaggccacaacaaggccaagagtagcaaacagtttacgtttcataagaattcctcctaggtgttttgttcttgctttgttgcacacagcatactgtgcgcatgttaattgcgtataaacgaaagattgaggattgttaaagcgtttgttagaactttgttaagtgctgacaaagcggatattgagtcaggaatatggcgaataaacgcaataaaaacaacagttcatttatttgcattgatttcaaattggcgaatgttataataaaatcaatctatacaatgaggtgatagcgatgtcaacaaccccgttgattttggtatgcgacgaccaggccatggtacatgaggcactgggcgtgtatctacaaaatgaaggataccagatggtctccgcctatgacggcgccgaggcgctcaagctggtggaggagaaaaaaccggatcttatcatcttggatctgatgatgccgcagatctctggcattgaggtatgccgcgaggtacgcaaaagcagcaacgtgcccattttgatgctgacggccaaaggggaagagatcgaccgcatcctgggcctggagctgggcgcggacgattatatcgtaaagcccttttccccgcgtgaggtcgtagcgcgcatcaaggcggtgctgcgccgcgtcaacgagagcgccgcggaggataccacccgcgtgctgcgctttgacgggctgaccatcaacctggccaactacgaggtaaagatcaacgataaacaggtgccctttacccccaaggaggtagagatcctctacctgctggcgtcccatcctggccaggtattcgatagggagcagatcctatcccgcgtatggggctatgattattttggcgatacgcgcgcagtggatacgcagatcaagcgcattcgacaaaagtttcccgaagacgccaaaggattcggcatccgtaccatctacggtgtgggatacaaatttgaagtagagcaatgaaaaaggtacggctgctgccgcggctgttgtttttaacgctgttggctgtggtagtcgccagcgtgatgacggctgcgatctattcttcggtggggccgaaaacctttgccaacgagcgcgtcaaggaattgcagctcagcgcggaggtggtctctacctattatgtacaataccaatccggagaaatcaccctgcgggaatttgagcgggcgctgagcatgtccggcgtaattacggacagccagatgcaggtattcaatgccgagggcaagctgattatgcgttcgacggacgataggccgagcagctttgtcctcaaagggcagagcgacaacatcctccagctgatccgcggcggcgtgcaggaggtcatcgagcagggctatcccatcatagaagagcatgtgctcaacgatgagatcggcaaaatctgcaccgtcatcacgccgatctatcatagcgacgacttgatcgccgtggtggcgttgacaatgccggaaagcgagatcagggcttcgttcaatgggctgattccggttttgtttttgagcatgctggtagcgagtatcgtggttatcatcccggtttactttctggcaaggcatatcacaaagcccatccgccagatgcaggatgtggcggtggcgatggcgggcggtgatttttccgtgcgtgccgacgaaatggcgggcggagaaatcggcacgctggccacccagctcaacgttttgagcgagcagctcagcgtgacgatctcggccttgacggtagaacgcaaccgcctgcgccaaacgctcaacggtttggcggagggcatcatggccaccgacgtgcatttgcagatcacccataccaacccggcgctgtatcagctgctggaggtggagagcgattttaacgaatggggcagtctgccgtatgccaccgagctgatgcatgcctatcagcagtgtatgcagaacaaggaagacgtgcagatgagcctgcgtatcggggccaacatcatcggcgtgaccatccacccgctgatcagcgataccgagcgctgcgtaggcgcggtggcgctgttccgcgatattacccaggccgaaaggctggagcagacgcgtaaggattatgtggccaatgtttcgcatgagctgcgcacgcctttgagcgcggtgcgagggctgacggaggcgctgagcgatgggctaatcaaaacggaagaggaccgtgcgcggtattacggctatatcttgcacgaatgcctacgcctatcgcgtttaattgatgacctgctggagctgagccgcctgcaaagcggcacggaggccatggagcctgctaagctcaacgtaacggagctgatcgaggaaatgcccatgcggtacgaaaccttggcagaggataagggcattgagtttaccacagacctgatggaaaattgcccctatacctgggccaatgcggatcgtgtagagcagattttgacaattttgctggacaatgcgttcaaattcaccccgccagagggcagggtttggattgaaacgcaggtgcagaaccgaaagatcctggtgcgcgtgaaaaacagcggcgacggcatccagccggaggatctaccgcatgtttttgaacgtttttacaaagcggacaaagcgcataccggcggcggtacaggcctgggcctttccattgccagcgagattttgcagcgcatgggagaaagcatctcggtatccagtgtgcctgggcagaccacgacgttttcctttacgctgcccgtatatgacgccgagcagcacaaagcggaagaacaagactgaaaaaacccggcagggcgacggctttgccgggtttttgcttgtcatttaacaagagctttgctataattaagaataattcctggaaaattgatcagaataaaaccatactggaaaaccggagggagagtaacatgaaaaaaagcgtcatgaaagctggcctggcggccgtgacagccatgctgctcatcacaggatgcagcggcggaaacggcgccgcgggcaacgcggcaaacccgaccgcaacgcagacgcagcgggcaacgcaggccccgcaagacaccgcgacaaacggcacggagattcccgagcagcgtgccaaggagattgccttggaaaatgccaaggtagcggaaagcgacgttacggccatgcgggtgaagaaggaaatggacgacggcgtatggcggtatgatgtggaattctacgtgcagaataaagagtatgattatgagatcaacgccgcggacggcacgattttgagtgtggactatgatgtggaggatgattttgctggccaggccaacagcgccaaggtatcgcaggagcaggcctccaagatggcactggaccgcgtgcccggcgcctcgcagagcaatttgaccattcattttgaaatggatgacggccgggcgatgtatgaaggtaaaatcgtatacaacgaacgggaatatgagtttgagatcgatgccaacaccggtgaaattgtaggctgggaagaggaatccatctacgattgagcgggaagaaagcggaaagcgtctccgaaaggagacgctttttttggttgccgatatgttacaatgggaaaaaggaggcggttcgcatggtgaaaagccagatacaagcggagatcaatgcagatttggccgcggtatgggcgcttgtaacggacgtttccagggcagattggcggtccgatgtaaagaaaatcgaagtggtgcaggcagggagccagtttatcgaatatgcagaggacggcacggcgacagcctttaccgttacggccaagcatccgtataagcgatatgaatttaccatggaaaacaagcacttatccggccggtggacggggcgctttgcaggaatagacggccggacgcaggtcgtatttacggagtatatcacggtgaaaaaaatttggatgcggccgtttgccaagcggtatctgaaaaaacagcagacacggtatatcgaggatgtgaaacgtgcgcttggcgtgtaacggataaaagggaagggaacgccggatgagaatttcggagattacaacgcggaaaaaacggcatttgccgctgctgctgttggccgacgagcaggagagcatggtggaccagtacctggagaggggccgtgtgtttgtgctggaggaggacggcataaaagcgcaggcagtggtgacggacgaaggcggcggcgtgtacgaactgaaaaacctggcggtaacgccggcccaccagggacaaggctatggacgcgcaatggtggattggctgtgttcgcacctgccgcagctgaacaccctcgtggtaggcacgggagagagcccggctacgcttgggttttacaagcggtgcgggtttcggccctttggccgcagggaaaatttttttatcgaccattacgaccaccccatcgtagacggcggggttgtgctgcgcgatatgatccttttgcgccgagacaacacggagacggcgtgcaatatagaagaatagaagaggagacgtgtaatggcgaaattggggatgatggggctgggccatgtggccatctatgtgaaggatgtggcacggtccaaggcgttttacagcgatgtgctggggtttgaagagttgtggtatgtaaagcatgaaaacaccgggtcgcagctacagtttatgcagcaaaaggggattatcctggagctggtgcaaaagggcggcgggcaaaagcagcgcgacggggtggacggcaccatcaaccacctgtgcatgcaagtgcaggacattgaggcagccaaggcagccctggaggcggcgggtgtcgtatttgaaaccgaaatacagctggaccccgacctgtacgaaaacggagaaaagagcgcgcggttccgcgggccggacggggagatgctgcagatcgagcagattttgtagacagaggagcgcaaaagagcggctttgcctaaaagccgcttttttgttttgccaaaattgggagagactaaacgcagggattaaccattccttaaccaaagctttaacagagcgtaaccaagccgaaaagcgaaatccctataatgggggcatgaaaaaaatgttgaaacaaaagagcaataaaccggtggatgcacgcaccacaggcgagcgcatatttgaagggggcttttttttatgcgcgagcgtgtcgattctggcggtcgccctgattatgatcttcatctttatcaagggtgtgccggcgctgtcgcaaatcggggtgtttaagttcatcttcggtacggtatggaagccaacctctatgcagtttgggctggcgccgatgatcgtaacgtcgctgattacggcggtgatcagcgcggtgatcgggtctatcatcgggattttgacggcctgctatatgacggatctggcgggcaagcgcgggcagcgcatcctgcggccctgcatcgaccttttggcgggcattccgtcggtggtatacgggtttttcgggctggtattgctggtgccgtttatccgctcctccatcggaggcaacggactttcgatgctggcggccatcatcatcctttccattatgattttgccgacagtcatcaccatcacgatggacgcgatcaacgcggtgccgcatgaataccgcgaaggggcgctggcgctgggcgcaacaccgatgcatacgctgttttccgtggtgctgccggccgccaaaaagaccattttggccggcgtggtgctgggtatgggccgcgccattggcgagacgatggcggtgatgctggtatccggcaaccggccgacaatgcccggctctgtactggaccccatccgcacgatgacaagcaacatcgcgctggaaatgagctatgccagcggcctgcaccaggaggcgctgtttgccactggggtgatcctgtttatattcatcatggcgatcaacttggggcttaggatgctgacccggcagaaaaaggagaaggcaggatgaaaaacaagagaaaagcaaaggatctgctgctaaagatcgccatctatttctgcgctgccttggttctgtgcgcgctggtgggcatcatcggctatattttggtggagggcatcccacatttgagctgggatatgtttaccaccgaatataagccgggcatcgggctgtatggcatcaagacgatgatcgtatccaccctgctgctggtggtgacgacgctggtcatcgtaacgcccattggcatctgcgcggcgatttatctaaacgaatacgcaaaaaaggggcggatgctcaatatcatccgctttgccaccgaaagcctggcgggcattccgagcattttgtacgggttgtttgggtatgcgatgttcgtggtgttctttggcctgaaatacagcatattatccggcgcgctgacgctggcagtgatgtgtttgccggtggtggtgcgcaatacggaggaagcgctttccagcgtaccggacagctaccgcgaaggctcgttggcgctgggcgccggcaagctgcgcaccattgtcaaggtggtgctccccaatgcgatgaacgggatattgacctctgtgatcctatccatcgggcgcatcgtgggcgaaacggcagccatcatctatacgatgggctcgtccgtttccatgccggatggcatcatgagcgctgggcgctcgctgtcggtacacctgtactttttggccaaggaaggcatttcctttgactcggcctttgccgtggcggtggtgctggtggtggtggttgccatcatcaaccagctggcgaccctggcggccaagctatttagcaacaaagcaaaaggaggcaaagcatgaatccggtggaaacccccatccttcaggcaaagcacctgaacctatattatggagaaaagcaagcgttaaaggatatcaatatcgatataccgcataacgagattacggcgctgatcggcccttcgggctgcggcaaatcgacctttctgcgcacgctgaaccgcatgaacgacctgatcgagggcgtaaagatagagggagaaattttattcgagggcaaggacgcctaccgtgcatacgatgtggcgcagctgagaaagcgcgtcggcatggtgttccaaaagccaaacccctttcccatgtccatctatgacaatattgcctacggcccgcgcacgcatggcatcaaaaagcgcgcggagctggatgagatcgtggagagaagcttgaagggcgcggccttgtgggacgaggtgcatgacaggctgaaaaccagcgccatgggcctttccggcggccaacagcaaaggctgtgcatcgcccgcctgctggctgtggagccggaggtgctgctgatggatgaacccaccagcgcactggaccccatctccacctcgcgcattgaggatttgatgggcgaactgaaagaaaaatacaccatcgtcatcgtcacgcataacatgcagcaggcgggccgtatttcggataagacggcgtttttcctgcacggagaaatcgtggaatacgatacgacggaccagatcttttccaagcctgcggataagcggacggaagactatattaccggccgtttcggctgatgcgaaaggagcgtaacctaccatgccaccgagagaacgatttgataaggagctgtccggcttaacggcggacctgatggatatggcgtcgatggtaaacggcgtgatccgtaagaccagcgaggcgctggaggaaaacgatatgaagcaggcgcaccgcatccaggaaggcgatgtggtgatcaaccgctttgaacggcatatcgagcagacctgcctgtcgctgatcaagcgggaaagccccattgccagcgatctgaggctgattacagcggcgctgaagatcatcacggacctggaacgcgcggccgaccaatgcgcggacatctgcgaaatcatcgagcgcagcggcacggccccgcatttggagccgtccgagatgttgctaccgatgatgtctttggcagaggatcagtttgcaaatgccctaagcgcctattttgatgaggataaggaacgggcgcaaatggtgatgaagggcgacgagcccgtcaacgcgatgtttaccaagtgcgtcaacggcgtggcaaaggtcatcagcgaccagccgaccgacgccatggcagccgtggacaccatgatgatcgcaaaatacatcgagcgcattggcgaccatgctaccaacattgcggaatgggccatgtatttggccaccggccgccaccccaaggaagcgctgttggatgaaaactgagcaaacgaaaatgtgctgccactttggcggcacatttttttgttaagctatattctatagaaaggagagaggcggatggagacagcgcaaatatgcctggccgtcaacgacaagaggctgacgcaggcggattttatagaatggctgtgcgcaacgctgtgggcgggccccggcaagggatttctgctggcactggcggcctgcctgggcgtggtgctggcgctgtcggtgctgtcggcttgggtggatcttggactatcctgggatcagctgtggccggcggggctgtgcgtactggcagcggcgctgtttgccgcttgtatgccgcgctggatgggcaggctgcgctatcggcagcatctgacgatgacgcagggcgccgcttccaggcgcacggtattttatccgcaatatttggagattgagaccaatggcgtggtacaggggcggtattggtatgcagatgtaaaaaaggtgataaagacaaagcacctgatgcttttgaaatttgccaaccaggtatattgtgctgtacggcgcgacgggttttcccaagggcggagcgaagaagtgctgcgctgcgtggaggcggagcggcgcacaaggccgcgcgcctaggccggcggttgcgcagcgtttgccccgctggtatgatagggacagaaaaagagaggtggtgtgccttgaggcgctgcattgttgtgtctggaattgtcttataaaacattttccaggagggaagaacatgacgattccagaaaccaagctgtatccccgcacgggggataccaataccatttatttgcagcatgcggtgacaagcccccagatcaaagtgggggcgtacacgatgtaccatgagtttgcgtacgaccccaggctgtttgaaacaaacaacgtactgtaccaataccccatcaaccgtgacaggctgatcatcggcaaattctgctcgattgccagcggcgtgcgctttttattcaacagcgccaaccatgcgctggggtcgctgtccacctacccgtttccgctgttttttgagcagtggggcctgcccgctggccaggtgacccaagcgtgggacaacaaaggcgacattgtagtgggcaacgatgtatggatcggctaccaggcggtggtgctgtccggcgtgaagatcggggacggcgccatcatcggcgcccgcgcggtggtaacaaaggatgtgccgccgtacaccatcgtaggcggcgtgccagcagggcccatccgcaagcggtttgacgacgatacgattcgccgattgcaggccgtgcgctggtgggattgggagccagagcgcattaggcgctatatcggcgccctgagagccggccgcctccatgagctggaggaggctctgcgcggtatctaaaatcaacgcccgccaatcggcgggcgctttgcgtttgcaaggaggatcggcagggcggggaaggcgggccccaaaatatcaaagaatggttgcttgtgcaggtttttcacaattttatcttgattttttacgcctgtaggatacaatggttaaaggggaaaaatgctgttttcccgtttgtttctcatttcattttgaaatcttttagaaggagtgtgtatccatgaataaacgtagcattgaagacattcaggatctcaagggcaaacgcgtattgatgcgtgtggatttcaacgtccccatggacaaggagaccggcgaaatcacagacgaaacccgcatcatgggcgcgctgccgtccatcaagtatttgtacgagcatggcgcaaaggttatcctctgctcccacctgggccgcccgaaaggcgaattcaacatgaaattttccttggcgccggtggcaaagcgcctgggcgaattggttgataccaaagtgatcatggccaaggacgttgtgggcgaggacgcgaaaaaatgcgttgctgagatgaaggacggcgagatcgttgtgctggaaaacgtgcgtttccacaacgaagagaccaaaaacgacccggctttctccaaggaattggcgagcctggcggatgtatatgtcaacgatgccttcggtacggcgcaccgtgcccatgcctctacggcgggctgtgcggattacctgccggcctactgcggctacctgattgaaaaggaagtgtccgtgatgggcaaagcgctggaagatccggaacgcccgtttgtggccattttgggcggcgcaaaggtcaaggataagatcggcgtgatcaccaacctgctggaaaaagtggataccctcatcatcggcggcggcatggcgtttaccttcctgaaggccaagggctatggcatcggcgattccttgctggatgaagagaacgtctcctttgccaaggatctgatggacaaagcagaagccaaaggcgtaaagctgctgatcccggtggataccgtagtggccaaagagtttgccgcggatgcggaaaacaaagtggtaccggccaacgagatcccggacggctggcagggcctggatattgggccgaagacccgcgagctgtttggcgaagccatcaaaggtgccaagaccgtggtttggaatgggccgatgggcgtgtttgaatttgaagcgtttgcaaacggcaccaaagcggtggccaaggccatggcggaatccgaagctaccaccatcatcggcggcggcgacagcgcagcggctgtcaaacagctgggctatgcggacaagatgacgcacatctccaccggcggcggcgcatccttggaattcttggaaggcctggagctgccgggcatcgcctgcattcccaacaaataattttatgatacgacgtgcgccgggcaaaccggcgcatgacaatattaaggaggaaacatccaatgcgtaaacccatcattgctggtaactggaaaatgaacatgactccgtccgaagccaagacactgatcgacggcattttgccgctggtgaaggacaacaccacgacggaagtggttgtctgcccgccggccatcaccatcccggctgtgaaagaatacatcaagggcaccaacatccacctgggcgcacagaacatgcactgggaagagaagggcgctttcaccggcgaagtaagcccgctgatgctcaacgagctggaagtggaatatgtgatcctcggccatagcgaacgccgccagtattttgcggaaaccgatgaaacggtcaacaaaaaggtactgagcgcgctggctcacaacctgaagcccatcgtatgcgtcggcgaaacgctggaacagcgcgaagagggcatcacggataagctggtttccgaccagaccatcgcagcgctgcagggcgtgaaggatttctccaccatcgtgatcgcatacgaacccgtttgggccatcggcaccggcaagaccgcaacggcagacgaagcaaaccgcgtttgcggcgtgatccgtgcggcaattgccaaggaattcggcgctgaagtgggcgaaaacatccgcatccagtacggcggcagcatgaacgccggcaacgtagcagacctgatggcgcagcccgaaatcgacggcggcctcatcggcggtgcggcattgaagccggtagacttctccaaactcgtcaacaatcaataatccaagcaatcgaggtaaacaaatggcaaaacccatgactgcattgatcattctggatggtttcggcgtaaacgccgaaaccaagggcaatgcggtggcaacagcgaaaacgccccatttggacgccttatttgccaagtatccccacacccgcctggccgccagcggcctggcggtggggttgcctgaagggcagatgggcaattccgaggtagggcacctgaacatcggcgccggccgcgtggtgtatcaggagctgacccgcattacaaaatccatccaggatggcgacttctttgaaaatcccgcgtttttggacgcgatgcatagtgcaaaggcaaacgacaaggccctgcatttgtttgcgctttgctccgatggcggcgtacacagccacatcaaccattttttggcgctggcagagatggcaaagcgccagggccttgaaaaggtatatctgcactgctttatggatggccgcgatgtagcgccgaccagcggcaagggctatatcgaacaggtgcaggccaagctcaaagagctgggcgtcggcaagattgcgaccatcatcggccgctactatgccatggaccgtgacaaccgctgggagcgcgtgcagcaggcgtacaacgccatggtgctgggcgaaggcgtatacggcgaggacccggcagcgatggtacagaagagctatgatgaggatgtaacggatgaattcatcaagcccatcgttatcacggaaaacggtgcgccggtggctaccattcaggcaggagacagcgtgatttttgccaacttccgtccggaccgtgcacgtgagattacgcgggcgctgctctttgaggattttgacggctttacacgcaaaaacgggtatttcccgctcaagtatgtcagcatgacgcagtatgatgcgacctttgccgacaagctggaggtggcgtttaagccggaaacgctgaaaaacacgttgggcgaatacctggccagctgccataaaacgcagctgcgcattgcggaaacggaaaaatacgcgcatgttacgttctttttcaacggcggcgtagaaaaggaaaacccgggcgaagatagggcgctgatcccgtctcccaaggtggcaacgtatgatcttcagcctgaaatgagcgcgtaccaggtggcggatgaggcggttaaacgcattgaatccgacaagtacgacgtgatgatcctaaactttgccaaccccgatatggtaggccataccggtgtgatggaagcggccgtcaaagcggtggaagctgtggacgagtgcgcgggcaaggtgatcgacgcggtgatcaaaaccggcggctgtgtattgctgacggcggaccatggcaacgcggaaaagatggtggacgaaaagggcggcccgatgacggcgcataccaccagcctggtgccgctgctgctggtagacccgaagcatccggagcgcaagctggcagacgagggcgcgctgtgtgatttggcgcctacgatgctggcattgatggatctgccgcagccggcagaaatgacgggcaagagcctgctcaaataacaaggcataaaaaaggacggtggcagttgtctatcgtcctttttggtttagccgataaaggggaaataaacatggaacagctggcattccgcaaagcgaggccggaggatctggcgcaggtgtttgcgctgtttaccgacgccatacataccatggataaagatggcattccacagtgggatgaggtgtacccggatgagcgcacgttgaaagaggacattgagcatgggcagatgtatctggcggagctggaagagaggcctgcggcggtatttgtgctcaacctggagtatgatccacagtatgccaacggcgtttgggcagagccagacagctttttggtgctccatcggctttgcgtaagcccaagggtgcaaaatcgcggtctgggcaagctgaccgttcaggcggcagaggcgcgcgccgctgcgttgggcgtaaaagcgctgcgattggatgcgtttaagcaaaatccttatgccttgcgtctgtatgaacgcatgggctatcgcattgtaggggatgtagtatttcgcaaagggccgttttttctgatggaaaagcagctgggataagaggataaaaaaagaaaaagccaccggcattgccgttggctttttgcatgggcgggattatttagaagagctcattttcaaacgcagggtagccaggccaagccctccggcagcggaaaccagcagcagagtaaaccagagcccagaggcggaagcatcgcctgtttggggcgaatcggtttgctgtgcgtcggtattcccgtcggccggcgctgcgtccgcgattttctccaggccggcaatggcgttttccagcgctgcggtcatggcgtctaccttatcctgctgcgtttcatccagatcatagacgatggcgttcaaagcggactggacagcggaaaaatccttgtaatcttcaggatttaaggccttggctttggcaacggcggcttccagtttgctataatccgccaatttcaacacatccacggagacagtggccggctgcgccagtgggctgtaattgacggcactatccaacacgttggcggagaacacagcatcttccttgcccaatacaaatacggcgctgtatgcattgccgttttgcgtgacagaggaaccctcttttagggtggcattttgggcagttagggaaatttgttcggcagtgggcagcccctctggcgcatcaaagtcgtttaccagcgtggcggtcacggtgacctcctgcccggctttgccagactgcacatctacggagagagaaagctgtggcacagcctcagtgatggtaacatcggtttcaatatttgtcatgcgttcagggcagacataccagtcgttccaatcaatatcgctttcaggatcacggttttttgaaggcgatatttgtcatctcctccagcacggtatatcgcccagcgttggcggaagcaagcgtgccggtagccgtagcggaaaagtcctcataatctacatcctcagccagggcaaagtacatatccgtaacctcaacagtcttggtgccgttgtaggggcggctggtcgcagtcgccaggtttttctgtcccggcccaggggcggccagagccgcggcgggcaacagggacgcggaaaccaacagcgccagcgccatggcggagaagcggtgcttttgttttgcgttacacatggaaattcccgcctaaaactatacctttttgtatcgccctactttatctgtaaattggattatataaagcgaaaagtgctgtttttcaatgaaaattgcgcgttaaattcccttctaagtatacctcaaaaaggtatactttccaaggcaaataaaatcagccgggcagaccgttttcttggcgctccatattttccacgacaacatcgtagatttcgccgagggaagcgcagtattccaagacctgccaaggctcattggtatggtaatggattttaatcagcgtttcatcgcctacggccaaaaggcagtctcccttgatgtgttgggtgatgtactcgttgatggcatcttcggaaagatctttgccatcgatcaacagctgtgtatcaaatttatattccagcatagctcgcgtcctttctaaagaataacaaaatcattgtacagaaattacgcattgtccgcaatgcggttcggctaaattccccaaaaaagggaggattcgcaagaaaatcggcacatgaaatccagatataatgatgtgtaaatatatatttgctgaaaaaaagggcaatctaagacacgtgacggcagcggatcagggcggagaggaggaaaccctaaagaatcaaagaggattttccttgcaaatctatgctgtgggtgatataatccatctgatacacaagctagtggagggatttcccagtgacaactgtcatcacaattggaaaaatattattatgcatcctttgcgtattcgtcgtattcatcattgcggcgcaaaagccggcggacgataacccgggcgcggcgctgggacaggggaacagcgattcctatgcgaacaagatgagatcccgtacggtagaaggcaagctcaaccggatgacaaagattggcggcattgccgttggcattgtttcctttgctctggtgctgatgcagagcctataatgggcggggccaagtaaagataaaaaacggaaaaggtgctcttcataaaggggcgccttttttttggaggaaatgtggaactttataaccaagcgatagagcgagatattatagcatatttacaagatcagacggcgccggtttcccaggcggagctggaaaaagtgctggcgctgggccgggatgaagcggcagatgggctgacgcgtatggcggatgaagggctgctgatgcagaccaagcggggcaaatgggcgctgccgcagctcttgggctgtgtatgcggccgggtgcagggcacgcgcaagggctttgcgtttttgctgccggaagatggcagcgaggatgtatttttgccgcaggatgcgctgcagggggccatgcatggggaccgcgccctggtacgcacctttgcgccgaccaagcgcggcaagggcttgcagcgggaaggggaggtgctgcgcattttgcagcgcgcccgccaaacgttggtaggcacgttggaaaaagggcactatgcctctttcttaacgccggaggacaggcggctgccggatctattcatcccaaaggggaagacgggcggcgcgcagcatggacagcttgtggtggcaaaaattaccgcctatcagcaggacaaccgcaatgcggagggcgaagtgatagagatcctgggcgaagcgggctcggcagaggcggatctgctgggcattatccgccattatgggctgaaagagacgtttgaaaccaaaacgctgatggaggccaaggaggtgccgcagcaggtcacaagccgggaaagtgcaaagcgggaggattttcgcaatcttttgaccgtgaccatcgacggcgcggatgccagagattttgacgatgccatttcgctggagcgtacggatgcgggctatgcgctgtatgtgcatattgcggatgtaacgcattatgtaaagccgggcagcgcgctggataaagaggcctatgaacggggcacaagcgtatactttccgggggcggtgctgcctatgctgccggaggccctttccaacgggatctgctctttgaaccaaaaagaggatcggctgacgctttcctgcatcatgcaggtggaccaaaacgggtatgtaatgggctaccgctttgtgcgcggggtcatcaatgtggataagcgtgtgacctatgaggacgccaacgccattttggagcggggagacaaagacatagccaaggactatcagaccgtgctgccgcttttggaagagatgcgtgcgctggcggaaaagctgatgcgcaacaagcagcggcggggcagcctggattttgagtttccggagtccgcctttacgctgaacgaagagggccgggcggtggacgtctttgtgcatgagcgcggcattgccaaccggatgatcgaggaatttatgctgttggccaacgaatgcgcggcaaagtttgccggccaatatgagctgccttttttgtatcgtgtacacgaagacccggcagaggaaaagatggcggaattttttgcgatgtgcaaagcgctgggcgtatcgtttcaaaagccgaagcgtaagctaaaaccgagggacctgcaggcgcttttggcacagacggaaaaagagccgtacgcagatgcggtaagccgcgtgatgctgcgcagcctgaaaaaggcacgatactgcgaggaggacctggggcatttcggcctggcgctcaagcattactgccattttacatcgcccatccggcggtatcccgatgtggtggtacaccgcgccatcatcgcaaagctcgagggcgggctgtctgaaaaggcgttggagcagcaggtgcggcagatgccggaatttggccgccataccagcgaatgtgaacgcgttgcgatggaagcggagcgagcggtagatgatctgaaacgggcggaatatatgcaggataagatcggggaggtctatgaaggggttgtatcgtcggttacggcgtttgggctgtttgtagagctgccaaacaccatagaggggctggtccccattgccatgctggaggatgattattacatttatgatgagcagctctatcggctgatcggccgcagcacaggtacggtttacgcgctggggcagcgcgtaacggtgaaggtaacggcggtggatctggcgatgcgccgcgtggaatttgccttggaagaggcggagacggtagcggggaccaaactgcataaacaggcgcaccggacgcgaaaccagaaaaaagcgcagggaaaacggcgtagggggcggcaaaaacggcgccgcaggtagtagcgtaggaatcggaaacctgatatactatacaatacaacaaaagaaagggggcgggcgcgtatgccggcatccacgggaaaaaagatcgccatacagaacagacgggcccgtcacgaatattttgtggaggacagggtagaggccggcctggtattgagcggtacggaggtaaaatccctgcgcaaagggcggggcaacctccaggacagctacatccagatccgagagggcgaggcgtttgtgctggggttccatatttcgccctatgagcagggcaatattttcaaccgcgatcctttgcgggagaaaaagctgctgttgcacaaggcggagatccgaaagctgcaggcgcaggtgatgcgcgacgggtatacgctgattcctctgtccgtctatttttccaaaaacagagcaaagctggaggtgggcgtttgcaagggcaaaaagctgtacgataagcgcgccgccgccaaggccaaggatgacgcccgcgaaatggaacgcgcgttccgcgagcggcagaaataacatgtacatgggggcgtaacggtttcgacggggacgcgtgacgccgggtaagcgagccgcaggcgccggaactgcgataaaagccggcaaaaaaaataaacgcgaacaaaaacgaagtcgcactcgcagcgtaacgctgcgacgtttcgcccaccttgcccaccgggtggggccgaaacgccattaggtggggccctgttagggggaaagctttgaccctttaacagccaacgatgaagctaccaaacccgggaccctttgggcaggggcccgggcaagggaatggaaaatgcccaatgcgctcggagaaagcctggtgggacggttttcggacaggggttcgactcccctcgcctccaccaaataagaaccgtgattttgatacaatgggtatcggggtcacggttcttaatttttatctgttttacgggctttttcagcttttctaacattcgaccaaagataaatccctgactcgatagttcataaggcagagattttggtatttatacggctttcagtctcaaagcgatcgttaaaagatgagtaatcgttatttttgtgtggtaatcgttaaatgatttatttaagtcgcaattagccacaaaaaaacgaaatttgtcaaggaaaagcacttataatgtcgctcaaaaagatgtatcagaaatataaagttcgggtggaatttgtaaaaaagtaacttatatcatatcttgatgaatttgtcaagagtaaaatgcgaattttgcgaagaaaagattgaaaaagagataaatgagtgctataattatttagtatatttcaaaaatcgattcttgacacagggcgaatgtttcaatagcaggaggaaactttatgacacgacacaaaacatccagccgtttgctggccatgcttctatcactgatattggtgatcggcgtactgcccacaatggtgtttgccgacggctatgtggcatatatcggcaatgccgggtacaccactttggaggatgcggtatctaatgctgcaccaggagccaccattttgctgacggcggatgatagcactgagcagcagatcgagatcagtgaaaacctgtccatcgagttggacgggcatagtctgcccagcacggcgtttaagatcactgcgggaacagttactatcggtgaccgcaagggtacgggtatcatcaatggagagcatgcggccggttttgtagcaactgaaaacagtcgctgttccagcagcatttatgttaccggcaccgcaaatgtgactttgaataatttgagggttgagcaatgtgctgaagatgatctggaaaaggcaatctttctgggcgggagcgcatctcttaccattaacggcggcagctataccgggccaaaagacgctggcgtagatgcgattttctattataataacaatacctcttccagtctgactataaatgacggtcattttgaggccaactgcgctctttcggtcaataaaacgcccggaacaggcggcggaactttggtcattcgtaaggctaccttcgtgggtaacggtaccgc

SEQ ID NO: 2097 - DNA, 32576 bp, Unknown
  16S sequences of unknown bacteria
cctgtaaagttagaccaccactaacgtccaaccactaaaagcgttatagcgccaaattccgattctgaaaggagcttctactccctgttgattacagtaattcttttcttgaaagatttattctgtcctgactgtcgatttcggtaacctttaccttcactatgtctccgatattcataacatcttcgaccttttcgactctttcttttgccatcttggagatatgaagcagaccttccttgcccggaagtatctcgatgaatgctccgaagttcataattcttacaaccttgccttcgtatacttcaccgacttccacatcctttgtaagaagctcgatttctctcatacctgcatttgcgctttccatatcaggtgccgcaatgtagataagacctgtatcatcaatatcaatcttaacgcctgtgtcagcgataatcctgttgatagtcttgcctcccggtccgatgactgttctgattttgtcagggtcaatctgcattgatataattctcggtgcatatggtgaaagttcaggcttaggtgcaggaataacctcaagcatcttgttcataatgaacattctgccttcctttgcctgtgccagcgccttttcgagaacttctcttgaaagaccgtgaaccttgatatccatctggattgctgttacgccgtctgccgtacccgcaaccttaaagtccatatctccaaggaagtcttccataccctgtatgtctgagagtatagccatttttgagctgccgtcctcttcaactctctcgataagtcccatagcgatacctgcaaccggcttcttgataggaacgcctgcatccataagcgcaaggcacgagccgcaggttgaacccattgaagttgagccgtttgatgaaagaacctcggatacgactctgattgcataagggaattcttcctctgtaggaagtacgggaactatagctctttcagccagtgctccgtgccctatttctcttctgcccggactcttcattcttcctgcttcacctactgaataaggcgggaagttgtagtggtgcatatatcttttttcttcttcttcggtaattccgtcgatagtctgagcttcacccagtgctcccagagtaactactgaaagcacctgagtctgtcctcttgtaaacagacctgtaccgtgagttctcggcagaattcctgtttcacaccagataggtctgatttctgtatgttttctgttatcaggtctgatttcatcatcaagaataaggcttcttacctgttcctttgtgatgttgtaaagaacgtttgcgatatccttttcgttttcaggatatgtttcagcaaagtattctttggtttcaacctctacagcatccatattttcaagtctttccattttgtcataggtctgtattgcagttctcatcttgccttctgcatattctcttacagcctgatcgatttcttcaggaaccttgtacagatttacagccattttaggcttacctatctctgcgattatttcatctatgaatactattatttttttgatttcctcgtgagcaaacattatagcgtcaagaactacatcttcaggtacttcctgcgcgcctgcctcaaccatcattattgcttcttttgttccggaaacaacaaggtgcagagtgcttgcctgtctctgtgcaagtgtagggtttactacaaattcaccgtctaccattccgatgagaactgatgctgtaggtccctcccaaggaatatcggaaattgcaagcgcaaccgatgatcctatcatggcaactatctcaggtgagcagtcagggtcaacgctcattactgttgcaacaacctgtacatcattgaaaaatcctttagggaaaaggggtcttaaaggtctgtccataagtcttgagttaagaactgctctttcactcggtctgccctctcttttgataaatcctcccggaatttttcctgctgcgtacattttttcttcatagtcacagcttaacgggaaaaagtcgatatcaggtcttggttcttttgaagcgcacgctgtaacatttacaactgtatctccgtatcttaccataacctgtccgtttgcaagttcacatactttgccgatttccatctgcagcagtcttccgccaactgcagtcttgaaagttctgtatgtctgatttcttaataattgttctgccataattaacaactacctcctgttaatttctttttacctcttctggcatctgatttctaaaattagcatattgcagccatatatagctgcttgaattctcttctctttttaatgagaatataaaacaaaaacggggaataacagtcccccgcttaaattttctctaattactttcttaatcctaaacgagcaataagagttctgtatctttcaagatctttttccttgagatagttaagaaggtttcttctctgacctaccatctttaacagacctcttcttgagtgatggtcctttttgtgaacctttaagtgttcgtttaaatcgttgattctgtaagttaatactgcaatctgaacttcaggggaaccagtgtcgccttcttttgttgcgtattctttcataatctgtgatttcatttctttagtaatcataataattctccttttctttattcgccttcaactgagtttccgtcggagttctcaaaaaactaagccgaggtatatttcaacaattcatgatagcacatttcagcgattttgtccagtattaatatttattttaccggtatttatttccatcgcttttttatttctaacgtctagtcctctattttatgatacgcctttgctttttcgcagtctttctttatctgaccgctgagctcctcaacgcttttgaacttcctctcatctctggttttcttgatgaactgcaccagtatttccttgccgtagagctctttgttgaaattgaatatatgggtttccacattctttttgtattcgcctattgtcggctttacccccacgtttgtaacagacgggtatttaactccgttatagacgcagtacgttatatatacgccgtttggaggtgttaccatactctcgtctataacaagatttgatgtaggaaagcctatggttctgcccagcttgttgcctaccacaacctcaccgcttatttcgtaatactcacccatatacttgcggcatttatccacctgtcctgtttctatgaggctgcgtataaatgtactgcttaccagattgccgcctatttcaaacggctccatcatattaagctcaaagcctttttctctgcctatttttctaagcaggtctgggtttccctcagccttggcaccaaagctgtagttaaagccgcagaaggcatatttcatacggaatttatctaccagcagctcctctataaattcttcgggcttcatattgcagatatcccatgtaaactctatattaaaaagataatctacgccgaggctttcgattattctttctttctctccgttgtagagaatgtttttaactacagtgcgccctgccagcaggtttctggggtgatttgaaaatgtaaacaccgcgctttttagtcccagctcctgcgcttttttgactgcgcttgttatgaggtatctgtgacccttgtgcactccgtcgaagttgcccagcgcaactactgtaggacttattcctttgatttcttccaaactgttgaatattttcatttactgctacctctgaaatattttatccggaaccagcatctttttttcttcatcatagtatgcggtccctaaaaaatttctgttttctttttcatatatattatacatcctgcgatagatatctttaacaggtatatgaaatttttcctccggattttcaaattccgggcgtttctcgatatccactctgcgcagttcaagccagccgccgtttacaaaccatttggcaccatgtctgtctaccataccctgtccgaaatgaacaagtgggtagtctgccggatacagcagcttctctatatcttcaactgacgcagttctcaggctctcaaggtcaattgcatcttccaccgaaaaaacgccgcttgcaagtctttcaagagcgcacattgcagctccgcagccgagattaagaccgacatctttgcatatcgatctgatatatgtgcccttggagcacacaaccgtaaaggttatttctcctgcatcaagatttatttcctcgatttcaagctcatctatatatacatctctcggtttgatttcaacctcttcgcctgctcttgcatagtcataaagtttacggcctgcaaccttgatagctgagtatttaggcggtatctgacttatattccccttaaattcctcaaaggccttgtgaatatcatgctcagtaacctgatcaaaactgctttcttttaatacttctccccatatatcaagagtgtctgtttcaatgcccagccttaggctgcatctgtatttcttaaaatcaaggtccagatattccataattcttgtggcaggtccaaagcacaccggaagcactcccgtagccatagggtccagcgtccccgtatgccctatgcgcttctgtcctgtaattcgcctcagcagcttgactgcatcgtggcttgtccagtctgcgggcttgtttatatttaaaattccgtcttttatcatatattatatcctcattactgctgtcttatctattatactagccgccccctgctaaatcaatacttatacatatctttgcaggacttgcagaaattaaagcaactttaacctgttgcatttgtgtatattataagttatactatatatacttaaagtatatatagtgattcaaaaggaggtaacacatatgtcaaatcaggatttaaacaaagagatcgttagctttatgcaggagatgcgtacaaacttttcggaagtaaaggctgagctcggtgagataaaaaccgatgttgccggactcaagaccgatgttgcagggcttaagactgacgtagccggacttaaaaatgatgtaacagttctaaaagctgatgtagctgaacttaaaaatgacattgcagttctaaaagtcgatgtttccgaactcaaagaagatgtggctgaactcaagggcaaggttgacaagcttgaagctgacgttgccggcaacaagaaagatatcgcaagtctttacgtgcttaacgaaaaactcagcgactcccttgaagagttcaaggcctatacctatcagcagtttgaatatgtcagacacgacatacaccttcttacggtttcacacaatcagctggcagacaaggtaagactcaacacagaagctattgatgatatgcttatcgatatgcagcttatgcgctccgaacacgaaagcatcaaataccagattaaaaaaactcagcgtgaagcctcaagcagaattgccgatgtatcacacttcgcatattcgcttgatgaaaaaatatcaatacttgccgatgaaatcaagccggacaagcactgatacatactttaaaatcctgtttacaaaccgcctctgtgccctgctgccggaggcggttttgttaagcctccatctgtttacaaatatctgccgctatgttaaaatttatatgatttaacacgaatggagataataatgcttattattctaaagaaaaattcaactccggaacagacagcagatctaatatctctgcttgccggtaaaaatatatctgcaaagcagaccgataatatccttattctaagcggtgacacatgggctgcggacacaagtataatcagctcttttgacatagttgagaaagtacagagaataagcagtccctacagactcgcagacagaagcgcgcacccggaagataccgtcttttcagtcggcggtgtttctatcggaggcggcagctttacggtaattgcaggtccctgcactatagagtccgaaaaaatgctttcggatattgcaaatgaggttatacgaagcggcgcgcacatattaagaggcggcatattcaagccacgttcatcgccttattcatttcagggactgggcgaagaagcagcgcgctaccttataaacgagaagaaaaaacacaacgtgcctgtcataacagagattatggacccgcgccagcttccgcttcttgcagaggctgacatactgcaggtaggctcccgcaatatgcagaactttgagcttctcaaagagcttggaggctcaggcaaacctgttatgctcaaaagaggctactctgcaacacttacagacctgcttatgagcgcagaatacattatgtcttgcggcaactcccgcataatactttgtgagcgcggaatccgcacctttgaaacggcatcaaggaacactctggatatttcggcagtaccgcttctaaaagaaatgacacatctgccggtattcatcgacccaagccacgctacaggcaaaagaagccttgtgacacctatgagccttgcagcagcagcggcaggcgcagacggcattatggttgaggttcacacaaatcctcaggaggccctgtgcgacggacctcaggctctgacacctgcggattttaaaaatcttatgaaatcacttgagaatatattaccttacagatacagatactaaaggcagggaggaattaatatgtacggacttatcggcagcccgctgggccacagctattctcatcatatacacgaaatgttcggcctgtatgagttttcccttatgcctatgaacgaacgggaattcaaaaaattcatcagaaaaagagatttcagcggcctgtgcattacaataccctacaaacaaaaggttatgaaatactgtgacgttatatctcctgccgcagaggaaataggcgctgtaaacacgctgtattttaatggcgacaagctatgcggcaccaatacagactattacggtttcagatatatggcctcaaaagccggcatatcatttgcaggaaaaactgtacttgtaatgggaagcggcggcacctgcagaactgcggcaacctatgcaagacacagcggtgcaggcagaatagtgatagcatcaagaagcatcaaaaatgcagtgacggcgacaaaggagcttacttctaagcttaacccctgcgaaatagaaaacttcacaggctttcaggctgtaacctatgacagcataccatttgaggaaatagatataatcgtaaacaccacaccggtcggaatgtatcccgataacgacagcagccttattgatcttgataaattcccaaagctttcaggagttctcgatgtaatatataaccctgcgcagacaaagcttgtaacagctgcaattaaaaaagcgtttccggcatcgggcggttttcctatgcttatagctcaggctgcacttggcgcgggatttatgctgggcggaagcgatgcacagcaggcacagcagattttcacaggcagacttgcggcggagggcgaaaacttcaatgaccttgtagaccgtttttacagcaaggctctgactgacactgtaaacatagttctcgtaggaatgccgggctgcggcaaatcagttatgggcgaggagcttggaaagctgacaggcaaaacagttatagatgtaaataatgttatagagggtatggatgaaatgtccgtatccgatattcttgaaactaaaggtgaagaatattttgtttcccgtgaaacagagataatagaaaatgcgggaaaacaaaagggaaagattatagttgcagacagcaccgtcgtattaaatccaaacaacttcaatctgctgaagcaaaatggcataatagtttatctgcgaaaaccgactatagatcttgaaaagaacggacagttgctttccgaaaaatacaatctcgaagccctgagagcaatggcaagacagagaaagccttattacagacagtggtcagacatcaaatgcgctttcaatatagaccctcaaagactgttaaatgaaataaccgaatatattaaagagaagccgttatagcttctctttttacattaatttacatatgttaacctaaggatttaagcaactctataagtctttcaagctcatctcttgaatagtactctatctcgattttgcctttcctgcctgtactgctgagagtaacctttgttcccagggtatccttaagctctgcttcaaggcgcattacatctgcattcttttcaggcttaacctttgacttctttttagcaggctctcctgccagcttctctatgttgcgtacagaaaggccttcctttactgcctttaatgccagtttcttctgcttctctatatccttgataccggccagcgctcttgcatgtcctgcagtaagcttgccctctcttgtcatctcacgaacatcatctgaaagcttgagaagtcttagagagtttgtaatatacggtctgctcttgcctactccctttgaaacctgctcctgagtaagtccgtagacctctatcattctgcttagtccctcagcttcttcgatagggttaaggtcctctctctgcatattctcaattatagcgacaagcatattctgctcatctgtaagctccctgataacgcaaggaatttttttaattcctgcttttcttgcagcgcgccatctgcgctcacctgcaacaatttcataaccgccgtctgtactgcgcagaaccacaggctgtattataccgtgctctctgattgatgatgcaagctcttcaagcttatcctcatcaaaggttttgcggggctgatgtacattaggcttaatatcattaatatccacatacagcacgccgctttcggcttctgttttatctgtttttttatccttctttacagtttctttttcttcagggatttcaacagatatttcttcaaacagagcctcaagtcctctgcccagaccctttttctttgatgctgccatattattcttcctcctcaagagctaaaaattcctctgcgaattcagtatatgccgccgcgcctgtggatctgggatcatattcggttataggcattccgtagcttggagcttcggcgagtctgatatttcttggaattactgtcgcatataccttgtccttaaagtattttttaacttcctgaacaacctgtattgaaaggtttgttctgccgtcaaacatactgagtattacaccctgtattttaagatcagggttcatattctttttaacaagctctatagtgctcataagctggcttacaccctcaagcgcatagaactcgcactgaattggtatcagcacgctgtctactgctgtaagtgagttgattgtaagcagtcccagtgaaggaggacagtctataaatatatagtcatagttgtctttgattttgtctattgcttttttaagacgcttttctctgcccttctgtgctacaagctctacctctgcgcctgccagctcaacgcttgcaggtattatatccataccctttactctggtattgattataaagtctcttgggtcaacatcgctttctatcagaatgtcataagtgcttccctgaagtgttttctttgaaattccgataccgctggtcgtgtttccctgaggatctatgtcaagaataagtacttttttccctttaagtgccagacatgcggcaagattgatattcgtagttgtcttacctacaccgcccttctgattaaatattgctatcgctttacccaaaattgagcctcctttttttcgttgttaattcattatacactaatacatatttttttactactcattttatatatttatttaatttaaaaagagaaaagatttcaacagaatcttttccctctgtaacatttgtttcacgtgaaacattttatttattacacgaaagtttcacgtgaaacattcttactgtatcagctgcccactctctgcagagcatgcttttctttctttggaataagtatttttacttcgacaaaatcgtctttctcctcctgcatcagctgcgcgtccttttctatttctgaaatctgggtaaacagcttccttattgaatttacatatattttatagttcatacagctctttctgtttcttttattcctgccggcttctctttttttaagcgcctcatccacaagcctttcactctgccttacattcagattatatgtaattattcttttgagtacctgtctctgaagctctgcatcctgtattttaagcagagccctcgcatgtctttctgtcagcttgttttcaagcagtgccttctgtatgtcggcaggcagactcagtatccttattttattcgatatggttgactgggttttacccactctctgcgcaatctctccctgtgacagattgtactcatctatgaggttgcggtatgcgtaagcttcttctatatagctcaggttttctctctgtatgttttcaacaagagcaataaatgcggcgtccttttcgtctgcatttttaattactgcaggtattttttcaagacctgcaaggcttgccgctctaaatcttctttctcctgctattattccgtatgtaccgtctctgttcttttttaatattataggctgcagcacaccgtattcctgtattgaatttttaagctccagaagatcctcttcctcaaagatttttctgggctgacccggatttgcttttattaaacttatggaaacatcgcttacttttcttgtaatcatattatccccctgacttttcttcagtatatcttttattagatattatcatactgtaagggaaataaaatatttttcgtacaacaaaagaaccctattttcgctatttaatagggtttttcgatggcgttcccgcttttctcggatattgcgccggcgtgttttttattttttcaataaatattatattatgattaaattcagtatcagcgctgcctatgctttcaatccttgaggttttgcctcccacagtcctgattgctttcttggcgcctgccagttcctcctcatagttaggtcccttgtaggaaaggaagtatcctccctctctgacaagaggcaggcaaagctctgaaagtactgacagatctgcaaccgctcttgatatacatatatcaaactgctctctgtattccttgtttttccctgcatcttctgccctggaatgaagcactctgacattgtttatacctgcgctgtgacatatttcacttactattttgagtcttttgttgagagagtcaaggagtacaaattccttttccggaaacagtattgcaaggggaactcccggaaatcccgcgccggttcccacatctattatcatctctcccgcctgaaattcatcgttaagcgcgcccagaattgagtccacatagtgctttttaatgaattcatctctgtctgtaatagacgtgagatttatatgctcgttatattcaagtatctgctccatatattcagcatactgacttatctgtttgtctgtaagctcaatattatattctttcagaattttaattagaagctccattgtttctccttctgtgtttttcaagatatattaaaagtacatttatatcagccggtgatacgcctgaaattctcgatgcctgtcctattgaaagaggtctgaatttctccaacttttcctttgcttcaattctaagcccctctatctgtgagtaatcaatattctcgcttaatttcttatcctcaagtcttttgaatttttcaatctgctgaagctgcttcctgatatagccctcatatttaatctgcacttccagatgatccactatatgctgcgcaagctcaggtcttgaattgtccactgctgcaagtcccgcataggaaacctgcggtcttttgagaagctccatcagactgatgcttccctctactttggtagtaccccactgctccagaagcggatttatctctgcaggagtaactttggtgttttttaatctttctctttcttcttcaactgattgctttttacttataactttatcaaatcgttcctgtgttgccaatcctatcctgtaagagcgctctgtcagtcttaaatctgcattgtcctgcctcagaagcagcctatattccgctctgctggtcataattctgtaaggctccatagtacctttagtcactaaatcgtcgattagaacgccaatataagcctcggatctgtcaagtataaacggttctttaccatttattaacagtgatgcattaattcctgccatcagtccctgagccgcagcctcctcatatccggagctgccgttgaactgtccggcgcaaaaaagattttttatatgcctgttttcaagatttaattttatatccaaaggatctatgcagtcatattctatagcatatgccggtcttgctatttctaaattttcaagtcccggaattgttctgtaaaaatcatactgcacatcttcgggaagtgacgatgacattccctgtatatacatttcctctgtatcaagtccctccggctctataaagagctggtgtctttccttgtccttaaatctgtttaccttatcctctattgacggacagtatctcggacctatgccctctatctgtcctccaaacagagccgaccttgaaaagtttgctctgattatatcatgggtttgtttgttggtatatgtaagccagcatgaaatctgatccttgtctatattatcattcataaatgagaaaggctgaattttttcatcacctttctgctctgccatctttgaatagtcaaggctttttgcaagagctcttgcaggagtacctgttttaaatcttctcattggaagccccagggctcttaaattttccgcaagctcaactgacggcgcaagtccgttgggaccgcttgaataaactgcggaacctataaagattttgccggcaagaaatgttcctgttgccagaattaccgcctttgccctgtacagtatatttgttcttgttaaaacaccgcatactctgccctcctcaacctcaaggcttacaacctctgcctgcttgagttccagattttcctgagcctcaagagtttttttcatttcctgatggtacttgtgcttgtctgcctgcgctctgagagaatataccgcctgtccctttgcagtatttagcatcttgctctgtataaatgttttatctatgtttttgcccatttctccgccaagggcatctatttctctgacaagatgacccttgcctgtgccgcctatggacggattgcacgccatcattgcaactgcctcaagatttatcgacagtaccagcgttctgttgcccattcttgctgctgcaagtccggcctcacagcctgcgtggcctgctcccacaacaattatatcgtattctcccataaagattttttccattatagtaagctcctatttaccaagacaaaatcttgcaaaaacttcatttatgatgtcgtctgcaactgtctctcctattatttctccaagaagctcatagcttctgttaatatcaacttcaataaattccagcggctgcatcatatccgtcatttcaagagcatcagctacagcagagtctgcctgcctcaaaagctcctcgtgtctgacatttgtaaccataaggctgtcctgctgctttgcctgtccgccgtataccatattttcaatggcttcttctatttctgtaattccctcacctttaagcacagatgtatgtattatctgagcctgaggtattttttcctttatttcttcttcgtctgcaactgtacccttgtctgttttgtttataagggttatgcagggacggttatcaacgtattccatcagagtcttgtcttcctctgatattttttctgaaccgtctattataaatattacaaggtccgccctgttaaaggactccttgcttttttctattcctattttttcgatggtgtcttctgtttctcttattcccgcagtatctgtcagaagtaccggaattcctctgatgctcatctgctcctgtattgtatctctggtagttcccggtatttcggtaactatcgctcttgtttctttgagcagcgcattcataagagatgacttgcctacattcggcctgcctattatggctacgttaagcccctccttaattattttgcctctgtctgcagtgctgattattttttccagagaagctttgactgccattaaatcatcttttaacttgctgtaggtaagctgctctatatcctcatcgggataatctatgtttaccgtaacatttacaagaatatcaacaagattttttcttatgcttttgatttcatcggaaaagcttccgtcaagctgtttcagcgcaacatcaaagcttttgtctgttctggccctgattaaatctattaccgcctccgcctgtgacagatcaagcctgccgtttaaaaatgcgcgctttgtaaattcaccgggctctgcaattctcgcgccctttgcaagcaccagcgcaagagtttttcttaatgatactatgctgccgtgacagtttatctcaaccacatcttctctggtgtaggtatgaggagctttcatatatactgccattacctcgtctattatttcttctttatctctgatatggccgtatgtaagttttctttcttttattttgttttctttaaaaggaacaaatacctgatttaaaatatcaagcgcgttttcaccgcttattcttattattcctattccgccctcaccgtaggctgttgcaatagcagcaatagtttcttccattttgaatttctcccgaaaaaagattaaagcccgcaaatatgcgggccatttttaacgtttaagttcaattataacccttctgtacggctcttcgccttcacttctggtaattatacccgggttactctgaagagttgcatgaataacctttctctcatacggattcataggttcaagtctgacactcttccttgtctttataaccttgtcagccagtctgtttgcaagctgctctaaagttttttctctctttgccctgtagttttctgcatcaactataacgcgaatatatttttctttatttttgtttactacaagacttgtgagatactgtattgaatctaaagtctgtcctcttttacctataatggttcctgaatcattaccggttatatcaagataaagactgtcatcgttaccctgagcttttatgtccagttttaaattcatctgctctgccacgtttctaaggaaagtcagagcttcacaatcttcgatgtccactaaattatcaggtctctgtgttacttcgaatttttcttttataacaggttttttaacctcttttacagcttcctgtttaacttcttttttgatttctttttttgtttcttcttttttaaccggttcagctttctttttaggttcaactcttacctttgcaagctttgagcctattccaaagaatccccttgacggttcttctaatactgtgacatcgacttcatctatagtaagtttcagatctgccaaagccagtttcacagcttcgtcaatatctgttccccatttttctgaaaagtccatattaatttttcctccggtaaaatagtaacgtactattttcttttctttttattttctttgtctgctcttatcttttttctgatggagtttaaacgcagattaatgaaaatctggattatctggcttacgaaccagtaaattgataagcctgcaggatatgttcttgccatccatacaatcattacagggaatatgtatttcatacccttcatcattgcatttgtctgagcggcagctcctcctgcggcgtttcctcccgtaagagcctgagtcattgtaaatgatataaatgttgccacacctgcagcaagcggaagtatccatttatccggctgggtaaggtcggtcatccataaaaacgcatcgtgtaccgcaaatagaatgtcattatcggtacccataaatttcagcggatctctgagcagcgcaaacagtcccatgattatagggaactggataagcataggaaggcagcctgccatagggttaaacttttcttccttgtagagctcctgcatcttcagattcatcatctgctgatcattctgatattttttctggatttctcttaccttcggctgtatatctgtcattgatgccgtgctctttgtctgcatcgcatagagcggataaaggcagcacttaactattactgtaagtattataatagcaacaccatatactccgacaaaattgtaaattaattgtaatagtgcacctatcggttttgcaattactcccattaaattcctccattattttaaagggtcatagcctccggaactaaaagggtgacatttgagaattcttttagttccgagaaagcttcctttaaaaaatccgtatttctccagcgcctgaataaaatacaccgaacatgtcggataaaatctgcatctggcagaaaataaaggcgatataaatttctgatatccccttattaaaaaaatcaaaactcttttcatttttttataattccggatcttctggcggcagacttcattgattttaatacttcctgacatttcctgccgttaatagtgtttctggctataaatataatgtcatatcccgtattaaaagtatctcttatctgtctgcagctttctctcattaatctggctgctctgtttcttgctacgctgtttccgacctttttgcttgccagaaatgcagttctgttgtaaggaagaccattctttttataaaatagcacaatatatctgtcaccaacagatctgccttttttgtaaacgctattaaaattcttagctcctcttaaaacatctttttttagcatcaaacaaacgccctttaaataaatactgtttaaagttttattatgctgataaaacttttcttcctcttgctcttcttctcttaagtacgtttctaccgttcttagtcttcattctttttctgaatccgtgttccttttttctctgtctttttttaggctgataagtctgtttcattgttattttcctcctgaattgaaaatttaattttatgccatctaaattccaaaggcatagatacgcctatatattatatattcaaagactgccgatgtcaacgtatttgttcataatttactttttatattacttcaaaccccttgagatttaaatgttgataatgttcacaactttttccacaacctgtgtataaatacccctaaataagtttttttgctttattaaaaaaagcaattgtctgtggataacttttttgatattatatatacagtaattttggagatgtgaaaatggataaaaagaaacaactggaaaaatggaacaaaacacttgaaaaaatcaaagcggatttaacacctatcagctatgacacctggtttaagcctctgatttttaattccgtagacgaaacaaacaaaataatatactttgaagtttttaacgcgcttcttgtaaaggtaataaacgaaagatatcttaagcttcttgaaaccaacatacaggaagtattcggcgaacctctcaaggtttcctttaatatacctacagatacacctaaaccaaaaaaagaaaacaaagaatatacagaggaattctatttcaatccgaggtatacatttgatacatttgttgttggagatcacaacaaatatgctcatgctgcggcagttgcagttgccgagtcaccgtcaaaggcctacaaccccctctttatatacggaggctcaggtcttggcaagacacatcttatgcacgccataggctgctacataatgcagcatcaccctgatctcaaggttctttatgtttcctcggaaatgtttacaaacgaacttatagatgctatcagagataccaagaacaataaaaagaaaacaaaagaatttaaagagaaatacagaaatcaggatgtgcttctcatagacgacatacagtttatagaaggtaaggactcaacagaaatagagcttttccatacattcaacgctctttacgaaaacaacagacagataataatatcaagtgacagagccccaaacaagcttgtaaatcttgatgaaagactgcgttcccgttttgaatggaacatcatagcggacatacaggctcccgactatgaaacaagagttgcaatacttcagcgaaaagcagagcttgaaggcatcaggctcaacgatgatgttcaggaggtaataagcctgattgccgaaaaaatcaagttcaacgtcagagagcttgagggagctttgaacagaataataagcttttcaacattaatgggcgaggacataaacataaaatttgcaaaagatacactaaaggatatactttcaaatacagattcgggaattacacctgaccttatcaaaaagaaggtatgcaaaaaattcaatctaaagcttgccgatatggaaagctcaaagcgcgtaagagccatagctttcccaagacagatagcaatgtacctctgcagagagatgacagagctttcatttcctaagataggagaatacttcggaggcagagatcatacaacagttcttcatgcctacgaaaaaataagggatgaaattaaattcaatgatgaaaccaagcagattgtcaatgagcttgtcactgtaatcaacgaagaatagttttccacacacaaaaatacataaaaaaacatcttattaacagaaattcaataataatttctgttgaatttacagggcttttgagtacttatccacaaatccacagcccctactactattactactaatatatattaataaaaataatagaattttggaggaaaaaaatgaaattcacttgcagccagcagaaactgtcaaaagcattaaatatcgtttcaaaagcggtaagcacaagaacaacaatacctgttttaaaaggtatacttttgaaatccgaagaaaacagcctgatactttcagcatctgaccttgatttaagcatcgaaaaggccatagatgtaaatgtcatagaggaaggctcggttgtaatacctgcaaagctgtttggagatatagtaagaaagcttccaaatgaagaaatattaatagaggaagaagaaaataatgtcataatgataaaaacctcaaaatcagaattcaaaattataggattttcatcagaggaatttcctaatctcagcgacgaagaagaaaacataaatgagctttcatttgacagagaaatattcaagagtatgatatcaagaacatcatttgccgcaaccattgatgaatcaaagggagtgcttacaggtgttttaatagaaatagaagaaaactatatcaacatggttgctcttgacggattcagaatggctgtaaccagagaacttatgaaaaacgctgaaaacaacaatatcataatttccgcaaaaatattaaatgaaataaataagataatatctgaatcagacggagaagaggatattaaaatatcactgggacagaaaaaagcattcattaaggttgatacaacacatataatactcaggctgcttgagggtgaattcattaaatacagagatatacttcctaagagctgcagcactactgttactatcagcagaggcgagctgattgaaagtatcgaaagagcatcacttcttgcaaaggaaggtaaaaacaatcttatcagaataaatatcaaaaacaacctgcttactcttacttcaaaatcggaagaaggtaatgtcaaggaagaaataataatggaaaaaacaggtgaagatcttgaaataggcttcaattcaaaatatatgctggacgctctcaaggttatagatgatgagtatgtaaaaatagagcttaataccagcataacgccggctctggtaaagcctattgagggaaatctatatgagtacctgatactgcctgtaagaatttcatcgaactaggtaaaaaaattttactgatttaaaatcttgtttttgtcaagtgaaatgcttcaaacgtttaaatatcaacggattaaaaaaattacagaaaaaaataaaaaaggagttaactgtaaaaataaggtgtagtaaaatggtagcatagaaaatttgtaaagatgcacagataagccgtttaggctgaattaagtttcagcttaagcggttttttattgtgcgtttttcgatttatgaaaacaaaaataaaaggagaaaaaacaatgacagaagagaaacaacagaatgaaagagcacaaaacaaggaagattttaaaccttttacaaatgattttatatttgctctggtaatgagagatcctgatatctgtaaaggaattgcagagctcataattcctgatgaggagataggcgaggtaaaaatagcagcgtcagagaattcttcgcctgatgaaaaaaaagaaaaagatgagctggagatagcgctgcaggcatatcttgatttcggaaaagatatgcgaggagtcaggtttgacgcatatgtgaaaactgcagacaaatggattgacattgaaatgcagacaaccaataagcatgatcttgaaaaaagaaacagatattatcaggctctcatggataccgactgccttgaaaaaggtggcagattcaaagatcttaaaaatacctatgtgatattcatttgcacattcgactatctggggcttggcgagcccatgtatgtcgtagaaagctatattcgcaagaatgacttgcattttaatggtgggacaagtaaaatactgttgaacaaactgaggtcattttatgaatatataaatgacccgaccaaggtaggaagcgaactgattgaaggtattgatgagcgtgtacagaaatacaacacgcctgaatggagggaaagactggtgacattggaatatatgattgctgaagcaaaagaggaaggtattgcagagggcgaggcttctggcagagctgcagaaaagattgagatggctagggccatgaagaacgataaagaacctatagataaaattattaaatacacaggtttatctaaagaggaaatagaaaaaatataataggtttataaaaatttttaattaagaagctcttttcggggcttttttttaaattccctcatactttggaacgatttacattacttaagcacctgattataatatattagaatgcaataaagagataaaaggaggctattgtgcctgaacacactataattaaacctgtaatagcagataagtttaataaattcataaaaaacggaagaatattttttttaagcgcgccttgcggctttggcaaaacagtattagctgatgcattactgcaaggaaaaaagatacttcgccttaatgcagatacagcagatttttcatctgtttctgcaaaaaagaaatgggatattttacttattgatgatttacagcttatgcaggatgagtctgacggacagcttctgtgcgaacttatacgttcagagccggaacgtcgttttgtactgctttcacgaggagtaccgccgggatatctgacggctttcagatacacaggacttatgactgtgctgcaggcagaagatttgctgtttgactttgatgatattcagaagctgcttgaaacatacaatgttaaggcgacagacagtgaaatacgcagtattttaaaggaatcaataggatatcctcttggcgtaatgattactgcaagacttatggcaggcggaagacctttcactatggaaattgcagctcaggcttttcaggaagtatatacatattttgaggaagcagtatttcttcgttttgatttacctatgcgcagatttttactggagctttcaccttttgagagctttgatcttgaaatggcaagaatggtaacaggcgatccgcatgcagggaagttacttgactggctgcttcgcaaaacaacaatgcttctatatgatgatgtgcagcgttttcgtttctggcctcagttcagaagctttcttatatggaaagttgaacaggaatatacagaagaaaaacgcagagcgctttttggccgcggcggtctgtattatgagcttaaagaagattatgctcatgctcttgactgttataccaagggcaatgatcattccaaagtttctgaacttctggtgcgtaatgcggagcttcacccgggaatgggtcattacagcgaaatggaaaaatattatcgaagtctgcctgaagaagaaatattagcttcaccttcgctgatgcagggaatgagcatgctttgcgctttagccatggactatgccggctcggaaaaatggtatcaggagcttcaggaatttttaaatcgctgcaggaggcaagacgccgcaggcaaacaggcaagaggcaaaattgcatggcttgatatttcgcttccgcagcgaggcgtagacaatctgacaaatataattccggcagtatttcatatgcttacaaacaaagaaattatacttccgccgttttcggttaccagcgcacttccaagtattatgaacggcggcaaggatttttcaatatggagtaaaaaagacgatctgctctacaaaacaattcgtattcctgtggaggcaattttacgaaaagatggtgtaggcctcgcagaatgtgcaattgccgaaagtaaatttgaaaagggcgaagatgtttcagcaagagtactgtctttaataccttctttaaatgaaataaggcagaagggaacaccggatatggaatttgcagtgggcgggctgattgcaagaagccagcttgcaaacggcaagagtgatgaagcctgccggacaatcagatctttgagagatcaatttgaagaagaaagacggacgcgttttctgcctaatatggatgctgtgctgtgccgtatttcgcttcacagcggtgaccttgacagcgcggaggaatggtacagagaaaaagcgccgcgtgatcctatgcacataaacgttatgaagcgatatcagtattttacacaggctatggtagagcttgcagacggcaggcctgacgccgccctgatgacactttctcctctggaattatactgtgagaactgtgcgaagcatatcgacagtattcatctgtatgtacttaaagcaattgcgctgtatcgaaaaaaagaagataaatggaaagactctctgaacaaggctcttaaaacagcggaagaattcaagtttataaggacagtcagtgtttacggaactgctgttttaccgcttcttgaggctctgagtacagaaaacgacagcaaatggtaccgcagacttatgacagatgtgagagcgcaggcggcattttatccgcattttcttcagacgcgtcttgctttaggtgaagctcttacaccgatggagctgcagattttacatcttatctgcgcagataaaagcaatgcggaaataggccagattatggatatcaaattgcctacagttaaaactcatgtaagccatattctgagcaagcttgatgtaaaacgcagaagtgaggcaaagactgctgccaagaaactcagactggtgccggagaatttatagactgatacccgataacagggattgatatatattaaattacacaggttaaggaggaattaaactaaatgagaaaaagaatatttagtatactgcttactatagcggtatgtctgagtatgatgcctgcaggcgtgtgggcaaatgaaggtaatatacctgaaaaaggtacagataatctttttaagattaatactgtagaagaatttaaaacattccagaataaagtaaatagggggggtactgacaagacagtaactctcagtacaaattctgatgagaatgaaattagtacagagaatggacatactaaccattgtgtttgtggtggtattgcagatgttaacggtcatacccatgataatgctggaacagtgtggacagcaacaacttatttgcctgactctgcgggcagctactatctgacgcagtccgtatcggcgaactggactgtgaccggcgacgtcaagctctgcctgaacgggcagacgatcagcggcaaaatcaccgtcggcagcggcgcgacgctgacgctgactgactgctccggcacgggcaagctccagggcaacggaaacgggagcggcgtgtccatcaacggcggcacattcaacctctatgggggcacgattaccggctttgtaaacggtgtagagattggctcacataatgaaattaagaccggctcgtcctttaccatgtatggtggagcgattaccggtaataaaaaagacagcagctccggcggcggtgtgttccttgtcggcacgacgaatcagaccgacccgccgaacttcaccatgcacggcggcaccatttccaacaacaccgcaggcgcatccgacggcggcatctatatccactttaacgccggcaatgtttcgatctccaacgccacgatcaccggcaacaaggcgtccgccacgggaaatacaagttatggccacgggggcggcatttattcgcagagaggggtaaccgtcaagaatgtgacgatcaccggaaacaacagcacctatgagggcggcggcatctatggaaagggcgctattaccctcaccgatgctaccgttaccgacaactctcaatatgacgtttactacgacggaaaggaaacaacaactcctgagctcactgtttccggctcggtgaaggccggttattacgccaattttgattggaagctgcccattcttgtatcaggcgaattgagtgagaattcggtcatccatgtgggcgtgcgtgaaggcatagagcatggggccatcgccgaaccggcaagcggcgtgacgctccgcgccgagaacttcaaggcggacgccgccgacagcgagaccagtctgggcaaggacggcaaggtctatcttgtgccctgcacgcacgagatggacgataccggctacacctgcaagaagtgcaaaacgcaattcgacgcgcgcgtgggcgatagcgcctattataagacgctgacggaggcgtttaatgcagccagaggcagcaccgtgacgctgctgcgggatgtgacgctcacaggaaattgctcttctgatacctacccagcgacgctggatctgaatggcaaaactgtcagcagcgggcgttattacattcatgtcggaggcgggaacaagcccaatactctgacggtcaaggattccagcaagggcggcggaacgcaggcgctcaatgtcaagttttgggttgcgtccaacggaacgctggcggttgacgactcctacaccggcaagatttcgcgcgtggagctgcaggccggcggcgcattggagcgctttggcggcgaaatcggcgagttggttttaagcaatgctgcgcatggctccacaagtacgggctacggcctgaagctgtggaagggcaatacaaacgcctgcaccatcggcgggttcacggataacacgacgagcaagagcctcaccgttaatgacctgctgggaaccgcctacgcgaagtgcgagctgtacggcgaaaaggacggtacatggagcatcgttgataagagcaccaaaattgcagagttgaccggctatacagcgtacaaggtgcagttcccggagtgcgtccatcagtgcgccgatgacagcaaccccgtgtgctctgtgtgcaacaagaacctgtacacgaaaattaccgcccagagcaccaccgatggatcgaccaagactgcctacttcacggaagacagcgcgctggaaaacggctatgtagaggccatccagaccttgaacggctggagcaatgagggctgcaccgagccgacgctgaccctgctgcgggatatgccttacggcacctacataatgctgaccggcacgctgacgctggagagcggaacgcacaccgccaagaatgtgacggtcgctgaaaacgcgaatgtgacctttgccagcggcagctatagaggtgcgaccatcaacggcacggcgacggtggaggcgggcgtcacatttaccgacgccggcgtcacggtgaacggcacgctgaacgccaagggcggtaccttcgatggtcctgtcgaattcaatggtagcagcaccgcgaacatcagcggcggcagctttaattgtgaaaagaaatatggcggcgttacgtttgactacaatgtcacgggcacgatctccggcggcacgtttgccttcgcggattttaacaccaccaaagtcaagctctccggcggcacatttacgataatcaaaaccagcggcgaccgcaaactcgccgacctgctggcggagggcgcggcttactacgatcagagcggtaacgccatatcgaacagcggagattcaaaactttacaatgtgactgtgaagacccatgcccacactgtggatgcgcaaaccggcatttgcagtggctgtcatagacagatgacggcgtcgctgaccgtcggcggcaagacgagctggtacgcggcctttgccactgccatcgaggcggcgaacgcggcggacggtgcaaagaccatcacgctgtatcagaatgtggatggcaatgtctacgggaagcggaccgcctatgagttgacccgtgggccggtgacgctggcgaccggcgggaaaagggccaaggatgtggacctcatcgccaagggcatttctctgacggtcacgggcagcaacggaggcttctatgtgacggtggacggcaaagacgcggaattgaccgtcaatgacgggaatacgaagctcgccattgtcacggcgaagaacggcggaaagctttcgctgagcaacggcaccttcagccgtgtggatgtcatgaacgacggcagcagtgccagtctcagcggcggcagctacggcgagatcacgagcggcaccaactatgtcaagccctacgcgctgctggcggaggggtacgcttacaaaaaagaggataacacatgggtctccaacgccaatataggcctatcaaaagtcaccgttgaaaaagcgccctacgtggtcaagaagatctatccgaatagcgatgagggctacaccggaaactcggcgtttgcgacggacggcaagatcacgctgactgcggtaatcgcgccagaaatagagggcgtcacctactactactggtgggagctgtttaacgaatcaaataacgaatggaccacgcgattcagcgctgttaatgctgcgacgcataccggcgggcagagcaagacgctctccatcagcgatctgccggaaaacagcatctaccaataccgcgttgatgtgcggagcgacaacggctaccagtgctacagcgagccgttcaccgtgacccggcatcagcatagctggacgtacacggcaagcggcgcgaccatcactgccacatgcagcaagtgcaacgccaacggcggcagcgtgactatcaacaagcctgcacacacaacctacggcgacggtcagagcgaaaaagcgacgctgacagaaaacagctggcagggtttggcagtgaatgaggacgccatcacctacacaaagggcggcactccccttggggccgcctccaccgacgcgggcacctacaccgccagcatcaccctgggcgagggtaaaaatgccaagaccgccagcgtggagtataccattgcaaaggctacgccgagtgttggaagctggcagggctacccgcaagcacaaagtgtgtttagtggtagtgcgattcagaatcccacttcgctgacgatttatctcgacggcaaacccagtaatctgattccggttaaccaacttaagtttaattggtataacgccacgaagaacggcaatgattatgtcaagaatggcgatgcgctgggcaaaaatcccactgacgcgggcgattacatcattgaagcggtctttgcgggagacgataacatcaatgcggccaccagcgaatggggcctgaccatcggaaaggctcagcacgccaacaacggcgtcagccttgaggtgccgctgaccgtatatccggtatcgggagagtacatatatgatgtggatattgccaaggcgctgaaaaatattccgcatggcggcggcttagagccgaatacgacatatggcggcatctctacaaacgttaactttgtaaaatcgaccaaatgggacaacggcaagctgtacgttaccatgcgtccgttggcgagcatcacgggaacaacgctgggaagcatcacggtcaatctgaccagcaagaactacacggttgttccggtggttgtgaacattacgctccagcccaagcaggaagtgcaggatatttccgtcagcatgaacaactggacctacggagagaacgcaaaaacgccacagtaccctgtgatggcgggtacagaggcaatggtcacctatgccgctcagggcagcagcgatttcagcacaactgttcccaccgacgcgggcaactacaccgtgaaggtgcagtatgagactgacatcatgatccacaccggcacggcgaatttcaccatcgccccgaaaaacatttccggcgtgaccatcaacctcggccaacaggcaacctataacggcagcgagcaggatgtggccatctcctctgttatggatggtacctattctctaatagccggaggccatgattacgccgttgtcagcggcaacaaggcgatcaatgtgggcgagaacacactggttatcgagggcaagggcaactacaccggaaccgccagaaaaacctggtcgctggatgccaaggatgtgaccctcgattggagaaatattacagatcgtaaatggaatgacggcaagactgtaactgccacggtaagcaacaaggtcggcaacgatgaggtcgatgttaccgtcaccggcggcgatcagaccgctgtaggcggcccctataccgtcaccgccaccggcttgactggcgcacaggcaggcaactacaggctgcctgctgacaaggagcagacctactccatcggcaaggctgacgctcgcgacctgccggatatcaccatcaaccagaagttcagtgtgaccactgagcagagcagggacattggccgtgccggtatgcccgaggatgcaggcaatctgacctacgctaagggttctgaaagcacgaccggctctgcatctgtcactgccagtatgactggcagcacggtgaagtttactatcaccggcggtgcggccaacgataccgtcaccctgcctgtgaccatcggctctgacaactatgcggattccaccgtcaatctggtcatcaccctgaccgacaaggatactcccactgtcaccgcgaaggacatcaccgtcacctatgacggcaacgccattcccgacagcaagatcaccggtacggctacctttaacggcaacaccgttgagggtgcatggggctttaagaccactgctcccaagtttgttgcagacagcaatgacagtgtggccgttgtctttacaccgaacgatgcaaccatctatgcagccgttgaaacgaacatcaaggtaaccatcaacaaggcaacgccgagcggcgcgccgaagtatacagagatcaaagcgagcggcaagaggctggcggatgcagggctgactgccagccttgagggcagcaatctattctcgacaccgggttcgatcgcttgggtcgatgcggagaatcagacgactacgctggcagatgatacgccggttgaacaaggcacagcatacagatggctctttacgccaaacgacttggctaactacaacaagctggccggcacgatcgtcctttgggcgaaaccggcctccggcggtggcggcggtatagtaataccggtacagaaacctgaaataactacaggtgacggaggtaagacagacctgtccgatgatggaacaacaataaaaatcacacctgatgagggtaaggaagttgataaggttcttgtaaacggtaaagatatcggagctgttacagaggttaagggtttaaaaccgggagataaggtagaagttatcttcaaggataaaattaaagagcctactaaggaagaacttgacagcaaggtaaaagaagcgttaaatgatatgactttaaaagctcgctctgcgaaaacttcaaagaaaaatatcagaattaatgttgttgcctcaattacagataaacttcctgacggatatacggtaaaatataaatattaccgttcaacaaagaaaacatccggctacaggcttatgactgcaaagagcgaaaactattatatcaacacaaagggtactaaaggtaccagatattattacaaggctcgcattgcggtttatgacaatgacggcaaactgattgcgcagacagagcttaagcagtgcaaatatgctgctagagtctggaccaagctgtctaaaagtaaataacagatagtattgaaatgctctgaacaaggtagagattatccttgtttggagcattttatatagggagcttggaaatctgctaaaaacttttaaaataccttataaaaggtgagatatttatgatagaatgaatagacagtaaggaggtagctttatgttcagagaaatgaaaagaaaagaaagacagctttcagcagagctgacagaaaaaatacttaacaaatgcaccagcggcgtactgtctgtcataggagatgacggctatccttacggagttcccgtaagctatgcgtacagtgacggcaaaatatttttccactgcgcaaaggaaggccacaaggtggatgcaataaaaaacaatcctaaggtatctttcacagttatagctcaggacgatgttattcctgaaaaatacggcactgatttcgcaagcgttatagctttcggcaaggcgtcgtttgtggaggaccctgaagaaatgctccagagccacattcctatcatagagaaatactccaatgaatattatgacggcggcatcgaatatttcaacaaggccaaggcagccatgagaatggtcagaatagatatagagcatatcacaggcaagggcaaaggcgtaagagtataattccggtacaggtaagagtaatgtatgtaaaatctttaaagcttgaaaacttcagaaactatgacaatctgtcggtggaatttcatccgggagtcaatatcctaattggcgacaatgcgcagggcaagaccaacctaatagaagcaatatatatgatgtcctttgcaaaatcctttcgcacgcgcaaagacagagaaaccataaactttaacagggattatgccagaatagatgcagtcatagcggcagacgatgaggatcagcctttttccatgcttataaaacctgacagcaagtacatatcctatgacggagtgaaagtaagcaaaatgacagagcttctcgaaaaagtatatgtcgttatattctcccccgaggatttaaagcttgtaaaggactctcccgacagaagaagaaaatttatagacagggagctaagcaagctcaagccgttatattatgaaaacctgtacaactacaaaaaagttctgaagcagagaaacgcatatctcaaagaggataacatacagacggacatactcaggatatgggattacaagctggcggagtacggctctgaaataattaagaagagaaacgattttataaaaaaattagaagaagtaagcagtgaaattcacagcagcataacctcgggcaaagaaactcttaccgttgagtatgaagcaaacataccatatggtgaaaatttgcgggaggaattcctggccgaaacagagaaaaatctcgaaaaagacctgtttcagcgcaccacttcaaagggaccgcacaaggatgaccttaaaatctgcatcaacggtgtggatataaggcatttcggctcacaggggcagcagagaacagcagctctttcccttaaacttgccgagataagacttattaaagaaattacaggagaggatgccgtactgctgcttgatgatgtgttgtccgaacttgacagaagcaggcagtcatatcttgtaaactgcctgaataaggttcagatttttataaccacgaccgaaatttcagaggaggttgcagacagttttcccgacggaattacctaccgtatcaaaaacggtacaatagagaagtaaaatacaatatatatcgcatattttttacaagtttagatataaaaaatctcgcattacagcgaggttttttatgttgatgtttccaaagaccgaaatcaggctaaaatcttgtaaaaagagtgattttatgatacaataaacaggtataatcttataaaaatgaggtggctattttaatggcaaaaaaacaaaatcagaattacgatgccgagcagatacaggttcttgagggactggagcctgtcagaaaaagacccggtatgtatatcggaagtacgggccctaagggacttcatcatcttgtatatgagatagtagacaacagtgtggacgaagccctcgcaggatactgtacagaaata

SEQ ID NO: 2098 - DNA, 3805 bp, Unknown
  16S sequences of unknown bacteria
aataacgtacactgtttatggaacataaatgttccttagattcaccggagaatctaagttccgttttcccgaatcttgtaaatatacgaacgtttgttccctttttacaacagtatacgcacagaacgcagattcgtcaacccatttgataaatttttgctacgatgaaggaggcgcaccttttatgtcggatacggtgcaacgcattttccaactcatggagcagcgccatgtaagcgcttaccgcgtatcgcaggaaacaggcatcagccaggcccgcatttccggatggaaaaccggcaaaagcaacccaaagcaagacgctttagagcagctggccgattatttcggcgtatcggtggattatctgctcggccgctcttccgaggcgggctcctcccgtgccggccggcacggcaattcgctggggccgcttaccgtagaggaagacaaggccctgggtcagtatcttgcgtttctccgttcgcgttatggcagcgaaaaggcccgggccaaatcatgatccaatctgtccttaccccctaagataaggatgtgtgcaaaagggaaaggcgcttccgcatggaaacgccttttctctttgtggaaatccttccctacggccgggccgtttcggccttttcttttttgtaccgacgccgcaccgccatttcaccgaaattgacctctggcggatgtcttttgcaccgccgcgctatggtatactcactttgccggggaagaaaaaaccgagccggagcatagccatcccctctttgttttcataaaatggaattatcaggaggccagcggtatgtcgcagaaactcaccatcaaacccaaaccactgcgtggctgggcggtacccttgtgttttccgtccgcatccgtgaggatctggtggaagagctgggtgcactctccagccgcacaggctgctcccgcaacgaattgatccatcttttcctgcaatatgccttacaaaactatatcatcgaatggtgcccccctggcaaccatccatgccagccggggttgtgttcgtttacattccatttttggcgtagctgtcccttgtttcatatccgattttgtttttacagttcattctcccggatatcacgcttacgccaaaacaaaaagcccgcccagcgggcttttttgctgctttgccgcctgcattctgtctgcgcgcacaaaaaaagagccggttccggctcttttttcagacataacagcacgccttggaaggctgaggaacgcctttgattgtattgtaaggggtacaaacttgtggccaaggcgtgtatttgtatgtgcttacagcatactatcttcctgtccgcttgtcaagctccgcccgctctttttctgtcagcggcatcaaaccccccagcgcctccgcctgcaagagggtctgcgcggtaaattcgcatacctccaagcagtcaaacgtattgaaaaccgaggtacccgtaaccaacaagcagtcgttttttaccagcacggcgggccgccgcggcgtcaggcgcccggccgtgtcggcggggtcgttctgccaagcgccatagggcagggcctgcaggtcttccagcatggcgtagctttccgggctcgccgccgcctggtacgccatatccgtcacggcaaacgccatggtgccgcatgggtccgccgcaataaagccgatggtttcgggctgctgggaaaacacctgctctgccaaaagcacatgccggtccggcgttttgcccgcttcgattttgccgcaggatatcagcaccgtatcctccggcaaaagggcctgcctgtcgtggcgctgtgggttgatgataaagctgtggcccgaaacgcgcacggcaaagcagccgctaaacgccgtacaatgccccatttcatacgcgcggttggcccaggccgccacctgcgcccgcgcatcgcattccctggcgtccggctcctccggggcaaagcgggggcgcgcctctatctctgcctgtacatcgtgcaccgcggcacacgccggcagcgtaagcgccgcccctgcctgggcagccgtggtgcagatgcgcgccaagcgctccagcttttcaagcttatccagcgcatcctttaggctttgcccgcccaccatcacgccgtggttttgcaaaatcaccacattgcaacctttcttaaaagcctgttctatgctttggcccagcgccttggagccggggcgccggtacggggccgtgccgatcctgccgatctccgcctcgatgcggggcagcacgcccagcggcagggcctttcttgcggcgctatacgccgccagcgccttggaatgggcatgcagcacgcagtttaggtcggggcgcgctttcagcaccgccgcatggaacggcatatcgcaggataccttgtgcttgccaaccaccgtgccgtcgcacagcacatgcaaaatatccgccctggaaagcgtgcccttgtcgacggccgtcggggttatccataggctgccgtctttgtccctaagcgacaggttcccgccgcttgtcgtcgtgtagcccttggcatagatgcggcgcatggcctgcgccagctgctcggccgggtgtacgttgcggttgtgttgcattgtcctctgcctcctattcggtaaacgctttatgtgcgtagtctacgcccttaaaaggttgccaaagccgcgtcccacgttgccgtgtttttcagcacgatgcgctgcatagggcgcccgcgcacggcaccccctccggcctgcgccttgtccaccgaaagggccatgtgccgcgggcattccccattgcctcggcgttgctcatggcttggccgtaatcaaacgaaccccttccattgccccggcccactcccttggcagcggcgtatcggtaatcatggttttgatctccggcagcgccgccagcgtaaggtgccccagccgcgcaaacttggtatggtcgcagagcaaaatcatctgctccgcccgctctatcatgcatcgctgcatcgccgtttcctgctcgttgccgtttacagcccccgcctccggccgaaatcccttgggcgaaataaacgctttgttcgcccggtacgccaggcagctttgctgcgccaggctccctaccagcgtcaggctttcccttcgcacctgcccgccggtggagatcaccgttaggccttcctcctcgcccagctggcttaccaggtacgccgagtttgtgatgatcgtcacgcccgttttgccgcaaagcgcctcccccatatacatgcacgtgctggaggcatccaaaaaaatcgtatcgcccggatgcaccagctcggccgccgcccgcccaatggcctttttgcccggcacgttaaaccgctggcgcaggccgtagcgaagatctccaaacgaatcctcatgccccttggccagcactgcgccgccatgggtgcgctgggccacgccctctttttccagctcgttcaaatcacggcggatggtttccttggtcacttccagcgcctctgccagcgccgccacattcacccgcccgcgctccaaaagccaggtggcaatggtattttttctttctacgttaaacatgtatacactttctccccttaaacacattgagtataccataaatttttttgtttatgacactctatttttgtttatgcccgtttttctttgcttctatgcccgattgatattcctgcctcccttccgcgcgcagaaagaaacagaattctttcgaaagcaagtgatgatccatggccttctgtgccttttgcggccaatcccccggcccgtagc

SEQ ID NO: 2099 - DNA, 1762 bp, Unknown
  16S sequences of unknown bacteria
cggatagcccgtcaccccccgccaaagctcgacatagaataccctgtaccaccatcgctcgcggtcctgcgcgaccggcgggcccgaacaaaggagcttaccccatgatcgaaattctcgtcgccctgatctccggcggcctgacgctcgttggcgtcatctgcaccaacgccgccgccaatcgccggatcgcggcaaaaattcagacggcccaggccgtcaccgacacgaagctggagagcctgacccacgaggtgcggcagcacaaccattttgccagccgcatccccgccctggaggcgcaggtccagcagctcagccagcgcattttgcatttagaacaggagggaatcaaaaaatgatcaactggcgcgtccgcatcaaaaaccgggccttctggctctcactcatcccggcggtgctgctgcttttgcagcaggcgctgcgcctgtgcggcgtcgattttgaccccggccagctggagggccagctgacgggccttgcaggcactgtcttcagcatcctcgccctgctcggcatcgtcgccgacccgacgaccccaggccttcgcgactgctgcgaaaagcatgccgccgaaggcgcagaaaatccggaattttccaacaaaaaaacggattttcccgcagccttcgacgaaaaagacgaaaccgcagaaaaatccgacaaacaatccgcatccccccaagcatccgacgcgaacccccaaaaggaggcccccgaccgtgaagcttgagacgaagtacctgacgcaaaacccctattttaatgacggccgctggatcacaggccccgccttccggggcttcttcctccactccgtcggcgtcggccagccggacccgctggtctttctccgccagtggaacaagcccggcttcacctacgcgggcatcagcggctttatcggcgccgacaccgtctacctcaccgccccctgcctggagaccccgggccgggtcaagcgcatgccccacgccggaaagcccgccgggaacaacggctacatcggctttgagctatgtgagccgtcgcagatcacctatacgaccggcgcgaatttcaaaatccgcgacaaagccgccgcccaaagcttctgccgcaaaacctacgaaaacgccgttcagctcttcgcccgcctgtgcgccttccacggcaaagaccccttgcgagacggcgtgatcctaagccacaacgaggcaggcaagcagggcatcgccagcggccacgtcgacccggagcacctctggcgcggcctgggcctgccctacaccatgcccggcttccgccgcgccgtcgccgccgcgatgcaaggcaaaccagaatcccaaggaaccgaatctcagaaggaggagatcaatatgaccaaagccgaagtgatcgcactcatcgaccagcgcatcgccgccgccctggcgggcaaggacgtcccggccagcgcctgggccaaggacgaactcgcccgcgccatcgccgccggcatcaccgacggcacccgccccggtggctacgccaagcgcgaggaggtcgccgccatggtcctccgcgcccagacccccaccccttaagccgcaaagcccccccgcggctccgccgcattttcctacggcgcaccgcgccgacgccctccggggctttgaagcgctttctatcctaatgtctaccagacaatttcgttagcgccctccgggggccatattctttcttctccggcgaagaaagaatatggaaagaaagacgccgc

SEQ ID NO: 2100 - DNA, 1791 bp, Unknown
  16S sequences of unknown bacteria
tgttttttccggcggcgtgtacgtcgggaaaaactcttctcgccctgcaagtgtggaatttctgtgccgaaggcgcagaaattatgcgcgcagcagggtgcatttccctcaaacgagagcccagcgaagcgggtctcgtttgagagcgtttcaaaaatttatttttgaaacgctcagtttttgagcagcaaaaaaacgcgctgccggaagcagtgcggtaacattcgtcccctcatctgccgatttccctcgccggatttggcaccttgctgccgcaggttgccgggcttcatcgggccgttccctccaccgctcttgataaggataagcaatatttcatatatattatagcaaggaatatcaaaaagtcaagattattttgccgttttgcaggaaaatacgtttcctcggtttacaaccccgccggattctggtatacttcatggagccaaagattctataaaactggggggcctacgatgctgacaggaaaaacggttttgctcggcgtgagcggcggcattgcctgctataaggcagcgcagctggcgtcggaccttgtgaagcagcacgcaaatgtgcatgtcgtgatgacgcggaacgcggcggagtttatcacccccctgacctttgaagccttgacgggcaaccgcccggtgctcgataccttcgaccggaatttcccccacgagatcaagcatatctccctggccgagcaggccgacctggtgctcatcgccccgtcgacggccaatgtgctggcgaagctggcccacggcctggccgatgatatgctcacaacgacagtcctagcctgccgctgcccaaagctggcggccccggctatgaatacggcgatgtatgaaaaccccgtcacccaggataatctggcagccctgcgccgctacggctgggaaatcctggagccggatgcaggccgcctggcctgcggtgcctatggccggggcaagctgccggacccggaacggcttctggaagcggtcctgcaccgcatcagccatacccaggatatgacgggtctgcatgtccttgtgaccgccgggccgacccaggaggcgctggacccggtccgctatctgacgaaccactccaccggcaagatgggctatgccatcgcccgggcagcggcggcccggggagcggacgtgacgctggtcagcggccccacttccctgccccagccgctctatgtagatttcgtccctgtcacgtcggcgcaggagatgtgccatgcggtgcaagcacgcagcgcggcgcaggagatcatcatcaaagccgctgctgtagccgattaccggcccgcccaaactgcggcagaaaaaatgaagaagtcgagcgacggcctgacgctggagctggcacggacggaggatattctcgcctggctgggccgcaaccggcggccaggccaattcctgtgcggcttttcgatggagacgcaggatctggtggaaaactcccggaagaagcttgacaaaaagcacgccgatctcatcgccgccaacagtctgcgggagcccggcgcgggcttcgggacaagcacgaacgtcctgaccctcatcacccgcgacactgtcaccccgcttccgatgctctcaaaagacgccgcagcccaccgtttgctcgatgagattctgcgttaccgcgcagcaaaatagcaaagaattgcgcattaaaaacgcctggaagggcgttcaaactgcgaaaaagcctcgcagagtttgcgccgcgcacggcgcaaataaagtcaaaatcattttctccggcggc

SEQ ID NO: 2101 - DNA, 19120 bp, Unknown
  16S sequences of unknown bacteria
cgatacttaattgctttgtttgccatttttcttcccctgtgacattatgtactgcctgataatatctacggtagctccacttgtctgttagatacgactgattgtaaatatatcatagtacagcaagatgaaggagtcaagaaatcgccgtgttaatcacaattcatcccaccacttatagaaatggggggatttcttgctcacggcgtgttaaatattgataatacaatggtcatttctattacattacaaattatttcagggtcagcggcagtcccgcaaatattcttgtcaccgactgcgagacctctgccattttaaccatggctctgccggcttcctctctccatgctctgagttccctgtctacgggaactatcccctgtgatatatccgtacatatcactattttatctgtcagagcatcagatatgtttttaaattcctcagcagggtttctgccctctcttatgcaggcaagcaggaatttctccatacagtaaatcacaggctttgaaaggtctatttcagccctttcctcactgcaaaagaatatatcctcatctcttaaattgtatttcgattttgcatattcaagcctgccctgatatgcccctccgaaaatcagctccatatcaagctcctcctaaaacatcaccgccgcacctataacggcaaagcactccgcccacactatactgtagcctgcaatatcaccattgacaccgccaaggcttcgcgctgcccgcatacaggaaattatacctgcagcagcacacagaacaagaggcacaagcacctgtatatcagtaactgctgtgcaggctgcggatatcagtaccgcaaatactgctataaagattatctgtttcccgctgcctctttcaaggctttcgtactgactcacattgagccttctgccctttaatatgcagcctactccgacagctcttgagattacagggaccgctataaggaattccatatatgatgcgcctgcttctatgaagctgtacactgatgcaaagaacacaagaaacagcacaatcacccatatgaccgcaaaggctcctactcttgagtctttgagtatctgttttttcttctcaagaggcgctcttgaaaatatcgcatcacagcagtccatatatccgtcaaggtgcataaaccctgaaacaaaaaacggatacaccgtcagaaccgccgcactcagcattttgggtatgcaaagccacagaagcagctctgcaagaccgtaccataaggctcccataagaagtcccagaacaggcagcattgccagcatctgctttctgctggtatcgtcccatattctccatgggcaagggacaatgcagaaattaccccacgccataaaaaatccttttataatattcatattctacctcttgtaatcaaacagctgtccgtatgccacctctgtcaccctgtcgcatattccagccagcgctctgtctatataaccaagtcctctgcggtagtcctcgcttaattcatcataaatgaccgcatcggaatatatataatctgaaacaaatactatgttagaagctctgcccgcaacgtatttaagctcctctgcaattttaagatatgctgacctattgatatccccgctgtcaaacatttcgtttgcaagaagcgcagtcacgctgtcaagaagaaacgtgccattttcatatgccttatcgaatatctcctttatgttcctgccctgctctatggtttcaaagccccagcctgctctggcctctatatgccgccttatccttgccctgtcctcttcatcacagggtatcatggttgcaatgtagtaaagaggacctcccgactcctctgcaagctgctttgcaaggctctgggcaaaatacgatttgccgtttttacagccgcctgatataaatattttcattttaaaagtcttcctctttgtcaagctttttgagatactccgcttccacattgccctcttcaagagtcgtcatattgcacataaccgcgcaggctccctttattacctgaaatgccataggacatccgctgccctctccaagcctcatttcaaggtcaagcatcggtttaattccaagagcagacgcagcatactcataacccggttctttagatttgtgggagccaaacaggtatccctttacttccggatttatcatatatgcgcaaagagctgcaacagccgatatatatccgtctataaccgcaggcattccgtaaagcgccgcgcccagaaacgtccctgtcattgctgcgatatcaaatcctccaacctgacttaaggcttcaaataccctgtcccagccgtcctcatacggagttattctttttactgcattatctatgacttctttttttcttgcaaaggaatcactatcaagaccgccgcctctgcctgccgtttttgatgcaggcagacccgtaagagccgacagtaccgccgacgcagtagtggtattacctatacccatctccccgactccgattatatcgtgtcctgtatttcctgccgccttggcagcttcaatccctatatatattcccatcataacctgatgtctgctcattgcaggctctttggcaaagttattggtgccgtatgcgattttgcggtttacaatgccctctgcgagagtctgtctgcatacgcctgtagagcagttatgcactacagggtcaagagtcagcatttcctccggaaagtcggcattcacacccacatctgtaaccagtatatctgtgccaaagcagtctgcaagagcgccgactcctgtaaggtgccttgatatgttgattgtctgactgtatgtaacagactgcggcgcagaagcagtgccctcttctgtaactccgttgtctgcagcaaacactgtaactgcgctgctgtttatactgttctttactctgcctgtaattcccgcaagctgaattgctatactctcaagtactcccagcgaaccgggcggctttgccagtatgtcaagccttgcctccgcctgcttcatggcttccctgtcaaccgggtttatttcctctattatctttcttaattctgtttccgtcatatatatcccctttccgcaagccatttaaatgagctttcaagatcatatgcctctatggttatggtggtatcactgccgcagcagctgtctatgtactccagcgccttacccatattcatgctgcccttatcaggcggattatgttcatcagcgctgccgtaattattgtgcagatgaatatgtcccgtatattctcccagcacctcaagccactcgcatatatccacatttcctaccgcatttgcatggcctgtgtctatgcagagtcttatccgtttatctgctatcccctctatcagctcccgcatcatatacggctcatcatcaagaacgttttctatataaacggtaaaatcctctgccttgtcactcataaattcctgccagaattctatcgagtgttccctgtgccattctttaaagtacacaaatggcacatagcccgaatgaaccaccattctgttaattccaagccgcctgcatacatcgtatgcctgattgagcctatctgatgcaagccggcgcgccctcgggtctatcgccgcagggtacagttctgtgaatgggccgtgaagtatatggcgctctgagagtctcataatctctcctgcccttttaatttcatctttatcatcaagcattacagactgacagaagctgtctatttccattcccgcttcgtacttttcaattatatgttcatagtccttgccgaatgttgcagcataaaatctcgttttgtctatcaaaggcttctcctttgcgatataaaatgggagacagactaaatccatctcccgtaaattatttatctctttggcagatgtacaagctttctgcaaggcttattgtagtagccaaatttctttttcttcatttccagtttatacagcagatagtctattgttttagggttgtacttctcaatcttaggataatccgggaacctgtttatttcagggaacttgatgccgtcctctgtaatggcaaggtcaaatccgaagtattcaagctgaggtatggactctgcaacctttaatactgtatcaactgttttttcccagttaggaagaataccctcaatcagtacgtctgtatcagggtgtctcggacatgatacgatttcaaggttgtccgttataactttggcattgtggtaatgtcccgtttcaatatctatctgagcaaacatgccgcctgcgcccatattgtcaactgctcctgtttttttggagccaaatcgcatatatgcgttgccaagctccggagttctgccatcttttttgaacacgatcattctgatggtgtttacggccccgtcatatatggctttgagctgcgagtgcatctgtatatattcggtaacaagatactggttgtttacatcctgaagaatatcgaggacctcctgctctgttgcctcatcaaagttcagatagtatttgccgtcctgataccagaatttatagaagccgttgccgtgtgacccctcatcaggcttgagagcaagcactcctttctctcttaccagtctgaatatatcctcataggtgctgccgtagttttcgggacagtccatcataggaattattttgttctgtccgtttttgacactgatatagtaataatagcccgggaaacattctctgaaatccgaaacaatatatttaacggttatcttgtcttccatccagtgtctgtatttgccgtttatatggcgcagccatttatattcaaagtctgaaatatagttaaggtggttgtcctttgtgatgttgtactgcggcagtctgtaggataaaaatccgtgtctgtatgcccacagcttgtcgcccagcttaacattcttgcctgtaaacagatctatgaatacatctcttatccatgtaatgctgagatacggcacaagacccttagggtaaaaggttctcgcaaatgcggctcttaccttgagcttgattgttttgaagcctctcttaagccttaccgcaggtcttgagtatgagtcttttttctgtctgtatttaagtgcaaaatatgacgaaatccttttgctgaaaggcttgatgctaggatacggcggctggttgaggaaatctatgattttaaagccgtcctctgtaattacaatatcaagtccgaaaagtcccagctgcggcacaaatctgcacattctgtcaacaagctgtctgatctcgttccagcatttaatactgccgctaagctgcctgcctgttaccgggtgcttttcaaatttgatgacaccatccttagtaagggcctgcccgtgtctgtacacaccggtttcaaggtcaacatatgcagcaatgctgttgtattcatcctctattatatcatcatttgcatcatctttttcgagagccctgtttactcttctgcttgaaagctcctgttctctttcgatgttgccgtttgagattttgaagtatgcactgccgatttcaggcatatcgccttcttcattaaatgcaattattcttagaacatcagggtactcctctattgagcccgaaaaatcaagggcaggcgccacatattctctgagaagcgatacatcgctgaaagctctgataagctcaaagatttctttatcgttaaaggctgtgcctcctgcgacgaacatatctccctctactttgattgcaacggatttcctgccgccggctgaggccagtattacgatctgcttctctctgataagctccagcacgtcttctctgccggttttagatttgtcagcatcaagaggtattatgtgaagtcccatatctctttctgaaaactgatagtatacatcaggcaggttctgcttaaacggtttgaaaatgtttctgactgtgactctgtcattaacccatttactgtacttgccgttaagcggcctcagatatatatattcccgctccgaaatgaagtctttgtaattgtctttggtaataccgaacacatcaacctgctgcggcataaatccatgtctgtatgcccacagtttctggcccattgagtatccgtttctgtcagtaaagtctctgtagagctttctgacccagagctttgcctgtctgcctgtaaatcctctggctgtagggaaaaaggcgagtatgtttataattatttttttgagtattctcatcattatctcctgtgtacctgtcgcttatatatgccaaaaaaagaatatcacctgaccgctgcattgtcaagtaatacccgtccttccggccaaaatcaaaccggagccataaggctccggcgctgcgacctgaatcagtctttttcgttaagtaaaaatgattttgttttctcactctgaggattttcaaagagctgctgcggagttcccatttcttctataactccgtccgccatatatataatcttatctgcaacgtttcttgcaaatttcatttcgtgagttactactatcattgtcctgccctgatttttgaggtctttgataacctttaaaacctctactgtaagctcagggtcaagcgctgatgtcggctcgtcaaagcacagaacctcaggcttcattgcaagggctcttgctattgcaactctctgctgctgtcctcctgaaagctggcaaggatagtttgcagctttttcttcaagacctacagtcttgagaaggttcatggcttcttctcttatctgcttcagcgcggcttttttgtccttacccttatgttcgttcttgagtctgagctcaggcgccagagtaaggtttctgagtgcgctgtactgagggaacaggttgaagttctggaaaaccataccgaagttcagtcttttttcacgaatgtcacgttctgaatactgatcttttttgtcagcatcataaagctcttcgcctttaagtattattttgccgtggtcaggagtttcaaggaagttgatgcacctcagaagcgttgtcttgccgcttcccgatgatccgattattgcaacaacatcgcctttttccattgtgaagtcaatgcccttgagaacttcaacgtgaccgaagcttttgcgtatatttttaatttcaagtaatgccatattctaccccctgtaataatccagtttcttctctatcttgccgaatacgatagtaagaattcctacaaacagcaggtagtatactgctgtgaagaacagaggccatataacgccgctgctcttgatgaaagtctggcctgcccagataacttcataaacaaggattattcttgcaagagaagtatcttttacgagagttattatttcatttgacataggtgccataattctctttattacctgcataaacacgattttaaagaaaatctggttctttgtaaggccgagaacatgtcccgcctcgtgctgtccctgagggataccttcgataccgcctctgtatactactgcaaagtagcatgcatagttaattataaatgcgatgtatacggctatgtttctgcctatatcgcctactccccatatattgttgcccattatcattccgggaccgtaatatacaaccagaagctgcagcatcagaggagtgcctctgactacccatacgatagctctggtaaccgccttgagcggcttgaacttgctcattgttccgaaagcaagcaaaagacccagcggcagagccccgataagtgttgccacaaagatctcaaaagtctttacaaatccttcgttaagagccgatatgactgtttcaaacattatttcctccacatttaagcagggatatgttactatccctgcttaccaattactttctattttgttttgctttatttctgctctattaaggattcctgtactccgtatttttcagcaatctttaacatgctgccgtcatcataagctgttttgaagaattcgttgattttgtcaacaacgtcgctgccttttctgaagcctacgccgtattcttctgagttaagctctacagtgtatgtaagacctgcatagtcagtaccttcaccgatcattgcgcctgccataagaaggtcgatgattgatgcgtctgaagttcctgctgaaacttccatcagagtatcagcctgagcttctgctcctatgtagttaagctcgtactctttagccattgtttcgcctgctgaacctgcttcaactgcaaactgtaatttcttgatgctgtcaactgtctgatacttgtcagcaacgtctttcttaacaactacaacctgagcgttgttgcagtatgcgtttgatactgacatacctgctttaacttcgtcgttaagcgtcataccgttccatacacagtcgatacccttgttgtcaagctctgtaatcttgtagtcccagttgataactttgaattcaacatctacgccaaggctgtcagcgaatgcttttgccatgtctgcgtcaaatccgatccattcttcactgtcctgattttcacgataatccataggtgcaaactctgtaataccaactacgagagtacccttgtcctggatatactgaagatctgatgatgtttctgttgaatcatccttgccacagcctgttaccatacaaatggaaaaagccatagctaaaaccagtactatacttaaaatctttttcattttctaaaacctccattgaattacctttagtcaatctctttgtctagtattttgttactttatcacagcaacgcaagcctgtcaatagttttgagtattttcagaataatctgacctgtaaatcatatggcgctgtaccggtaaagctgagcatactgaccgcctgcggccataagctgctcatgagttccctcctctttaatccggccgtcatctatgaggataatcctgtccgcgccccgtattgtagagagtctatgcgctattattactgtggttctgccctccgccagcttgtcaaaggctttctgtattcttgtttccgtaactgtgtcaagggccgaggttgcctcgtcaagtataaggacaggaggatttttgagaaatatgcgggcaattgaaattctctgcttctgtcctcccgaaagcagtactcctctttcgcctacataggagtcgaatttatccggcatattcattatgtcctcatatatctccgccttgcgcgcggcttcaaacacctcttcatcagtagcctccggtcttccgtatctgatattgtccataacggttcccggaaacagaaatacgtcctgctgcactattcctatatttttgcgaagcgcctcctttgatatgcttctcacatcgacattatcaagcttcacacagcccgcatccacatcgtaaaacctcggtataagctggcacagcgtgcttttgcctcctcccgacggacctactatggcaacagtctcgccttcgtttatctcaagattaatattatccagcacacttgtcttgtcgtcataggtaaagcatacgttttctatgcttattctgcctctgactgtatcaggcttcacaggattttcaggctcctgcacctcaggctgcagcctcatcagatctataaatcttgtaagtcccgcatagccgttcataaatatttccgtgaagttgcccagctttcttatgggatttataaaggtgcttatatacagataaaaggtgacaaggtccacatagttcatattatctttcattatgagccagccgccaaacgccattataacgacgggcattatgcacatgaaatattcaagtgatgaattgaatttgccgaaagcgctgtagctggcgcacttggctgttttgaatttctcgttggcctgtgcgaatttcctgtaatccgcctcctcgtttgcaaatgccttggaggttctgattcctgaaagtccggactcaatctcgccgtttatctccgacatggttattttgacattgcgtgatgtggtaaccatattcttgcggcaaagcattacaaccgcaaggaatatagggattattatgagtatcacaagagcaagctgccactgaaccgtaaacataatgcatatagctccgattattgtgataaatgctacaaacagatcctccggtccatgatgcgataactctgtaatttcaaacaggtcgccggtcatcctgttcataagctggccggttctgttgctgtcaaagaatttgaaatcaaggctctgcatatgtctgaacagatcgtctctcagatccgcttcaactctgacaccgaacatatggccccagtaggtaatgatgtagttcatacatgcccttatcacgaaggctgccgcaactataagcataactatgaaaaatgtatcaaactgtcttgcaggcagaagctggttcattgcgcttctggccacaagcggaaacgccagatctataagcgccataacgagcgcgcaggaaaggtccagtacaaacaggcctctatggggtctgaaatactgcaccagcactctaagcggtgttttactgtaatctttgttgttcatatataaagcctccttgttcaggttattatttcaattcactgcatttctacagataaagctgcataagcaggattgccgccacaggaagtgtacccatggaaagcagtgtagtcattgccacgccctctgccataagagccgcgtttctgttttctttgagggctattgccgtacttaccaccgcgcacggaaatgccgccgcgaatattagtataagcttggactccggcgccagcggcagccagtttaccgcaagaaatgtaagcacaggtataagtatcacattacacaggcttgccgtaatcagccgcttgtttgtaagcattttgcgaatgctgctttcggagagttgcactcccacgactatcatcgaaacagggattgtcgcatcacctatagtatttataaaatcagccagaatatccggaagctgtaccttgagcagcataagcaccagtcctgcaatcagagcataggtacacatattcatcataggcataagcatgcccctgataccctcttttttgcgaaagccgtagttcatctgatataccatcatcgaatagaggtatatattaagaactatattctgtattaccataaggaagaaatatgtgttgccgaatattgctttggtcacgggaaaacccataaagcctgtgtttacggccgtaattataaccataagcactcctgcatcctccttgtcacagcgcatcagctttacaatcagaaaagaaaccgccatagctgcaaggaagaatatgaacgagcctgccacaatctgtatcataagctcaaaggtatgggcatcaagcgtctgtgaggtcatagagcctattatcatgcatggcgaagttatgaatagaagcaggttcgacaggtacttcttggactctgccggaagtatgcctgttttgcttgctgcaaaccctattgccgtcattgcgaatatcgccgctatttttaaaaaaactgtaagcatatatatctcccgaagttaaaattcctgtacctttaagtatatcacactccggcataatttcattgcttttcttgctattaaaatacagcccgccgcgtaaaaatgcaacaggctgtatgaagttttgttcttttgtatatattttgcggtttactttagagttatatggtagttgtcgtcatagctgtattcatctgctcctattgtttcaggctgcggcgggtcataataaacattcggctcaaacactccgtatatctctaccgtcccgcctatatttttatcatagtatgaaaccaccgcttcaaaatgtttttcccagtctgcttcttcatatccgaaagaatagctgacattatcagcagccggtggcgcggaaactgctttttcaaaaataattctgccgttatttctgatgctcaccttcatcttttcaatgttttccccaaaggctgtttcatcttcacctatattaacagctatcctccctttgtatgtgtttccctttgttttttctgtgtatatctctatctcaggcagtgcagttataccctcaagcatatatacgctttcagctattgttactttctgtttttctccgttattgtcaaccacaagagttatcttcatctgttcaccgcttataggaatatcaacatcgcctctgaacctgccgttgctgttttcaagcgcggccgtatactgtctgccgccgtctgtttcggcgattgccgtaatttctgtgctgtcgctgtaggttttaggctctgcctctatgtgaagctttgactgctgcttctttttatcagcatcttttatcttccagcttacatccgaaaatgtttcggacacatcatcggtatagctctccgagttctgatatataacttccggcgctctgagttcaagcgcttttatcctgtctgacagattaacagccacagctatcattatcacaatcataacaaggcatatgcctgctgtgattattgatacaaatttatatactgtcacattcctttcaaacctgtcttctttagtggtttttgtctctgctgcttcatctgaaataaggtcgtcaagtgacacctcaaacagctttgccattgctttgagcttctctatttcgggtttgacaaggtcgccctcccatttggatatggactgccttgtgactcccagcttctctgcaagctgctcctgtgtcatatttctttcatttctcagtttgtatattttttctcctaaggtcataatagttctcccatttattttattgcaatgtgataattctcattatatgtgcgttctatcccgtcatcatagtctcccggagtttcatagtacaggcgtacctcactgcctaacgagatttcccctcgtatctctataatactgtcaagggttttgcttctgtactgcaggtaaagcattggcgcctggcttccgtcttccagcaacgctttttttctgatttcatagcttatttcttttatactccctccatcgtatcttccgatttcatcagaaaagacagtattgtctccgatttttatcactagcttaatatcttctgcatcctgagaaactttgctgcctgcttcgtatgaaaaatgactcggctgaagaagctttattattccgcagtagttatatcccttaatcgtctgctcagaaacttctatatcaggcagccatacaagctctgccagtaatgaaatttcatcaggcagcgccaccacctgcttctctccgtcattgtcaatgtcgatgctcatttttatgaattctgcatttatcggcacactgatgatccccttaaatctgccgttgtcattttcgagcctgcctgtacaggttttgccgtctttgaatgcggcaacagcagtaagctttgtattgtcactatagtttttgggctgtgcagtaatatatatatctgtcgtcatattttctttgtccacatctgccaccttccattcaagctctgagaaatatgtatctttatcactctcttcatttccgtctattacatatggccttgactgcatctccagagttcttacgcggtgtgacagatttatcattactattatagttactgtcatagctatgataagcagacaggctataacggttattataattttattccggtttgtctttttgttcagactgtcctctgttatagttttttcttctttgtccttcttatcagaagcttcatctgaaataaggtcatcaagcgacacttcaaacagctttgccatagctttgagcttctctatctcgggcttgacaagatcaccctcccatttggatatggactgccttgtgactcccagcttttctgcaagctgctcctgcgtcatattccggttagccctgagtctgtatattctctctcctaaagtcatactcaccctcccgtcataaatttagttcattatggcgttttgtcctcatcttgtctataaaatgtattgtacaattgcgcaacctgaagttgcatatagcatgtttacatatattttatatggttttatcgcagtttccaatggtttttatgcacaaaaagcccccgatgatacggaggcggtttatgtatatttttaggctcctgcctttttcctgtgcgcaatatatacgcaaagccctattattacgccaagcactgaaggtgtaacccagccaagccccattgaataaagagggagccagccttctgccgaggctactatgcccgaaacggcatttattccgcttactctgaacaggtccaaaacagcggcaatcatagtaaagcctattccgaagcagtatacctcacgggcgtgattaaagtattttccgaatatgctgagcagaataagtacaatagccaacgggtacaggaagtacagaacaggcgctgaaaatgatattatctttgacagccctatattcgacaccagcagtgaaaatacagtaaacgaaatcgcccatcccctgtatcccattgattttgggaatatctccgaaaaagtgtccgcacatgctgtgataaggcctattgccgttttcatacagcagaatgtaacggtcagggccagaactatcattccaacattgcccagataatgctgagctactacggcaaaggctgtacccccgttgaaatccggatctgaaagctgctctgcataaagaccgtagctctgtgcgccgactactgcaatcagagcatatataactgtcataagaagcatgctgaatactcctgatttaattgtgttctttgcaatggctccgggttcagtaacgcctattcctttaattacgtttacaacaattattccaaaggccagagatgcaagcgcatcgagcgtatcatagccctgaagaaatcctgtggcaaacgcgctgccctcatagctttcgtttacaggaaccgtcgaaatgctctgctgcggatttataagtgccgcaacgacaagtattcctaaacagataagaaaaacagggttcagatatttgcctacagagtccattattttagacggtctcagagagaagaacagcaccgccgcaaagaacagtgtcgtaaatatcgcctgtataagcgtttctctgcctgatataaggggctgaatacccattgtaaacgatgtcgccgcgcatcttggtattgcaaagaacggccctattgtcagatagagcgcacaggtgaaaaaatagctgtaccagccgcttactctgcccgacatctgcataagtccgctgcttcttgaaactcccagcgcaataatgccaagaagcggaagtcctaccgctgttatgagcattccgcaaagcgcgggaataatgcttgctccggattttgctcccagaataatcggaaagataaggttgcctgctccgaaaaacagtccgaaaagcatagaagcaaccagagtgtactgcttccccgtaagttttgttttcattagattctcctttgtaattctcgttaagttctgattaatctctcactactacaaaacccccaattccaagggttggaatatgggggtcgtccacacaaaatgtttcgagcgcaatgccctttccatatgctatataatatacagcaaacaggcgcagaattcaatataaaatttaaaaatgcagctcagttctctgaataaggtcgttttgcagcgcctctcccaactccacaaaatatgcgctgtagcctgccaccctgaccagcatatcgcggtaattatcagggtccttctgggctttcttcatggtttcagagctcataatattaaattgtatatgcataggattattggcaagatacgcatctatgaagcttatgagattatctctgccctctctgccgcttactgcattttcgggaaatttaacattaagtagcgtgccgtttggcgccatactgtgatccaccttgccgactgaatttgccagcgccgtaggtccctttacatcatgagagcccagtctggtatgaacaggccccatattgtccgatatggcctcgcctctctctcttccgtctaaagaagcattggttccaagtcccattgcaacgttaccgcttactgagtatactcccggattgaactgtccgcctcttattgtcggtctccctataagggtgttgcagtaacattcaaatatgaatttaaacagctcatctgcataatcatcatcattgccgtaatggtgcaccttggagctgttaatcagtgtgtgcagcacctcgtgcccctcccaattgtctctgattgcctgcagaagctcttctcctgtatatttcttttcgtcaaataccagctgcttgattgtaaccagcgagtctgcgcaggttgcaacacccagcgcctgaggtcctataccgttgtatctggctccgcctgcggaaatatccacgccgctatcaaggcagtcctcaaagaacgcagacacataaggcagcggctttctctccctgtgggctctgtcgattacattaagcgaagcgcacatctgatctatccagtattcaaactgtttctgcacgctttcaagcagctctcccatatccttgtattccgccagattgccggtatcgggaccaagcctcttgcctaatgcgccgcatctgtcccatcttgcgcaatgctccccgcagtcaaggcagcggccgccgtttaataccatttccataaactttgcggtattaatatatgcggcatcgtgccatccgtattccctgcccggtattgtcggctcaacgcagcctacaatggcataatccgcagcttcttctcttggaacgccttttttttcaaaggctctgattgcaggctcatcgttaaaaagcttagggtgaccatagcctgctctgatacattcaacagcctttacctttagctcatacggcgtgccctcgtgcattctgacaagcagccacggacacatcattctggtatgcacagaggcatccagcatcatcatagtcagatcatttgtcagatcgttgccgtctttatccgagccgcctatagtaagacattctccgccgaagcctctgccctgtcttacctttgccgtacctccgtccctcaccttagtaggattgttcatctttacaaatactacttcaagaagctcctgcgcaaaatcctttgatatattgccctcgtcaatatcctttcggtaatacggataaagccactgatccattctgccgtaggaaatggaatgtccgttgctttcaacctgcgtcaatgtagttgcaaagttaaaaagctgcagcgcctgccagaagcttttggccggtcctcctgcaatctgcctgcagttatcagccatggcaagcagctcgtttttccttttgatatcgtcttcctctgcagctttgctgcgagccagcttctcgtatctccctatatattccttcgctgctttgtgacatatgattactgcttcataaaactcttttttaactgcaaaatcaggatccttacggtcaagctttgcaagacctgcttcggccctttttatcataccgtcaaagccctctttcagaagtctttcatagtccattacaagatgtcctatgccgccgtagtgatacaggttggtctggaaaatcttcttgccgacctcggagcccttgatcatatcctcatccatatattcatttgcaagatcctcaacggttttgccctgccagtaatagcaaagctcaataaattcttttctgtcctcttcacttgcaaaatagtgctgatcatgctcacgctcctcgaaaggttcgtacagcgcctcgtgcagcatccagtcaattgaaaactcggggtactgcggcgaagcctttgcgggcgcgcagatttctccgaggataagatcctcatcgtaaattctgagggtggcattcattaatattttttcaaatgctctggcacatctgatttttgttgtcgctctttcgttttctttgtatgcctgcgtaatgtttctgaaacgctctacgtctataaggtattcacgctctagaaaggcttttcgcaaatgatttacgcgcggatacggcgaccagtccttatgtcccacttcatatccgatgctgtatgttttgtcaaacggatcaactccgcaggcgctgcagtgcgcagtatttatactcatagtttcacctcctgataatcagctttgtgctgtccctactgtgcagtgtattccgcgactgttaaagtacgctgctatatcctcaactctttgctgaaatttctctctgtcaaattcgagactgtccatttcataggttctgccaagggatctgcatttttcctcacccattctcataaagcttaaaagctgcagcactctcagcctgtccccaatgttatcctctatatagtctgctgttttgatgatgttttctgtatcatcatttattcccggtataacgggaattcttaaaatcatatcgtgaccgcaggctgccagccgtttaaggtttgccaatattttttcgttgccggctcctgtatattttttatgtacatcgctgtccatatgcttgatgtctgaaataaggaggtctgcatattctgccgcagcctccactgtttcccaatctgtacagaaagttgactcaagacaggtatgtattcctgtctcacagcaggctttaagaatactgcgggtaaagtctttctgaaccaaaggctctccgcccgaaacggttaccccgccgccggatttttcataaaaggctctgtctttttcaattaccgccataacctcatcaaggctcattttttcaccccaggctctgacagcctctgagggacatacggcagcgcatttcatacagcctatacatctgcttctgtctatacccgctatgctttctcctgcaaaaagcagtatctgctgcctgcatgctttgatgcaaagcccgcatttatccatagagatacatttagaggaatatactcccggctctattgcagggttctgactttcggggttgctgcaccatctgcattttagaaggcagcctttcataaatatctcggttct

SEQ ID NO: 2102 - DNA, 7319 bp, Unknown
  16S sequences of unknown bacteria
agccgcgcggttcggcgcgtaccaccgcgccggtcacggaggttattataccacacccctatgatacgaacacagccttaaattagtctgaaacggttttttcagactaatttaaggcgggagtgctaccatgggggctgcgaaaccagaaaggagcgcgtcacgatgaaccagccgattgtccaaaccttcaagcggtatgaaaaaaaataccggctgaccactgcccagcgagccgaattcatccggcgggtccagccgtttatgcggcccgacgactacgggacctacaccatcggcagcctgtatctggatacgccggatttccggctcatccgcgcctcgctggaaaaaccggtctataaggaaaagctgcggctacgcagctacggcgtgcctcaggcggaggacacggtgttcttggagctgaagaaaaagttcaaaggcgtggtgtacaagcgccggacggagatgccgctggcacaggccgccgcctatctgcgggacgggacgcccccggcaaaaacggatcagattttccgggaaatcgactttaccatgcggcggctagagccggcgccccgggtgtatctggcctacgaccgcacagcctacgccgggcggcgggacgaccggctgcgcatcacgttcgacacctgtattcgctggcggacggatccgctcgacctgtccgcgggggacggggggcggctgctgctcggcccggacgacgttttaatggaaatcaaaattcccgacgccatgccgttgtggctggtccgcgcgctgacggacatggggctgttccctgcgtcgttctccaaatacggcacctgctacgcccggtatctcagcgtcggacagaaagccggccttcccgccggggaacaacaaggaggaattctcagtgcttgacagtattttatcgtccgtttccaccaccgtatccctgtccctgccgcagctgctgctgtgcaccgccgcctccctcgccatggggctggggattgcgctggtctacatgtacaaaaacacctatagcaaaaacttcgtcgtcacgctggcgctgctgcccgccatggtgcagatcgtcatcctgctggtcaacgggaatctgggcaccggcgtggccgtggtgggcgcgttcagcctggtgcggttccgctcggtgccgggcagcgcccgggaaatcagcgccatcttcttcgccatggccatcggcctggccaccggcatgggctatgtgggcgtggccctcttgtttctgatcctcgtcgggctgatgaccctgctgctcacccggctgcggttcggcgaaagccgggcccaggaaaaggagctgcgcatcaccatccccgaatcgctggattacagcggcattttcgacgatttgttcgccaagtacaccaaacgagccgagctggtgcgggtcaagaccagcggcatgggaagcctatacgagcttcactaccgcgtcgcgctgcgggagccggtgattgaaaaggcgttcctggacgacctgcgctgccgcaacggcaatctgaccatttcctgcgggccggtgtccaccgtgcgcgacgagctctgagaaaggagtgtgtttatgaacacccgaaccattcgttttctcagcggactgggggccgcgcttatcttcagcgtatctctggccggctgccgtctgcttgggaacgccgagggttcgtccgccatgacaggcggcacgagcgccggagacacaaacggcggagaaagcgccgccggctccggcgacgggagcggcacaaccgcgtccgccgcgccggtggaggtcacctatgggaccgaggacacctccgccgcctacgacgctgcgtccgccacggccatcgtgttcagcggcagcaccatgtccatccagggctccggcgcttccgccaaagggagcgtcctgaccatttcggcggccggcacctatatactcagcggcaccctgaccgccggccaggtggtggtagacgccgggaaggaggacacggtgcggctgatactgaacggcgtgtccatcacctgcgcgaacagcgccccgctttacgcgaaaaaggcggccaaaaccatcctgaccctggccgacggcacccaaaacgcactgacggacggcgcatcctacaccttccccgacgccgaaaccgacgaacccagcgcggcggtcttctcgaaaaacgacctgaccatcaacggcggcggcacactgaccgttaccggccagtacaacaacggcatcgcgtccaaggacgtgctgaccatcaccggcggcaccatccgggtaacggccgcgggcgacggcctgcggggcaaggacggggtcgccatccagaacggcacgttcaccatcgacgccgggaccgacggcatcaaatccaccaacgacaccgacgccgacaagggatggatttctctggacggcggcacctattccatcacggcggccaacgacggcgtacaggcggaaaccgtcctgcagatagcggctggcacctataccctgaagaccggcggtggcagcgccaacagcagcaccgacagcaagggggacgcccggcctggctggggccagtggagcgccggcggcagcgaaacgacggccgacgcccccagcgccaagggcctgaaggcgggcgcaggcatcctgctgaccggcggggtcttcaccgtcgattcctccgacgatgccattcactccaacggcagcgtcgccatatccggcggggaatataccctgacctccggcgacgatggaattcacgcggacgcggccctgaccatcagtaagggcaccatccgcatcaccaagtcctacgaagggctggaggggggcaccatcgacatcagcggcggcgacatccagctcaaggccagtgatgacgggctgaacgcggcgggcggcagcgactcctccgccatgaacggccgtccggggcagaatgggttcagcatgggaggcaacagttcctattatgtccgcatatccggcggcaatttgctggtggacgcggacggcgacggtctcgactccaacggcaatctgtatatcgacggcggcaccatcctggtctgcggccccaccggcaatggaaacggcgcgctggattacgacggcagctgtgaaatcaccggcggcattctggtggcggcgggcagcgcaggtatggcggaggcccccggcagctcctccagccaatgctcgctgatggtcacctattcctcgacccagccggtggggacgccgctggccctgacggccgctgacggcgccctggtcgccgccttcgccccctccaaggcttatcaaaacgtggttatcagcgctcccgcgctcaaacagggcagcgcttacgccctgtataccggcggtaccggcactggggacgcggccgggctgtacaccgcctactccggcggcgcaaagctgtgcacgatcacgctgtcggccatcaccaccagcgtgtcggacagcggccaggccgtgtccggtggcatgggcggcggcatgggcggcggaggcggccccggcggtatgggcggccggcgatagtcttataaaaaccgcaaaggccagcgtgggtttgccacgctggcctttccttatgcccgtccgtgggctggtatcgattcctcgtatgccatcacgcggttgcgcccgttgcttttggcggcatacaaggccacgtccgctcggcgaatgagcaattccatatcggtctgccaattttccagcacggacacgccgatgctcaccgtgacgcagccgagaggcacgtcgtcccggcggaagccgctgtcctggatgctctgccgcagtttctcggcctcggcccatgcctcccgcgcctcgcattggaacaggcagatgaagaactcctccccgccgtaccggacggcgcaggcgtttttatcccggataaacacttgaatatcgtcggcgatgcttttcaagcagctgtccccggccacgtgaccataggtatcgttatactgcttgaaaaagtcgatatcaaccatcaggcccgccgcaagcgtctgtcctctccaggcggtttcctcgggcagacgctccagatagcggcggttgtacatctgtgtcagctgatcggtcacggccatccagttgagctgctcgttatacaggcggatttccgccacctgcttttcaataatctgcttatcgcggaagctgaacaccttgctgcgatacacaatgacggagatgacaaacgccatcacggcaataaaaagactgttgattagattgctgtagacattgtgggtgcccccttgcgtgatgggaagcagtagattcagaaaaacgaaatcgccgccgaaaatcagcacgccctgccagggcttcagcagagaaaaggccgccgccgacagggtgacgtagctataaacgttcaagccgccgtcaccccgctgatccagcagggtgatgcagcaggcccacaggcaaatcaagccgatatatgtggtttccacacgcaggtaggccgcgcttttcggcggttttcccttgtgcagacgccgggccatcagcaacagcaccagggtgacggtaaacagcaggatatacaaaacccagtacagggtgcgcctttgtgagtaaaacggcccccctgaccggaaggtggtcagcagaaacatgagggcctgaaaggccagaatcaatatgccgatggtcatggtcgttcgatgcgtcgactgcaccaaagcctgttcaatggaagcccggcatgactcctccaaagggaaccccagccacctgcgtatttgctcgcgcttcatgtacctacccaccccccagccacgattcgaccggttttcctccggttcgacgacctttatactcagtatatgctgatcagtataccatttccacacagaaatgtcgacataaaatacgtcaatccgcacggtttttgattgatcgatcttgatgaatcaaaaagaggggaaacgaactcatcgttcgtttcccctccccccttcaaaattcccccccgaaatttgaaggctggttcatgagcgctccatgactgtcccgcccgaatcagcggtgctggagcagggtatacacatcggtattcttccacttccgcaacgccgacacggtctccacctcaaacaggcggcaggtggattcgttggcatcgtccaccctgtcgagcggcagttccagaaccggaagcacgccgattttggaaaagctctgatattcctgcgcattgacggcactgagcagcgtgttgaacagcacgtcgtgcatacgggccgtatgctgatagggcggcacctcgtccaatgaccggtcgtaattggcgggactccagtattggggcagatagccgccggcctgcagctccttcagctccaggttgcgcgaggccgtcaggcggaacacccgcaccaccggcacgatatggcccggaaaatatttctgcttgcgcaccacatggacgaagaccagctggcccgcatacgcttccgccgcgccggacagccggtaggcaagcacgtcgcccggctcccagtcgttgacaaagagctgataggttgccaccttcttctgctcgggctggggcgcctgcagtttgctttccaggcggctgagatactccatctgcagcagatactgccgatcggaaccccggcgctccatcgtcacctggcggcagctgtcgatcgcccgcagcgcgttggttttcacctgctcggtcagccggccgtaattccacatgatatcggccagggccatccaaaactccctgccgaactgggtgtctttctgatcgcccgtcatgctctgcagctctttcactgcctcctcaccggtttttccctggcgaagcagttccacaaatcgattccggacaacagccgcttgttccgaacgccccaaggacgcctccagctttttcatgccgcctctcactcctcgtaacgaaatgccatttggcctctatatatacaattcccgccaaggcaaaatcttacaggagattttataaaaacagcattgttaccagaaaagtgcgtgaaaccgccaaaaaacgcggaaaaccggcacttttagccgcaacttccccgcaattgcgtcagggcttcctcgatcatccccaaagcggcgcaggtatcctccggcggcgcttcgacgaccgcgtccgttccaccggcgagcaggcggccaaacgcttcaacctcatagataaagccatcccgatggggaaattcctctgtacggacaaggccgccctccgtgaacaggcgcacctctctggcgtcatacatccggggcagctcgatccagccggccgtgccgtataggcgggccgcctgatcccccatttgatcgccgccgcaggtcatcatggccagcacatcccccgggaagcgcagggtcagcgccgcgaagctgtccaccccgccgggggccagccggccttccgcccgcagagagcgatattcccgccccagcatatggataagcgcgtgacagccgtaaatccccacgtcccacagagcgccgccccccaattcgggagcgtacagccgggacgccggatcatacgggctgttgaaacagaagtccgcctgcatactccgcagttcaccgatggccccctcctgcaccagctcccgcgcgcggcgccatgccggcagataccgcgtccacatcgcttccagcagcgggacgccgcacgcctccgccaggtcaaacagacggcgcgcctccctggccgacatggtcagcggcttttcacacagcacggccttgcccgcccgcaggcacagctcgacagccgccgcgtgggcggggtggatggtcgccacatagacggcgtccacctccttgtccgccgccagctcctcgtacgacccataggctttgtccgcgccgaaccgggcggcgaaggccgccgccctctccttgtcccgggccgctgccgccaccagacgggcgtccctcgcctctggaatcaccgcggccatccgccgggcgatgccgccgcagccgagaattccccaccgtaccatctgtcccatctccttttctgtttataacaaaaaccccgccggagccggcggggcgtttcggtaaaagaatgagcgggcctgtaagccgagttctgtcgtgaacagccatctatctcgaccatatgttgccacatggctctagccgcctgttgaagcacatcgggccaatgtatcgcttcggtcggcgttgctccggatagggtttgcagggccgcacagtctcctgtgcgccggtgagctcttacctc

SEQ ID NO: 2103 - DNA, 27059 bp, Unknown
  16S sequences of unknown bacteria
atcgacgattaggttataataggagcaaggtcagaaagccttgaaaacactggtgtttcgctgattttgtccaactttcacgagcaaaaagtgagcaaagctctttgactgcggtaagctgcaaccgcaaccgtgaaaggaggcagcagcataaaactgaatatcatcgggaagccccggtattgcactgcgcatagcagaacaataccggggcttttcttttttcaatctgaaaatggaggtcgtacaaaatgtattcgattcttattcattatacccgaaaaaaggcgggaaaggttacaaatttataaaccttttgcggatattccgcaaacgcgccggccttcttctttgattataattgtcaaaccgccgcttgtacaggggttggccgaaaaaagcccccgaacgcgcccaaagggtgccgggcggctgggtaccgatctcaaaaaaggcggatggctgccggcagccatccgcctttcgcggggaggatacgaaaaagagaagttttccttactgcttcgccgccaaaaattcgctgcgctggcggttccactcttccatgtacttgctcaatccggcttcttccagcttggcgacgaactcttcgtaggtctgctgggtcgcatcgcggaacatgcccaggctaaacgaggtctgatattccgtcaccagcgcggagatcaccgaccactcggcggataccggcgtgtagtcgaaggtaaagccccaataaggccattcctcgtctttgatctgttcgctgtaaatgcggtcgttgatggcgttgatacgctcgtcgtcacaggccggccaggcgaggttggcgtggaaaatgccccagttccatcccaggtaggtgtaattgccggattccgggccgggcgaaaccgtattggtctgctcgtcatagaagtaatggcgcccttcaatgccgccggccagcagcatgttggtatcccagtcggtcttgatgtaatccagcacaacggcagcccgctccgggattttggaaaaggaggtgatggcatagccgtcgccgatataggaatcccgcaggatccggtacccttccgggaaaatgtcgaacaattccacattcatccccttggcccgatagttggcgacgctggtaatcccgttaaagaagttgtccgtagaggcggccgactgcccgttggcaaacaaggtggccacggaattggtattggcgatggcgtccgaaggccatacgccggccgccgcgtattcggccatcagcagcgcgtattcttcataataatccgaggtgtacaggaaaaacggatgttcaaaggtcggatccgccatctgcgcatagtacacataatcagatgcctggttgttgatcaggttgttgcggaagatcaaagacagctgctgcagggtgctggaggaagaagcataaaacgcatacatcccgttttccgcttcgttgtcccccaccgctcttaaaaaaccgtcgaagtccgcatagctgttgatcttgtcggcggtgtacccgtatttttccgcgatatccatgttgatggtggggccgcggtccggggcgatggccgccgtgttgcgggggatcatgtagatcttcccgtcgatgtacgtttcctcccaggcggaatgcggcagagtcgcccaggtttccggcatgtatgtggacaagaattcttccgaaagctccttaaagccgcccttttcggtctgttccttgtaatagcagtaattggccgtgaagatcaaatcgacggtatcgccgccggccataagcagcgggtacttctgggcgcgctcagaagacgggataaagtaaagctccagcgtggtattgaccgcctccttggtgcgctgattcaccagttccagcacttcctgcatcgcattgggctcggtagcacaggcgtacatgaccacgttggcttctttgctcaaatctaagtttgcatacgggctctgctcgtcggcaaccgccacggaaggggtgtcgtccgccaggccggtggaaaccggggcggcctgcccgcatgcggaaaagcaaagcagcacaaaagaaacggacaggaaaatagtaagccactttttcataaaaaccacctttcttcatcatgaaaacagttgatccattctaaccatctgccgccggcgcctgcgccgcggcagcgatggcaaagcctgattgttcgctgaggcaagacgcctcaaacctgttttgcgccgttttctgtacgggcaaagacctcttccatccagcgcaccgtccgttccaaggctttttccggctccagctggtaatttccgtgcatcacttccggcgtgataaacccggcgtacccggcgtctgccaactgctgcatctggtcagccagatgcagcaccccgtcgccggggaccagatgcccgccgggcatcccgtccaccaggtgcacatgggccagcttgttgtcgaacgcggacaagaaatccgccaccccttcgccaatgcgcccggccatatcggtatcgaccatcccccctacattcggcagcccaaccgcctggaccagggccgccgcttctttggctgtcaccgccacattggaggacatttgggtcaaatgctccatggcgatgcgaacccctgcggaatgagcgtattccccaatctcccgcagcgcctggacagagcgttcccacgcttcctgccgggggcggtcgaaataccctttgccaggcgtgaccagcatcattgggcaatccatgatccggcaaaaatccacgccacgcttaaaataatcaatgcttcgccggcgcatcaccggatcgttgcaggcgatgttgatcgggtacatgcactgttccggcgtgatgcagatcaccttcatgcccttctccgcgattttttggtaaaaacccttggcccgctcatccgaataatcgtaaaaataaaagtgcggccccgccccccataattccaaattttgaatgtgcaagcgctccgcgcaggccaagaaccggtcaaagctgtacagcggatgcgcatagttgccaatggaaatctgcgatcggcgcaatcccatctgaaacacccctttctatgcttttgatgatggacgcgggccgagcttctgcccgaaggccgtttccagcacccggagcccccgctccaggtgttcctcgggctgttggtaataccgcccggcccccagttccagcgtgatggcgccggcataatcccaccgctccaacgtgtccaaatgctcccgcagcggctggtcgccgtcgccccaggtcagatgcccggtaggcgtgccgtcattgaggtggatgtggacgatccgctggcccagcgccgcaaaataatcctccagcgttttcccctcccggcagacggggacggtgtcgatacagcacatcaaatgcggatcgtcaatctccttcatcatccggcaggtagacgccaaatcgtttaccaggttggattcgtttggcaacaggatctcaaaggcgagggtaaccccgcgcttttgcgcttcccgggtcatcttctccagcgaatccaccgcatagcgccacgcttgttccaccggctgatccagcaatccccagccggggccgcaaagcattttcggcgcctccagctcggcggcctggcggatccagccgcaaaaataatccacgctcgcctggcggaagtcgtcctgtgccgaagcgatattgtaagggtaaatacattgttccggcgtcacgcaggcgatcgtcagcccccggtccgccgccatccggcgaagcgcggcggcagacggcccgcactgggtcggatagaaaaagtgcggcgcgccgccccaaagctccaattgggtaaagcccagccgggcggcggaatccaggaacgcgtcgatggaataacggctgtaatgcatattcatcgccgccagctgcgtgatctgcaatttcctcatgtggtccactcctttccttgttgcgtctgagtgtatactatcgggtaacccgcaggtcaatgggtttgtcaaaattcggcaatttgttgatatctgttccatgttttttgttgattttgcgtattctcccgggccaatcctttacaagaaatggatgaggctctataataggggtatcaactgcaaagtaggtgtcagcatgagcgaagagaacaaaaaattccgcatcggcgaatttgcccgggtcaacggcgtgaccaagcacaccctgatccactacgacgacatcggcctgctcaccccggcaatcacagaggaaaacggctaccggtattacatcgacaagcagtattcggacttttccaatatctcccagctcaaagagctcggcctttccttaaaagagattgacgaatacatccaccaggatcattttccccagcgggaggagatcctgcaaaaccgcatggaggcaattgagcgggaaatccagcggcttaccaatctgaaagacgccatcgcctgctaccgcaaacgggtccaagaagcgctggccaccgatccgggcgcggtaaccatggagtttcgcgaaaccgaatacgggtttttcagccgcaacctgtatgaaaacggcgagagcttttcccattcccgggcggtgttttcccgcttctgccgcgacaaaaacctgttcgaatgccgcgggtgggggaccctcatccccatccactatgaaaatgggaaatggctgtccatctcctcgcatatttacgtttacgccgaccgggccttccaccccgacgccgtcgccgtgcatccccagggctactacctggtgacctaccaccaaggggacccgagaaagctgtatcaaagcttcctgcgggtcatgcattacgctgagagccatcatatgaccatggggaaattttgctttgaggaatatgtcctgggcagctttaacaccacacagccccaggactatcggatcaaaatcctgataccggtcttgtaggcattttgcgggatgcggcctgtttttcccccgcgccgcgacaaacgcggcgtcgtccgtttggcgcttgtggttccgcctaatcctggaaaacaagggcaaatgcaccttgagaaaacgccggcgatgtgctatcatgggcaaggaaaggcgggccgtccgccttgcacaaaacaaggcgcggcaccgaaacgccgccgaaacgccccggaaaatacaagaaaaggtaaggagatcgaaggaattatgaaattaggtatcgtgggcctgcccaacgtgggaaaaagcacccttttcaacgccatcaccaacgccggcgccgagtcggccaactatcctttctgcaccattgaacccaatgtgggggttgtggcagtgccggaccggcggctggacgtgctggccaaaatgtacgatccggacaaatacacccctgccatcatcgagtttgtggatattgcaggcttggtcaaaggcgcctccaaaggcgaggggctcggcaacaagtttctgtcccacattcgggaagtggacgctatcattcatgtggtccgctgtttcgaaagcaccgagatcatccacgtagacggcgaaatcggcccggcccgggatattgagaccatcaacctggaattgattttctctgatctggacgtgctggaccgccggatcgacaaagcgcagaaagcggccaaagccgataagaaatacctggaagaggtggagctgctgcagcggctgaaagcccatctggagcagggaaaatccgcccgctcgttccagactgccagcgatgaggaagagcagattctctcctccatctctcttctgtcctcgaaaccggttatttacgcggccaacttgagcgaggatgattttctcggctctttagaagaaaaccccttttaccggcaggtctgcgaaatcgctgcggcggaaggctcgctggtactgcccatctgcgccaaaattgaagaggatattgccgatatgtccaaagaggacaaacagcttttcctcgacgagttggggctggaatcctccggtctggaccgcctgattcaaaagggttacgagctgctggggctcatttcctatctgaccgccggcaagcaagaagtgcgcgcctggacgatcaaaaaaggcaccaaagcgcctcaggccgcaggcaaaatccattcggattttgaaaaaggctttatcagggcggaggttgtagctttcgacgatctggaagcctgcggttctatggctgccgccaaggaaaaaggcctggtccgctccgagggcaaagaatacgtattccaggacggcgatgtggttttgttccgctttaacgtctgatttgttttgcgccatctgtcaaaaacataccccggccgcacccattgggtgctggacgggtttttttatcccgtccgccggcctgcctgccaaatccccttttgattttggccgcaggccgcgcttttcttctgtttttggcttatcggtcataatcttcaggccgatattcttccgccagaatcccgtataccgctgcatctgcaactccccggttattgtagtccgcctgccgcaatgtcccctcatagcgaagaccgcttttgaccattaccttccccgaacccgggttgttcgggtcgtgctgcgcgcagattcggttgacccccacctgctcaaagaaaaagggaataatccgccggaacgcctcggtcacaatccctttccctcccggtcctttcttttctgtgccgccagcttgactgcgaaaaaaacggccgacaccaaaaggctgccaatgccgcatcccaatacggtccagccgaacccggccgccgacaattctccccgctgccaattggccagcgtaacgcccaatacggttccaacccaactgccaattccaattcccagcacctgcccgagtatgctccgaaccagttttttgctctccatccgctcaacttcctttttctgttttcttcatcatagcaaaaaataccgccgcatgcaaaaaaagagccgtttcggctctttttttgccggggtgctgttttccaatgcagatcgattatagaactaaaataagtataataataccgaaatcacccattttttcaactcttccattttccttcctcctttgtggcttatgttctctctctttgtaaactaaaacgcccaaagcgggccttttgctacaagaaaaaaatttttttcttgccctgcttatcataaccttcctttccgtcaaaaaaacgaaaaggaagcgtttttcccctttctcttcgcattttttcaggaaatcacttcgctgaaaggctctttcgatcccaaaaggggaacctcttattattatggtgcgtttttcctgtgcattttttgcatgaccgcaaaaaaacggtcctttccacaaagcccattttcggcgaggaaagccttgcgtgcatcctcttttgattccaattaaaaaaagagcggcgaaccgctctttttttagaaagaatcctttttggaccagctgactccgggcagcatgtccttccgaatctgccgggaaacactcatcatggttataatatccgtaccgccgctgaccaaaagcccgattcccaaaatccgaaccatcatcgtcgcggcagaaaaaggattgaacaacaacagcacgccaaagccaatggttaaaattgcataaaacatcacaatgccccagccgcgatattgcacctgcttcagctccaacgaccgctgcagttttaccgcgccgtttacggcaaacaccgctcccatgaccattgggatcagcccaatgatctgatccgccttgactgctaccaaaagcgccgccaataccagcaccagaccgattgccaaatccattcccgacggcagactctgtctgcgcccgctgagatagctcaaaagatagctgaatgcccccagcagcaaaaccgccgccagcaaatagcaaaccgtccgggccgcaatcgcgggccatcccgctaaaatcacgcctaaaaccaccgatccgatggaaatagcggccgcattccattttaatgttttccaaaatcccattgtctttcacgcccctactttcgaataaacaacacgcccaaggtgttgggcccacagtggctagatatggtgcatcccgcctgggtttccacaacttggctaaatccgccgtattgcttcacactttttttcactgcctccaccgtcttggcatcacagggggtgtgggtcacaaaaatacggtctttcaccaaatcatcccgcccgtccaaccggtcttttacataggaaagcaaacacttttcaaacgggccgcgatattttttgcccactttcattttcccgtccacgacctcaatacagggctttaaatgcagcagattggcgcccagcgccgccaaagaggagcagcgcccgcctttatacagatactccagactgtcgatcaaaaagctggcctctacccggccagccaattcctgaagccgccggacaatatcctctgcagccagtcccatgttcaccaggcggaccgcctccatcaccacatggccgctgccagtggaaagattgcgggaatccaccggataaacgttggaaaactgccgcgccgccagacatgcattttgataacagctggaaaattcggcgctgatgttgatatggatgactgcgtcatactgagaagaaagccgggaaaagcaatcggcataatccgcttcgctcaccgccgcggttttgcaaggatcgtttccctgcgctacaaaatcaaaaatatcctgcggcgtaatttccagcccatcgcggtaggatgctccgtctttgaccacatacagcggcagaatttcaatgttgttttcttccatcaattctttggacaaatcacaggtactgtccgccgtgattttaatgttcatgcaagattccctcccgaatccaaagcacctgtcaactttttttcctgatcaggttttatgctattttataaaaatagcataaagagaatcttccgtcaacttttcccatattctgctttttcaaaaagcataccatatccgttttgatgctaccttaccattcttttctgtctattctgtgaaaaagagatggaaaacagatgcactctttgaaaaaacacccctgctgccaaaacaatccgcttgtacctttttcccctaatacgaaaggcaagcggcgtccggctttgcaaaggcacaggctgcggtgggaatggaggctgcaaaggtattctcccggcaaacggcgccagacaagcctcttattttccctgtccgaacaggtgccgctccggcagccgcataagccaaaaaccatctgcaagaaaaattttttcggggtctctgccgggcaaacggctttgtctatcaccttcccgccagctggcagaaataccccgccggcaaaaagtgccgggccgcatccggcccagcaacttgcttcgatatcatttatgcctgacctgccgcaccgcacacctgaattttctgctccactagcttttgtacgctttttcgaccctggtccagatattttttggggtcgaacccctgcggttcctgcgccaaagcccttcggactgcctcagtaaaggtctgccgcagctcggtggcaaaattgaccttggccattcccttggccacagcttcccgcaccactgtgtccggcagcccggaagcgccgtgcaaaaccagcggcagatccgcttgagtctggatcaagggaatcctggcaaaatccagcttcggcgccgtgtggtaaacaccgtgagccgtccccaccgccaccgccagactgtccacaccggaacaacggacaaattcggcggcttccgccggatcggtgtaagcccccgcctcggccgtgagggaatcttctttcccgccaaccgtgcccaactccccctcacagctggcgccgcaggctttcgccatctgtaccgcctgggcggtcaggtctgcgttctccgcaaaaggcagccgggacccgtcgaacatgaccgaagtgtagcccgcgtccaggcattctttcaccagctccaggctgtccccgtggtccagatgcagcgctaccggtaccgcagcatttttggcagcggcagcagcaatccccgcgaaacaggccggcggcagataacgcagcgtagaaggcgttgtctgaaggatcaccggcgctttgcatttttgggccgccgccacaatcgcaaagaccatttcagcgttttctgcattgaacgcacccacagcatatccgccgtccctggccttatccagcatttttttcgtatccgtcagcatgattcttcttttcctttcccataatcaatttttaccggcccggccagttgtacccgctgcggcagcacctcgcactcaaacgccagcggaaccacgccagccttctttgcctgcagcaaagcctcaccgaaagcgggatgggttttccagttcggcgaaaagccctggattccgctcatttgaatcacaaaaacgacatagcataaatacccttcttctgccgcccgggccaaatgttgtaaatgcttcacccctcgctcggtaggagcgtccgggaatctggcccagccgttttcctccagtgtcacgccctttacttcggcgaaagctcttttttctccctcctccagataaaagtcaaagcgggattccccgtaaaaggtctcggggcgtatcacctgcggccgccccatccctggcagtgacagacggctcgcgcgcagcgcttcttccaccagccggttgggcgcctgggaatcaatatgaaccagacgttttcctttttgcacatgggtcagcgtgtattgggtttttcgccccggtgccggctggtgctgcaaaaacaccgccgcccccggcgtcaacagttcacggcagcgcccggtatttttgacatgggcggtcaccggatgcccctccagcatgcagagcgccacaaaccggtttggccgttcgataaaaacggcaggtaaaacctgttgatactccaagattttcttctcctttgaaaaaagaccgcaaaatataaaaggccatctacaaaatacttagggaaagtgacaaaaatccacttatcctttcgttggtaattccgatttttgtgtttttgcacaaaaaatcatttacaaatccactcagtatagctataataaactcatcggaacaacaacatcaaattagattcctcatcttattgcttctcctaatagataattttaaccgggaaaagggctgatctcatcaatcagcctttttttccgtccattttcccacgatggcgattgttcagggcagtcatgcccggaaaataagacaggattttatagttttttccaaaaatatctattttcctgtcctctcgttttctcctgtttgcccttcttccgcgccggacagatcccgcagctgctctgccaaccgatccggatggttggtgatgatgatgtccgcccccaaatcaatcaggcgacgcatctgctccggttcgttcaccgtccaggtatgaacgcgaaggccctgttcttttaaccgctccatattctcctttgtcaggtaccaatgcagcgggtgcacgcactccagccccagtcccttggcatatccgccgaaattcacgatccagctttcttccagcgcgccgcagagaatctgcggcgcaatttttttacaccgcagcagggtgtaatggttaaaggaagaaaggatgactctctcctgcattccggcgctaaaaaccatctctatcgtcttttgctctatcccgggatattcacagacattggtcttaagctccagattcagccgcagcccggttgcttcgcaccattccagcacttcctgcagcgcggggattcggttgggtcccgccacgccgcgaaaccggccggaagcgtccagcttccgcagctgcgcaaaggacagctcgcccacccagccgctgccgtcagtggtgcggtccacctgttcatcgtggattaccaccggcacgccgtcagcgctcagatgcacgtccagctcaatcccgtggcagcctgcttcccgcgccttttgaaaggagagcatggtgttctccggataagcggcgctaaatcccctgtgggcaaaattttcggtcatttgcgtccccttctttccgattttcaccatatcataaaaccgcgccgctgtaaagggaccggctcaggccatccccttgccagcaaaagggaagccgggtataatgaatacagatttcccctcatacgaatggacagtcccaaaaacagaaaggtcgttttttcatgctgattgattctcatattcatgtctttcccgacgctttggctcccaaggtgatccccaaattggcggcaatctccggctacgacaatcagaccgacggaacgctggcctccaccttggaaaaaatgcgggaatggggggtggacaagggcgtttttttcagcattgccaccaagccctcccaacaaaaatccatcaatgacttctgcgcctccatcgcctccgatacggtgatccctttcggctcggttcaccctgacgcgcccgactgggagcccgagctggagcgtattgcggctctggggctgaaggggatcaagctgcacccggattatcaggatttcgatatggacgagccccgcgtcctgcccatttttcaaaaggcccgggacctggggctgtgcgtggcggttcacgcaggatttgaccctctttctccggaacatatccattgccgcccccgcgcctgccgccaggtgctggacgcctgccctggccttcggctgattctcgcccacatgggcggtatgcgcctgtgggacgatgtggaacgctggctggtgggcgctccggtctggttggatactgcccgctgcgccggccaaatcgacccgcttcagctagaacggatcatcaaagcccacggcgcggataaaatcctctttgccagcgactgtccctggagcgacccccgccaggaaaaggtcatgatcgaagcgctggatctttccgagccggaaaaagacgccattttttccggaaatatccgcagccttttggggctgtaatgttgttttttccgccataaagtgctagaatatggctaccggccggcaaattggccggtcgatctttggagaaggaggctttttatggcttttttcaaaggctccatccgttctcagtcgctgggcatggataccggacttacagtggtacttccctttgaccgggctgctgtgccggaaacggaatgtcccgctgtttacctgctgcatgggcacggggaaaacgcggatgtctggatccgtatgacttcggcggagcgatatgccaatgcctatggcgtagcgctggtgatgccggaggtgcagcgcagcttttatacggatatggccatgggcctttcttatttttcttacgtcacgaaggaactgccagatgcctgccagcatctgtttcacctcagcagccgacgggaggaccgctttgtggccggtctttccatgggcggctatggcgctctcaagctggggctgcgctgtcccgacctgtttgcgggctgcgccggcttttccggctgcctggatatggaagcgctgcgcgctactcttacgcaggtggattccggcctgctgggagaagccaaagcgatttttggggaagatcttgtaataaaaccggaggataatttgttttatctggtagaaaagactgccttgctgccaaaagcacagctgccaaaggtcatggtcacctgtggaacggaagatttcctgtatgcccataacacccgtttcagagataccatccaggcgctaccctatgagttttcctaccgggagtggcccggcacacacgaatggggtttttgggatcaatccctccagtacgcgctggaatttttctttcctggccgccgggaagttttgcaggccgccggaaagcactgaggcttcctgttatttcacataagaaaggaatcttgtctgtatgataaaaatcaatcggattgtctccctgctgctggcgctgtccctgttgggcgccctgctggccggatgtgccggttcttctgccgaccgctgcgttaaagtggaaggggataccatttccatcccgtccatgcgcatttctttttcttttcccgctccgtggtttgtagtaacggatgaagagttggatgccatctcgcaaaacaaggatctgctgaacgattatgtggatgtagagggcaacctggttcattcccgtccggaaacctatactgcagagcaagtgcttttgctcaacggcaaaactttggaaacctgccgcatttccgccaaagaggatctgaatgaatacagtttggaaagctttgcctcttccctgtttgatcggatgcaggaggatatggaagaaatttctctgccgcagacttggagcattgggaaatgtaagggctatacgatcagtgctgtgcccgcggattctcccattcattataaatactattatctacatgaaaaaagcacttttgtggaaatcatcacaggcggatattccgaccacgtgaaagctgaggatattatcgaatcataatttctcttaccgccttttgccaaaacgctttgacaaagcacaaaagcttcgggacgcagtcttgtccccgaagcttttttctttccgccgccagcaaaacctgcattcctccattggactggattgtgccgaaatgatttttattttccggacatcacgccctgaacgccgccggtcggatgcatcccacttcattctgccggcgcttttttgcaattcccttttgggataaaaacaacggttttgcacaagaaaaaagcaggaaaaaacgataaaaatatcatttttcctgccaaaacaatcccaagcattttccgctgttttttttacagcgtttccggttcgccgatctcttctccaaaggtttccaccgttactttggccatccgctgatcctccagcggcttgtccgacaaattccgtctgaccgatacaatccggtccgcttcttcgattccttcgatcaccttgccaaacgccgcataactgccgtccagatggggcgcgtcgtccaccatgatgaaaaactggcttcccgcgctgtccggccgggaagaacgggccatagaaataacgcctttggtgtgcttcagcggattgtcaaacccgttggcggcaaactctcccttgatgctgtaccccggcccgccggtacccactccctggggatctccgccctggatcataaatccggggataacacggtgaaagatcacgccgtcataaaatcccttcttcaccagcgatacaaaatttttcacagtgttcggggcgatatccggatacaactccactttcattttatttccgttttccatttcaatggtagcgatagggtttttcatgggaatgtcctcctttttcaatcgtatctataagattttttccatgacaaaattgacaaatacctgcccgcgcagcagcttttcctgccgtttgaccacccggtagcccctatgctcaaaaaagggccgggcggtaatggaggcctcggtatccatacggcggcatccctggcggacagccgccgcttccagccggtggagcaaagcggacgcaacccctttgcggacagaatctttccgcacatacagccgatccagatagccattctgcgccaaatcgccgaaccccacgatccttctctcttcccaggcaacccaggtttcgtgctccgccaaagattgttcccaccgggaacggtccatctgccgcggcgcccaggcatctaactgctccgggctgtaatccgcccggttgacaaaatgtacggtatcgtaaaacagctggtaaatctcctccaaatccccaggccggtaaattctaagcttcatttttccctcctgatcgaagccgctgctgtcccggcggctttttcctcgggcagatactcgcctggcgggatatgctgccgtcattttaatggaaagtatttccccattacggcaactgttttatttttccgaccacaactgattccacaaagcgaaaaaatggtgtgccgcataacccaagcttgcgccacatcatcgctttggagcctccgggaatgcccggatttccacttacacaaaaaacagcctgcaccgcgctttttacagcgcccacaaccgtttcgcccccttgggcgaacgcggaaaaaggattgggagccgcgctgtaccgcatctgtctttcagttattataccacaatttctttttatatgatagaataaaatcaccaaaataagctttttgccaaaggagaaccctatgaaactttctatccaaaaagcacttttgccggatgctatgcccattgcccggcttctcgatgaggtgacagtccagctgcatcaaaaggggattttgcagtgggaacacccttgggatccggataaaatcgggcaggacatcctgttggaacgggtgtgggcatgccgggacggcaaagagctagtcggcactttttcgctgcggccgctgctgaccgccttatggctggaccgccgggcaaagcctgacggccaatggtatttgtatcggatagctctgcgcccctcctgccagggcagcggcttgggcacagagctcatccgttttgcctgctgtttggcagaccatgcgcaaaaggatctttatttggattgctgggcgggaaatcacgctctgcgccgcttctattcttcggcaaattttgatacagttggtatatttccggaagaaaattaccaaatatgcgtcttttcccgccatttccgcaaagaagggtagtgagaaaaagggttcattctgtccgaaatatttaccgtttggttcccgcctggctgctttggctttccctttgcacatttctacccccatcccggtcatctgcgctttttgtaatcggaaagccagctttgtttcatgtgtaaggctaattatctttacaccttatttgccgtttgcctttgaccgggatacgatttctccctttttcatttggactgatgggcaatgacttcgtcaatttcacgtcgcgttgatggaagcagaaaaatatgataatgtaaataaaaagatagattggaatttatggagaggatgaaatcaatgaatgatttaaaagaacttgtaaagttatataaagaacacccaaatgctaattgtgattacattagtatcaatggtaattggtgcaattttaggtgcagcagcattttataatggatggttaggttaaaaaacaaattacaatttttcgagcagttgctatctgtgaaataacctcctttcgttacttcgacggaaggaggttattggtatcctgaatcagtccaaaaggtaaaggaaagtatgattttggcagaattagaaaatcataaaggaatgcccataataggagataaaaacggatcgacaaattttacggaggaaaaaatgaaatttgcatttttaatgattggaaattttgattgtgaagttgacagagcaaccatacatcatgcctaagcccaaattatcggggtggccaatatagaagaagcatgtacggttgctaaaaagaatgaattgactacattgagttatgcggtgcatttggcgaaactggggcaaaaataataatggaagccacggaaaacaaattgccgataggctacgttacgcatttaccggaacaggatgacgtgtatcgggccgctttttcaaagtgataaatcccaattttatgaaagatttgaaaaacttttcaaccagtaaaaatttttgcaatgccaagggatagccgaatggatagcgaaaaacaaaaattccacttgggccaaaagacatacgcgaaaaaatccgcaaaaaaacggatcggttttaccggtccgttttctgatttggcacaaggaagatcaggtcatggcataaggatccagcaatttgttgatctcctcttccgtaagcaggttgcggctgatcagcacatccttgaccgaagcgccggtacggatggctgttttggcaatatccgccgccaccgaataacccacccgcgggcaaatggcagtgatgatgccgacactgtgatccaccaactccttgcaatgctcctcattggcggtaatgtcgcagatgcagttgtcggtaaaggtctgaacgccgccggtgagggtcgtgatggactcaaacaatttatagaagatcaccggctcaaaggcattgagctccagctgtcccgcctccgcggccatggtaacggttacgtcgttgccgatgatgttaaaggccacttggctcatcacctcgggaatgaccgggttgaccttgccgggcatgatggaagatccgttctgcttgggcggcagattgatttcatggaagccggtgcgaggtccggaagacatcatccgaaggtcgttggaaattttggacaggttgaccgcgcaggttttcatagtagaagaagcggttacaaagcagtccaggttttgggtagaatcaatcaggtttttggcctgccgcagatccagcccggcaacggcggagagattggagacaatggcgctgacatagctttcatcggcgttgatgcaggtgccgatggcagtgccgcccatattaacatacatcagctcatcggtgatatgggtcatgcggcccagatcccgctccaccacggcgcggtaagcaccaaattcctggccaagacgaatcggaactgcatcctgcatttgagtgcggcccatcttcaggatatggtcaaactccttttcctttttccgcagcgcgccaatcagacgggtgagctggaaattcgccccctgcaaaagcttgatagcggtgatttttcccgctgtggggattacgtcgttggtggactgggacatattgacgtggtcgttgggatggacaatggtataatcgcccttttcgccgcccaaaatctcgatggcacggttggcaatcacttcattggcgttcatattaaaagaggttcccgctccgccctggatggaatcggtgatgaatgcgtcatgcagctttcccgccaaaatctcgtcgcaggcctggacgatcgcattctttctctcctccgacaattcgccggtttggcagttggtaatcgccgcagctttttttaccgccgccagagaacggataaattccggatggacccgtcggccggtaatattgaaattctcataagcgcgcagggtttgcaggccataatacgcatccttttcaatttccttggttccaatcaggtcggtctcaacacgcatgattctcttcctcctgttaatacagaaacatattctcgattcgattgttttgttccgccgcttttcactcccaaaagctccggttaaaagcaggatttttcgcggcttcataaaagtcgcccaataaagacgcaattcctgcaccgtttacaaattatagacctatatctggaaaaaagcaagagaaaaatgaaagttttccgtaattttgttttctcattctatttttttgcaggaaacaggaaaatcccgaaaaacatcttaccccatgcatacggtcagaaaaggccccgaccattttctccggggccttttgtctatttctttttatcctggccgctctctgttggaacagccgttttttccagtgacatctgccttgtcaaccgatccagtggaaagggaggagatgccagcggctttgccgcgatggacatcggcaaaagcggattgtcatcagcggcaatccggttggaatggaatacgccgcatttgcggcaccggtggatcaacgcccactcttcgtttttacgcacccacactccaaccgggtccataatgccgccgcaacaggacgcccgatccccgggaacatggtcgagatggacgctggacaggcaaaacgggcaatgattgcggtgacggctgccggcattttggcaaacaaccaacgcgccgcacacctgacagacaaaacagctttcgcttactccgccggatttttcttcttttttattttaaaaacgttccacttaacatcatatcctcctaaagttatcaaccacttgcggaggccctgcaaaaattagttcgcacaaacctcctgctgtgcgacaatctccaaaacatatgcgatcaacaaaaagcatttctcctttttcttatctgttttggcttatcctatcacatctttttcctgtttgcaaggaaaaatcctgctcttgccaaatgatgacgaatcaggtataattttttcatcaaaccgataaggagtggaaatcatgaccgtaacaaaaaatactttgatcggcgatctgctggcaaatgatatgaataccgcccgtttcctgtttgaaatgggaatgcactgtgttggctgccccgcttctgccatggaaagcctggaggaggcctgcgcggtacacggtgcggatgtagacgaactggttcaaaaaattaacgactatttggcacagaacgcctaaacgtctgcgggggaatctgcgggatttccacgcttttcgctatgtgtttggaggaagccggtttttgtctttcaaacgggacggacaaaacaggtgcggcgcgccggggttgaacggatttttgccggctctttctcctttctgccgcccgtgtttttcaaaaaacggctattcgtttttcgccaggcgagagccggtgagggcaggctctcgtccatcttttttcaaaaaaacgcttgacctggagtagactttaaattgtatgctttgaaagagaccttttcgaaaagacaacaggaggtagaagcatgaaaaaacaatcgaccaaaaagctggtgctggcggcgctgttcctggctttggcctatctgctgccctttttgaccgggcagattccggaaatcggcagtatgctgctgccaatgcacctgcctgtgctgatctgcggctttgtatgcggatggcctcatggcttggcggtgggctttgccgcaccgctgctgcgttcctttacgctgggaatgccgccccccttccccactgcggtggctatggcctttgaattggcggcttatggggtaatcaccggcatctgctacaaaaagctgccgaaaaaaccgctttttctttatgtggatcttctggctgccatgatcggcggccgaattgtctggggagcagccatgatgatctgtttgggtatcaaaggcggcgcctttacctggtcggcctttttatccggatcggtgctcagcgcgattcccggcattgtcttgcagctgattcttgtcccgattattgtcgccgtactgcaaaaagcaaagctgattcccgacgatcaatgaatttttgggaacggattgttttaaaaaagccatggcaaaagccatggctttttgttatgggaaaaatccgcaggtcaaacctgcgccaagaacaatctatatctgtatgcagcctgtgatggacacacaccggacagacaggaacggccattcgctgtaaacctttcccgccggatttttcgaacgattcggcagatcccttcccctgatggcaaaagatctctgtcttttgctgccagggccctcttatttgtccccagcctttctttttcgcttggcgctgattttctcgcggattttttccaacgcctcattatatcgctccgactgggcattggggaacgctttgagcaagcggacaggcattttctcctgcataatccgctcgtattcctcagacaactgggcaaggcgcgccttcttctcctcgatagaccccaaaaaagcctgctttttctgctctgccgtcaagcgaaactgctcctgccgcgcttcgatcgtaccgcgaaacgctgcgcgtttctgttccgcttcttctttccactgagcagaggattctttcagcttttccccagttccggccagtttcagcgcgccctccgccaggccgctgccgatatcctcagacagttcgtgcatcaggccgctgacctcctccagccgtttgagccggcggttgagtttgagaatccccgctaccgtcacgtaaaaatcacaggcaaagcaaaacaagcatattcccactataatctgcccggccagcgtgggaatccaacggacaaatcgggtgatccccggatggattaagtccataaccattacacagcccagcccccacaggatagaaaaacgcaggcagatataaccgctgaggttaaaaggctgattggaatagtcccaccagctggtgtgaaacacctttttcagcacgtagccggtgatccattccagcgcgctggtcaaaaacatggagccaaaaaacaacagcagccagttcttttgcagcggcgtcaggcaaaaaacgacgattaccataccaaaaccgtagattggacagaccggaccgcttaaaaatccgcggttcacaaagtggcccgtattgatggtgttgaagatgacctccgcgcaccatcccaaaaacgcatagatgacaaaaaaagccagatattcataaaaagaatacatcaaaactccccctttcccaacgatacctttattatagtccaaccgcttgaaaaagcaaccggcaccatccccaaaagtaggacggtgccggaatcatgtgtgaggcgtttgctgtgtttagcaaggcaaaacagcggacaagcactttttaaggcagaaataagaaaaaattcaaaccagcagcatccggtcattgtccagcaccttatgctgttttgcgcgatacaattccatcaggccggcaacggtcattttttcccgctcgacaccagaaagatccaaaataatctttccgctgtccatcatgacagtgcggctgccgctggacagcgcagactggatgttgtgggtaatcatcatggtagtcaggcggttcttttggatgatttggttggtgatggccatgatcttttcggcagtggccgggtccaacgcggctgtatgctcgtcaagcaaaagcagcttgggcggcacgatggtactcatcagcagcgtcagcgcctgccgctgcccaccggacaaaaggcccactttggtatccatccggtcctccagtcccatatcaaactcggccagggcagaccggaaaaaatcccggtcgcggcggcagaccgccaggcgaaggccccggcgctgactgcgggaataagaaagagccagattttcttcaatggtcatatgaggcgcggtccctttcatggggtcctgaaacaggcgcccgatcttggcggcccgcttatgctcggggtcataggtaatattcttcccgtccaggaaaatagcgccgctgtccgcccagaaagaaccgccaatcgccgaaaacagcgtggactttcccgctccgttggaaccaatgacagtgacaaactcaccgggtgccagcgaaaggctcagatggtccagcgccacatgctcattgggggtgcccggcgcgaacacctttgtcaggtcatgaatgcacagcatggcgaagcccctctcttttgatttttctgcgggccagcatctgcttgactgccggtaccgacagcgcagcggctacgataactgccgatacaatttttaaacagtaggccgggaacagattggtcttaagggctaaagcgatcatcagccggtaaatcactgaacctgccactgtgacgctcaacccccaggttaccccccggcggccgaaaatcctctctccgataataaccgaagccagccccaccgctacgatgccaatgccggagctgatatccgcaaagccctggtactgggccagcagcgccccggacaagccaatgcagccgttggcgatggctaatgccaggattttggtatgatccacattaatagaagaagcccgcaccatatcctcattatctccggcggcccggatgcaaaggccgatatgcgttttcaaaaacaaagccagcgccgctaccaccgccgcgcagaacaagccggccaacagaagtctgacgatctctttgtccacgccgggcagcagatcaacggccagccgaaacaaggtatccagtcccaccagggaaatgttggagctggaccccatgacggccagattgaccgaatacagcccgctcatggtcagaatgcccgctaaaatcggatggatacgcagtttagtctgcaaaacaccggtgactgcgccgcccagactgccggccagaaatcccagcagcaccccggccagcggatgtcccgcggcagtcagcgccgcggacaccgccagcccgaaggtaaaggtcccttctgccgacaggtcggggatatccaggatgcggaaagcgatatacacgcccaccgccagcagcccgtaaatcaacccaagctgcaaagagcccactattaatgtcataaccaaatctccttttgtactgctcccttcgggagcccggcagattgccaatcgaaaaaactacttcgcatcctccaccaaaatagcttcagacgccacctcttcgggaatatcggcgccgatcgcctccgcagtggtcttgttgatcaccacatcggttgccacaacgacaaccgacggaatttccgcaatgggcttgccgccgagatactccaccgccatatccgcagtaatggcaccaatctgggtatcgctgatggcgacagtggcaaagccgccggattccacggtggtattggagctgcagtaaacagggatttttgcctcacgagcaacctctgccaccagattcatcgcactttggatgacggagtcgttgggaataaagaacgcgtctactttgccgatgaggctctgggctgcctgctgcacctctgacgagtttgcaaccaccgcttcctcataggaaaggccgatggaatccagatacgccttgctgctttccaccgtggtaaccgcattgatctcgccggtattatacaaaaatccgtaggtcttgcagccgggggtcagctgatccgccaggtcaaaaatttcgttgaccggaatggcgttggaggtgccagttgcatttttatccggcttttccatgtcgctgatgattcgggctcccaccgggttggagaccgagatgaaaaatacggggatatcgctttccagattcaccatcgcctgggaggcaggcgttgcgatggtgaccaccagatccatgccgttatccaccatttcctgacagatggtattgagattggcggaatccccttgggcatttttataatggaagttcgctttgctttcgtcatagccgcgatccttcatctgctggacaaatccctcgcgcatatcgttaaacgcgccgttttcaatcagctggatgataccgatatcaattttttctgtcgattgctgctgacagccggcaaaaagcgtaaggatcatgcaaagtacggtaagaatcgctgcgatgtttcgaatggttttcatcatgggtttctccttttcaaaaatcattttgtcggaagaatccgagggtttctcaggcagcgcttttttacaacaaaaaaacatctgtccttgaaaaacaaggacagatgttatcatcatctgcggtaccaccttgattggcatgcaaagcacgcccacctctgcagagtgccgacacactccccgccctgtaacgctggcgctgcgtcgcagaatactgggggccttcgcccttttccccgcgccctccgtggtccatttgtcagttccgcatctctgccgggctctcacctgccccgactctctgaaagcgcgtgaaccgttttatctccacttctccggtttgttttttggtttgacaatataaaaccacaaactttactctttgtcaagcattttttagacggataaacatccgggccgaggccctgtttgtccctgtatttctaacctttttggctgacataaggcacagtgctgccgccgtggggcatcacgatcacatctttgccggtaaaatccaccgaagccagaagctgctgcatatcagtatacccctcgatgcccatgtcccgcagcgtttcgggcgaaagctcggtgagcattagcaccctgccgcctcggatcacctcgcagcccgcataaaaaatatatcctgcaatggtaaagcccgcccgcagatccgcatccagcgagttggtttttaacgaccggctccagtcaaaaaagtccggcgcaccgccgccatccgggcactgggcgacaaaaatcatcgttccgccgggcttgaccgcctgccccatattgagcagtgttttgattccctgataaaggttaatgtccttgggatatccgccgcagctggcaatgacgatatccgccttttgcgaaatgggtacgccggagatctgctgcaccagccggcagctttcctcccaggccctctgccactggccgcacaccagccggcattggcagccctgctgattcatgacgatgttaatgccgaacaccggatttaccaaagcggcggcctcggtcatatccagatgaaccggattatcctccagcttgcccatgccaatgcggctggaggaacagggcttatccgggtccaggcacatcatgtggttgtgcagaatggtctgtttgccgctgatgccaggcagaatacttttgcggccgccgccgtagccggacatcagatggtgaaccgtcgcgccgatggtgatgaccttgcggcccaccgccagcgggttgacccaaacgggggtaccaaaactggtctcacccagataagccagcggaccgtcacagtcatggcagacaaccttgaccttttgataaacctcttccgacgcgatttggcgcagctccttctcgctctgcccccggtgagtgcccagcgccaccagcacggtcatattctggtgcaaaacgccgcactcttcgtgcagaaacgccaccaattcccggcaaaccagatcctgccgggaccaaaagcgggtgacatcgctaatgacaatggtcaccagatcctcagacgacaccagctgttccagcggtgccccgc

SEQ ID NO: 2104 - DNA, 3708 bp, Unknown
  16S sequences of unknown bacteria
caccgggcacgccaaggcgggcgcggcgctggcacttgattttgacgccctgcgccgggcaggcgggacgctggtgtttttaatgagcgttgcgtccctgccgcaaatttgcggcggcctgctggatgcggggatggacccggcgacgcctgctgcggtgattgaacaggggaccctgccgcagcagcggaagctggtctctgaattgaaaacgctgccggccgcggcgcgggaggccggggtcaagagcccggcaaccctgatcgtcggcgcagtttgcgggttatcggaccagctggactggtttggccggctgccgctaaaagggcgggagatcatcgtcacccgaccccgggaccgcagcgctttgcttgcggcgcggctgcgccagctgggggccagcgtgacggagtacccatgcatccggacggtccctcgacaggaaaacccagaattggacgcggcgattaaagccctggagggctaccgctggctcgtctttaccagcccggtggggccggaaatattctttgcccggctgcaaaagaccgggcgggacgccagggctctggcggggctgcgcttggcggccatcgggccgaagacggcccaggcgctggcgcgcttcggcctgcgagcggacctcatcccggaacgctatgactcccagcaccttgcccaggcgatgcgggatgtgacggggccggtactcttgtgccgggccagccgggggagtgacgcgctgccggacctgctgcgggcccgcggcatcccctttgccgatgtcccgtgctatgacacggtctatgagacgccggacccggcgccggtccgggctctgctggagcggccgattttggtgacatttaccagcgcgtcgacggtccgggggtttgtccggagcctgcctggggcatcgtttgcccaggtcctgggctgctgcatcggcgcgcagacggcggtggaggcgaggaaatacggcatcgctgtcgctatctccaaggaagcaacgatcgaatctttactcgaatgcatcaaggaagtgtgaatactatggatctaaccatccgaccccgcaggctgcgcacctgcgagagcctgcgccgcatggtgcgggaaacgagagtctccccagacagcctggtctatccgctgtttctcatcgagggggagaagattaaggagcccatcgagtcccttgacgggcagtaccgctattcgccggaccgggtctgcgaggcaattgccgactgccgggcggcgggcgtcagccgggtgctgctctttggcattccggcgcggaaggacgcctgcggctcggcggcctgggatgaaaacggcgttgtccagcagggcatccgggccatcaaggcggcctggccggactgctatgtcatcaccgacgtttgcctgtgcgaatatacagaccacggccactgcggcatcttgcagggccatacggtggataacgacaagaccctggaggtccttgccaagacggcggtgtcccatgcccgggcaggggcggatatggtcgcgccgtcggatatgatggacggccgtgtcgccgccatccgggcggcgctggatgaaaacggctttgtttcgacacccatcatggcctactccgcgaaatacgcctccgcgttttacggcccgttccgggaggcggccgggtctgctccggccttcggtgaccgccggggctaccagatggacccccacaaccgcaaggaggcccggaaggagtgcgccctggacgcccgtgagggggcggatattctgatggtcaagcccgcgatgagctatctcgatatcatccgcgaatgtgccgacgcctttgacctgccgctggcggcctattctgtcagcggggagtatgcgatgatcaaggccgccgggcaggcggggctgatcgatgagcaccgggtcatgtgcgagagcgccctgtccgtctaccgggcgggggcggatattttgattacctattatgccaaggagctggcccaggccatgcagagaggggagctggggtaaagatgacacggtccgagcagctgtttgcggcggcgcagcgcgtcatgccaggcggcgttaactcgccggtgcgggcctgccgcgcggtgggggccgagccccggtttctgtcgcggggcaagggaagccgcgtctgggatgtggacgggaacgagtttgtcgacctcgtctgctcctggggcccgctgatcctgggccactgccacccggctgttgaagaagctgtcctggcggcggcgcggcggggcttgagcttcggcgcgaatacggaggccgaggtcgagctggcggagctggtctgccggatgacgggcatcgagatggtccggatggtcaattcgggcacggaggccgtcatgtctgccctgcgcctggcgcggggggcgacggggcgcagcaagctcatcaaatttgccgggtgctatcacggccactgcgacgcgatgctggtcaaggccggttccggcgcgctgaccggcggcgcgccggactccgccggggtcccggcagagctggcgggcgatacgctgacggcgcagtacaacgaccttgccagcgtgcggcggttgctggacgcaaacccggggcaggtcgcggccatcattgttgagccggtggcggcgaatatgggggtcgtccccccgcagccgggctttttacaggggcttcggacgctgtgcgacgagacgggggcgctgctgatcttcgacgaggtcatcaccggattccggctggcccccggcggggcacaggcgtattacggcgtccgggcggacctcgtgacctatggcaagatcatcggcggcgggatgccggtgggggcctatggcggcagccgggcgcttctggagcaggtcgcgcccctgggccctgtctaccaggcggggacgctctccggcaaccccgtggccatggcggcggggctggcgcagctgcagatcctggcgcgcacgccggaagtttattctgaactggagcgccggggcgcgctgctggaggcggggctgcgggacgcgctgcggcgcgtgccggtccaggtgaaccgggtcggctcggtgctgacggtgtttttcacgcaggagcctgtcaccgggtatgcccaggcaaggcaggctgacaccggccggtttgcccagtggtaccgggggctgctggcccggggcatttatgctgcgcccagccagtttgaggcgatgttcctctcggcagcgcatacggacgcggagatcggtagaattttgcaggcggcccgggcgatcttttgacgctggggcggggagaaaaatgtattttcttttcccgcgatccgtggtaaaatgaaaaaagccgctgcggcggcgatgtaaagacagaaagcagggatctaattgaagtcgattcgcgacaagctgtacctttccaccatagcggatgacgattacgagcaggcggcggcctatggcgtcggcctggagatcgcggagttttgtgcggcgatgaatatggatggggagttgttcccaatttttgatagcaatgtgcggatcaagatgaagtccgccggccgattcgtgttccacgggccctttgcagagctctcaccctgtagcatcgacccaaaggtgcggcaggtgagcatggagcggtatttgcaggcggcgcggctggcggcccagtacggggcgcggcggg

SEQ ID NO: 2105 - DNA, 23396 bp, Unknown
  16S sequences of unknown bacteria
atttacgacaaatctgacactgctttacaataccagacaaaatgactgatgccccggaaagcctgtaaaacaggcacttccgggatacacaagacaggacaaaaatcgacttccattatcaagaggtgagtgctaattattttgtgaagattgtgtgaacgctgcgagccatgcaaaatagtaaaaaactcccaaccctgtcctattctcagtttttaaccgagtcaagcaaatagcgaagcggattgcgaatatccgctttgactcaactgaaaattacagagttgggaattttcttttcttatgctgtcaatatctcaagaattgcacccagaagagccgggctcagattcatcgctgcaagagtaatgactccttctttgcccatggattcaacgactgtctggatatcagatttcaggttgtatggaatttgtgctttctccaggaaattatagcaacgtcctgccacatcattctcagcaattacaagtccttctgcaaatgtaatagcaatctctttggatactgctgtctctggtacttccactgtcagcgctgcagttgctttgttgtaagaaacttttgccgggatctcttcgtcatcagcaattactttgcaacatgctttttctacacccataaatacaactttccagcttctgctttccggaataacagatacattacccagtgctcttccgatcacaaatgtatcttcttctccaccggtaaatgtcagctgagtagctacccagttttcttctttatccaccggtgtatctccctggtcttcccacagagtgaagcttccgtcctctgccgggaatacacgtacctccatcgccttcgggttgtctgtgctgctgtcatagtcagccatatctttcatcggaacgatggctccggctttcatcagaaccggcagatcttctacgcctctccacaaatccagcatacgtccgccctgatataccataccggtaaagaagtcagcccacataccttccggcagccatgtatgagctttggccgcacgtgtttccggatcctgcttttctgtaatcggagataccagaagttcagaaccgaaataatattcgtttggtacctgataagcctcgtcacgctccggctccagataatacatcggctggatcaacggaagatcctcataatttgctctccggttcatagtatacagatatggaaccatgccatgacgcagacgcaggtattcttccatcacgccctgtgtgatcttatcaaatttccatggttcctttccattaaacggattatccgtgctatgcaaacggttaatcggagagaatactccatactgtacccatcttgccattagttcgtcatcccggatacccatcatatggccaccgatatcatgactccaccatccatatcccacattgcttgcggtattggtaaaatatggctggaatgccaggctttcccaactgatcacagtatctcctgagaaaccaaccggatatctgtgacttcccacacctgcatatctggagaatgtcagcggacgatttcctttccagctgctatccagataatgataatgattcagcatccacaaaggatccagtcccggtactttcgtaaccgttccctgctgccagtcaagccaccagaaatctactccttcttcctccagcggatgatgcagatccttcagatacacttccataaaatgaggatctgccggatcaaactgtaccgcaatctcgcttgcaggatcaatgcccatcttttcagcgatggaaggatataattcttcataagcacggataccatctgccggatgtacgttcaatgtaattttcatattatgttcatgcagccagctcatgaagcctttgggatccgggaagaagtttttgttccaggtatatcccgtccatccgcttccgtattttggatccacgtcatcaaccagatgccagtccatatccaccactgctacggagaatggcagcttttcatcttcaaaacgctctaccagttctttatattcttcttctgtatatcgatgataacggctccaccagttaccgaacgcatatcttggaagcagcggctgttttccgcacagataataaaaatctttcagacaatccagataacgatgagcatatccgaagaaatacagatcttcaccaacaccctgtctcggtgctacccagccatcttctgtcagtgccattgaatggctgtcgtctactacggaaaaaccatttcttgagagaatgccatgctccataggaacttttccagcgtatttctcattcattggagcgtttcccttcccgtatgcgtcatcactcagtttcatgattccgtcgcatccgtccagagtacgtgcagttcccatcagatccatcggttcctgtccataattccagtttcttccccagccgcctccgcctcctacaactttaatagacagaccattggctgcaaaaggttttctgttgtagtggatttccagagaatctgtaaagattgccagttcattttcatcttccacaactttaaactccggtaccgggaagtcacgatttaaaatagactgtgtggcacggtcttcgaacacacctccctcgttatattccagacgtaccagcgctgatgtcaacatagtgattcggtagcaatcaccctgaatgattgcttcttttctgctcatcggatgcgcttccagtttgtatccttccattcccattttgtataaacctccataaatgctaaacacactgttccctgtaaaccagttgatatgattcgataaatattaccatccacaatcccatgctgataatttggtgatggtgacatatcatagactacaccattaatcttctcttcttttgtgtagtcatctttcagtaatgacatgttatcacctctcagcgagtcttgctataccctcattataatacaagtaatatttgttcagcaacttatttttgattctgataagcagatatgaaatatcacccttacgtacattatatcctcgttaaatatctttttccaccaactgtcacttgttattataaagcggacattcgcaatccgcttcgctacctgctcatgaataaatcctggattgttcatgagagaatcacatccaatccaggattatctatcctttctttttttataaagatactcctgcttctgcagatctataaaaaagaactataatgcaggttatttactacattccataatgatcttctcgcatctgtcgtatccaagctccgagctgttcaggcacagcgtataattgctggcttttccccatttctgctccgtataaaagttataatttgtcatccttcttttatccgtgtctgccatcattttgactgcttccttctcatctacattgtgtaaatgactgattctctgtatcttttccggcatatccccatgaataaatacattcagcacatcatcccggtctttcaggatataatctgcatttcttccaatgatcacacaaggctctttctctgccaatcccagtataacctttctctgtgcctcatataccatatcttccactgaccttcctgtgatatcacgtccggcaagcgcatatgcaaacaacccctttttcggagctaattctgcactttcctgaatatactcctgcgataagccggatttttctgcaatctgcccgatgatgtttttatcataataagcaattccaagcttctttgcgacctcttctccgataaaacgtcccccgcttccaaattctctgctgatcgtaataattctttttgccatcactgcttcctccttaattcaaagcatccactttattttttctgattctctttaaaaatacgtaccccaccagacacgagatcacttccgtaatcggaaatgcccaccagatcagtgaaactcccatctgaccgcttctgacaaatattgaaaagattcccgccagcggcagaataataataagctgtctcaaaagcgaaataaccagcgattccacaccaccgtccagtgcctgataaataccctgataagcaacatttattccggcaaataaaaagctgattgaaattactctcattgcaccgataaagtacgctcttgactgccccgcattaaacagcgttgcaaatgcccctgggaatatttcggtgattgcaattccaacaatcattaatgcgatggtatagatcagaccatatttgattccttcctgaattctctttttgcttctcattccataagcaaatgcaataatcggagtaatcgcatcgcgtagaccaaaagcaaggaagagaacaaactgctgtactttatagaacaaaccataggccgtctgtgccgacggattgaatttcaggatcagattcatcacataaaccataatagacatcaaagcctgggcaataatcgccggaaggccgatcgcatagatttcttttatcacaccggcatttggcttcatatattgcaccccatgctcaaattccttatttaatttcatatgaaagacaagcagcaatactgcggatgccacctgaccgattaccgttgcgtaggccgcaccctttacacccatttccggacaaggcccaataccatagatcatgattgggtcgagaataatattcacaacggctccaaccacctgtccaattgtagaataaagagaccggcctgttgcctgaagtaatttctcaaataaggaaaagaagataataccaaaagagatcacgcagcatatcctcagatagctgactcccatctcaagtacttcagcatctactgtctgagatgaaatgtatgctctcacaccaaaaatgccaaacagcaggcaaaccacataaatgatcacaccaagaaacagactgtttcccgctacttttgccgcttttttacagtttccctgtccgagcgtccttgcaagaagtgcattagtgccgacaccggttccgattccaaccgcaaccataagcatctgcaccgggaataccagcgtcagggcatttaaggcggcttcactgcccaccttcatatttcctacaaatgcactgtctacaatattatagactgcctgcaatgccatggataaaatcatcggaattcccatctggatcatcagacgattcaccggcatatccttcatcttattactttctgccattttgcttttactcctcctttttttgccataatctactctcggaatctttttgtgcttgattttgtgagaagacttcgagagtacatataaaaaagtgtgctcctggcatataagctggacttacgctgacaggctacacacttttttatggcaatactatattttaacaaacaaaaacgagcagcgggaaaactggtcttacgcttacccgctgctcgtttctcgtaattatattgcctgttttctaaaaagtcaaacaaaatttttcttgcattttctcttcttcttcgcttataataaatccgaagaaaaaataatcataacaaaagccggcttgtaaaagcgtgaaatcatgaggatttgcttgtccttacagatttcgcgcttatttttttgcaatgccgtaaggaggtcttatgaattccagaaacaaactggctgaaatgccaatccgtcctttgctgtacacaatggcagttcccctgatgctgtctttgcttgtacagtcactctataacatcgttgagcaatatctttccagcaatcgcaactgttatcggacagatagccggtgccatcgctgaaccactatacaaaattctctccttgccgattggcattcttattccgtaaaagtataacgcacaaaagaaccctgattatctcctgtcactattacaacatctccactctcattgcatgtggattcaagaatcggaaatcttccattctcttttacatatgcttccggactgtctgcttctgcctcgattaacgtttttttactgtatttgtctccaccacacggatttatttcctcaataaaaatttcatattcattcatatacggttcctcctaagattcatttgtaactgttcagagccaagcaaaatttcataaaaaaggcggaaaatgcttgcatttttaagcctgtttttgaaattttatttggcggatacgctacaccgacgaaatgcgtagcattttggaggttggctctgaacagttagattcattttataaaagcgagcagcatatatgttacttttggcaccattacactactcgctgttatttctattataaaactgtttcattttaatttcaaaagtagtttttaccaaaaatacctgtgtaattttggatgactgtcagaaattatccttctcaattctgagcatacgatatccgataccgatatgagtctgaatatattgcactccggttttttcaggttccagttttttccgcaatgttgccataaaaaccctgagagacgcaacatcgttttctgaacatcgcccccagatttgctgagtaatatacgtatgcgtcaataccttccccacattatgggataaaagacagagcagcttatactcaataggtgtcaaatgtaattcttctcccttcagatatgtgcagcctgccgtataatctatctttaatccaccattttcaaaaacagaggtttccagatgttcccctgtctgtattatggccagccgcctttgcgtgacacggatacgtgcaagcaattcatctaccgaaaatggttttgtaatataatcatctgcccctgcatccaaagcttctattttatctgtatcctcacttctggcactaatcacaataatcggcatattcgaccaggtacgaattttcttgattacctctacgccttccatatcaggaagcccaagatccagaagaacaatatccggattatgagataaagtctccataatagctgcagctccgttttctgctgcaagatatttataatcatgtgtttttaatgtagtaacaatcaggttacgtatgggccggtcatcctctaccaccagaattactgtcttattcatttaatgtcacctcacttaatggtaaagtaaaagtaaaattgcagccatgcggttcgtgctccgtaagggtcagggttccattatgcgcttctataatagaatggcaaagcgccagtccaagtcccagacttcgatgactatccgcaactgttgttttccctgtataaaacatttcaaaaatatgctgtttcatttcttccgggattccaggtccgttatcttccacactgatctgtgcttttccatctgttttggttccccgaatacagattacagaacctgccggcgtatattttatcgcgttatcaattaaatttaccaaaacctgtataataagacgtacatccatacgtgcaagaacaagctcttcacagtctgtcataattttataatcatcatgtttccggctgatatgcctcagggattctgcaatcacttcatctaaaagctgatctgtaaatttgaatttcaatcttccatcattcagtctggtaatagagagcagattctccacaactccgatcagccattcagaatcgtcataaatgtctgtataaatctgatgttttgtagcttcatccagacgattgctgttgctaagcagcatatctgcattaccggaaatggagcaaagcggagtccgaagatcgtgagagattgcccgaagaaggtctgcccgaagctgctcattttttgccaaaactgcatttttctctttttccatggcattttgtgcgttttccattgcaagtgcgcattcatttattacagacagcaggatgctgtattcaaaagagtccagtgtttctttttgcagcggtatcccaattacaccgtaaacattattgccgcttctgattgccagatacagacatttggccttaggaaaatggtgtgtggatgcaccggcacgttgtctgttttcatatgcccatctggctgtctgctgttcctccggtgtcaaaaaatcttccgtgcactctttttccccggagaaaagctttcccgctgataaagctccattttccacaacatatgctgtaatattgcggtttaataggcgaagaagctgtgtacaggtaacatcaaggatctccgtttctccttttgccttttgcatcaaacggtctgtatcgaacaaaatctgcgtacgaaacgcaagctgcgcagacagttttgcatgtgttttcagcttcgctgcaagcgctcccgtaagtacagatgaaataagcatgatgagaaaggtcaccggatagcccaccgcatacgtctgaaaagacatctttggttctgtcaggaaaaaacaaaataagaatacacttaaaacagagccggctacactgcaaagataaccatctgtcacaattgaagtaaccaaaactcccagaatgtatatcgttacaatattcgtatccgtgaaattcagcttctgaaacaacagaccgattaacgtgcatgctgcaaatatgaaagctgtcaggaaataatcttttgcagacggtttttccaaataccatgcaagcggccgtttccggtagggtctggtttgtaccgcatccggaataatatgaatatcaatatccggtacaatttcaatcagcttttccgtcagagttacttttccaaaaaagtggtttcgtctggcgttgctttgtccgattactattttagtaacgttggataacctggcatactctgcaatctgcaccgggatattttccccgtgagtcatcacgatttccgctcccagcatttctgcataccgaatatgttcttccagcttttctttatctgagtcttctgactttgtaccggtccgtacatacagagcagtaaaacgtgcctgcagcacatttgccattttcgctgctgtatctattattttttgatttgagggcgccgcagacagacaaacaaggatatgttcatctgtgtttttattgttcatttttaaactcatcctgcccgcctccctttcctgccgttttggaaattatatcatgcgactgtattatggtcaaaaatcttttttacatccaagaaccgcccgtcaataattatgatttcggcttctttatattcttttttgcactcatgaacctttcttaacaattcttcgtccgaaagagtatccagaaacagcatcttgggtgaatgctgtttctcttctgattcgtctttcatagattccttcatcaggttcaaaagctgatctgctttattggcaacataaaatccaaatccaaacatacaaaatactgcagctaccagtactgcctgtcccattccaatcacctctttactgcgctcttcatgacaatcaggctatatgcggaagcacttctgaagagccctgtattcccctaacaccagtaatttactattttcttcaaaatgcgtatccggcgaaattgcaatactgaactctctttcattttttactgccagaatattaattttgtagcgttttctgatatccagttctcctactgtttttccaacccattctttcggcatttcaacctcaaaaattgcatgggaagcatccacctccatatagtcgaggatatggtcgtctgtgtaacggatcgaagcccattttgcaacctgcttttccgggtaaactactttatcggcaccattgcgcagaaggaatttttcctgaacatcgcgttcagccctggatatcaccagttttgctcccagttcttttagaagggaggttgtttcaagagaattttgaaagcttcccccaatcgtcacgaaacagatatcgtagtttccaatcccaagagactgtaagaattcagcattggtgctgtccccgatctgggcactggtcacaaacggcaataccttgtccaccctttcttcattccagtcaaccgccataatttcatgccccagctggcttagctgcgtagcaatatgtcttccgaatcttccaagtccaatcagcaatatacttttcataatattatttttctccttctcatccaactgtaattttttctacgggaagctttgcgttttctccttttttcccggaaaataccgcataaatcaaagtcaggcctcccacacgccccaggtacatcagtataatcaacacaatttttgaaaacgtatgaagtcccggtgtaattcccagagtcagacctaccgtaccaacagctgaagcagcttcatacagacagtctaaaagaggaaggtcttcgtatacacttattgcaagtccgccacaaaaaaacaacgtaaaataaagcatagctatcgttgctgcattttttatcacatgacactccagtcttcgtccaaacgctcctgcattctcctggcttcgaaatatagcaattgcatttaaaataagtacagtaaaagttgttgttttcatacctcctgctgtagaaccaggcgaaccaccgatcagcatcaacaatatcataatcgctttcgatgcttcgctcatctctgaaatatttaccgtattaaatccggcagtcctcgtagttacggattgaaacaaagcagctaacagacgtttccatgcaggcaggcttttcagatcacagatgaagaaaaaaactgccggaaacaaaatcagacatcctgtcgccatgagaataatcttgctttgcatacggtaacgtttaaaattcagtttatttgtataaatatcatcccaggtaagaaagccgattccccctatgatgatcaacagcataattaccacgtttacaaggatgtttccggaataccgtgtcagagatggaaaggtattggctgctgtccccaggatatcaaatccggcattacaaaaagcagagattgaatgaaaaaccgccatccagattccctttaaaccataatccggtaaaaaaaccggtagtaataataaggccccggcagcttcaagtaaaaaggttccctttaaaataaactttgtcagcctgacaattccgcctactttgggggccgaaatcgcattctgcatagtacttctttgcataagggatatttttttccctgaaagaagtggtgcggatgccgccacagttaccactcccagcccgcctatttgtataagtacaagaataactgcctgtccggtcggagaccagtagcttcctgtatcccttaccaccagccctgtaacgcataccgctgaagtggctgtaaaaagtgcctcatgaaatggtgtcggcattttatccagagatgagaatggcagcatcagcaaaaaggttccaaaaagaatcacacctgcaaatccaagaataattaactgaaaagaggtcatatgttttttcttacataatttttccggcataaataatcataactccttactaatgatctcacagcaaaaccttcgtgatgcattgtattatatagaattgctttcaaagatagtattaagagtctttgattccgcattaatattatataaagatgaaaaatctgctccaagaaaaacgcagaacgattttttcttttatgatatgatgtaaccgttcagcgacagacaaaatttggggaactggccgaaatggttacgatagaattctttttacaggtggttagtgatagtatgaggtacaaaatcgcagtctgcgatgacccggatgcagacagaagctatattttgaatatggtgcacgcctggtctgcgtgtgcaggtcatacggttctttactgttcaaaaactgtcccatttcctgtggcctcctttgtttttttctgaatataagtatatctttttttctgtatcgctacaagccacaggagataaaaaacagctcttattactatttttttatgaacagcgttttctccgattatcacacaagtctccttctgtctattccattttcgactatctatctgcaaaaaagctgccttccttacgctctgaaattttcctgaaaaaaataaaaaaagaacagccaaccagctgctctttttttatttgattagagttaatgacattatttcctgtatgtatttgcggaggtaacatacgggaacgctttaagttaactgctgttaatataaaccatcccggcctccgccacaagcctcccggggggatatttttcctgcgttttatatgaataaatggaatatcctattccaatcaatctacctgttctgctctttttcttactcttccatatatttttttataaatgtcaaaaacttctttgctgttttttccattttctgatcattccggaagaggcagacaaactgaaccgcctgttcctcgttttccagctgtatagtatcatgtgtaatcgatttctcactgtgactgagacaattcggactgatattgcacagatttgttttctgcagcatagcctgcatgatatagtcactgttggtcgtgaccttcacctgcagcttccttttttcttcatcctttttcttctgctctttccacaaagaaatccctgaataataatcctccacaccctgaaccaggaaaatttcatttcgcttttcatggtccgtcttatttctgcagtacaatactgtctttgccttttttaaagtatagtagccgatatgattttcctgaaacatttttttcaattttccaagctgcgtttcttcgaaataagcaaagccaagctgatcctgactggcaataattctccgcacgatctctccggccggcgcactgatcacattatatttctcctctgcgccctcctgtatatagtactcgcagaatgcgttagcgaaccaggagcccggctgaaaggatactctgagctcctccgttgcatcctcctctgcacattccagaatttttgcgctgcattctaccatactcaatgcatacttgtagatttgctttcccttatctgtcagctcgatgccatgctgctttctttcgaatacttttttccccagctccttttccagcgacgcaatcatcttacttacattcgactgagaagtaaacagtatcgatgctgccttactgaaggactttgtctgtgcacacgcaaccatgcactgtaattgtcttaattccattgatcctcttttcctgtattacattattcatatcactccacaggcatctgcccggcattgtctgcagaatgtaaactgacgcatccagctcgcggcctgcatgcgcgcagcgccaagctcttcctgtgtcggcgctctgtgactgctcatttttccgcacggaatcatcggcataatattcattacggcagcacctgcgctttgtgccatccgggcaattgcatcgatttccttttcgttgacgcccgggatcagaacggtatttacttttaccgtcagccctttttcgcagcttttaaagaggcctgcctgctgacgctccagaaattcctccagcagctcctttgggtctgagttctcctctctgcccggaatagcgacccgcagataaattttttctgctgtccccacagaagcggcattgactgtcaccgtcagtgtatcaagccctgcttccttaagctcatccacgctttcttccagcataagcccgttcgtgctggtacacaggatcaggtccggatacgccttacgcaaaagaaataaggtctcaaacgtttctctgtttacgagcggatctcccggtcctgcgatccctgccacgcggatccgcggttccttctgcagtgcctgcgcagttcgctccagcgcttcttttggcgtaatgatttttgaggcgacaccaggcctggactcgttcacacagtcatacttccggtcacagaatgcacactgaatggtgcatttcggtgccaccggaagatgaatccgcccaaactgcccgtgacacttttcctgaaagcacggatgctccagtattactgaagaccgcacagctgctccacctcctcatccagaagcggacgcggaatacagcgcggatttcctgtgatcattttgtcagcaatcgcccgaaatgccaaagccgcctcgcagtccggctccatctcgaccactgtttttctcgcgatctctgccaaaccgatctgtccgctcatcggtacacagccaatcacctgcgtcccgatcgcctccgcaaaacgctccacccgctttggatcgctgcagccgcttcttccattatagatgatcccggcaagacgaacttcattttcctgcgcatacttcgcaattccgcggcagatattgtttgctgcataaattgccataaaatcagatgttgtcacaagatacacatcgtccgcaacaccttcccgcaatggcatgctaaagccaccgcacaccacatcgccaagcacatcatacaacacaacgtcccggtctgcaagaagatctctctctttgatctcacgcagtgcagatgcgattccacggccggcgcaccctgtccccggctccggtccgccggactcaatacacaaaatccctttatatcccgtgactgcaatctcgttgttttctgtgctgcttccaagctgctgcagcaccgtcgggatcctgcgtccaaccagacaccgcgtcgtgtctgctttaggatcacatcctactacagctgttttcaatccgctttcggccattgccgctgccacatttgcggccgttgttgattttccgatgccgccctttccataaatacagatttttctcattgatatatcgctccctttaacgtacgtgctgcaaatgcctcgcaaaaaagatcctccagcagacaaagcgtcccctctgctccgatatacggacgcttcgtcagacagatcctgtcaaacaccggaaaatcaaaccgcagaagcggaatttccagctcatccgcaagctcctgctcaaaggatgaaccaaacaaaaatgccgtctctgaccttcgcacttcatcatacgtttcttctatatcctgcagtgcttctctttttgcacaaacctcgatctccattccaagctccgcacttaaaaaccgtgcaagtccggctgccctggctccgcttccgatcacagctgccggaagaccataaagcgcctgcagatacgaatagattccttttgctccctctgccgtccgcgcctgaaatgctgcttcttctgcgtcaaaattcaggccaaatctggtctccagtaccttccagagctgacgcgctccggtcaggccgtacggataatcaagacagacatacggtatgccaaaccgcttttccatgtcctttgcaagctcgaccccgtatccaaataccagattcagatctgccccgggtgcgcggcgcacgcctgcgagatctgtctgtgaaaaggccgtgcaaattctggcctttccgccaaatagttcctcaagtgcttcaagatcgaaaacgtggtgtggatcgtctgcgccgattccaaggatattcacttgcggaactttgcatttttctgcatcttcgtttcctttttccggaacttttttctttgtttcctgccctttctccggcattggggacatttctttctcagtctgtggcccttccatcagcatcccgagtgctttcattcccgcttcatatccgacccgaaaatttcccctgtatccggccgcctccatggcaatgacttttcttccatgggtccgttcaaaagccgccgcgatccgtttcacatcgtcctgaataatatcactgacacagcccgtcacaataaaaataacagacggatgatacagttcccccgcagatgacaacgctttttcaagtgcatgttcccctccgaataccacctcattatcgctgatcaccgtacacgtctgccgtacctctgtcatatcacacgatgcaaaatggaatgccatggaaccaaaattacagcctaccacggaatgaaacaggatcaccccgtcgctgattccgccaagtgcctgctgtgctccgagaagcttacatccaaatggtgctttcattttattctcccttcttctccagccacatcctctgccacatttctctggctgcccgagcgcttacgctgtcataatctgcataccgctgctcctgaaacggcatacggttcaaaagaagcgcatccttccttccggcattgcgaatgcggcgttccaggcgctttatattccgatgccacgactcaaagctcagggaggtcatttctgttccgatcgggatcagcggcgccccacagccttccagcgtgaagtctccggtaccaagaactgcatccgcctgagcaaagcagttttgcagctgctcccgatccggattaaacaaaatccgcacctgcggcgcatacagcttcgctgcttcccggatgcgttccaccagctgttcttcgatgtccttcgtaatgttcaggcttcttctttgttcttctgtcagaatcacacagagcgcaccgattcccacaccaaattcctttgcaaacagcttcagggtaaatggcgcatcggagattccacggcataccagtacgcagtgctttgatccgagataagcaaggctctcttttgcaagcatcctggtctcttccgtttttttctctatcttttcttccatttccggcaagatacaaagcttctccgcgatatcccggtaaaagagtgcaattccatccagtcccgtataccgtccgtttccgtttagctgcatataatcagttccaaaccgctccttcatccttcttgcccagcgaatccgcttcaccagattcagctgagccgcaggcgcatgctccagcgcagcgactccggcgctcggaatccaggtgttcactgtaactccgcaagtattcagaaaggcttccatctcccgcagcacaagccgtccttcgcttccccagcccaccgtttcgatattgacgctgcgcgaaatgatctcctgcggtttcatcacctgttctacgatcgcatacagcgcctctgtgaagccacagcccttcagctcgatctccagacgggtatcccctgtaatcttctgcttcgcgatctccttcaaccggtttcttgagtaatttttatctctgtgtgagaaaagctctgactgaattgccgtcactttaatcccctctcggcgcagcttcgcggctgctgaccggatatcttcgttcaaaatatcgctgaccggactcggaatgataaacaccatctccggttcataccgtttccaggcctccctgactgtcttcagaagcttttcttctccgccgaaaataatttcctgctctgtcagattcgtactaagaagcggataaaacggctgatgccttctgcgtgccgaataacggtaatggtagccgcagccgaccggtgcatgaagcactgccaccacatttcctccaatttctccgattgcaccgacacttccggaaattttcccgttcactccgtatgcatgcagaattgaggacggatacagccgtgatgcaaggtcgtcataaaaaattgagtacatattattcctcccagctgatacataaaaggcgtatctgcacttctttttctgcgcagatacgcccagctcttacattctgttgttcactgcagaagccccatttgctctgcttcttttttcagttcttcacatcttcggtttattgtcccgaaccgactgactgagcagatcacatggctgcagcgccgcatcactgcaagcgcctcctgtaccttttcttctgatatttcctcaaaggcctgctcagaaatgacatgttcggacagtgcgcgtgccacctgataatccacatcattttccggcaggacaccgaccgcaaaagggatccccttgcgctgcagctgacggaaaacagggataccgcttccaccgccggcaatcacaaagacttccggttcaccctttggtgcatctagctccagacagccaaatgccgcgttgtagcttccggtcgtcacaccatagagatgatggatatattcgtctgtgaagatctcctccggcacgcccatgcgctcgatccgatcaccatgcacgcagatcacaagatcggacaccttctgtgcaagatccagttcatgcagtgacataagtaccgcgacatgcttttcatgcaccatctgcttcaaaatagccagcagctccagcttgtgccggatatcaaggaaagaggtcggctcatcgagtacgattacttccggctcttggcagatggctcttgccagcagaatacgctgtctctgtccgtcgctgatcgctgaaaaatcgcggtcgcgcagctcccaggcatgcaccagctgcatggcactcttcaccttttcatgatcttcggctccaagaataccaagtgtccccgtatacggatatcttcccgttgcaacaacatcctcacaggtcatcagctccggatgaatccgctcggtcataacgactgccattttccgcgaaatctctttatcagtcatgcgctccatcgaggtattgtcgagccagactgcgccgcccaccagcttcagctgccggatcaggctttttaagatcgtcgattttccggcgccgttcggaccgatcagcgtaaggatctgccctttttcaagggaaagacgaatatcacggatcagtggttttccgtcgtagccaacggtcagattttctgtgtatacaaaacttttctgcttttccatttatcgtttcccttttctgtttatcataacatagatcactaccggcgctccgaaaatcgctgtcacagagctgatgctaagctctgtcggtgcaaacacggtacgggcaatcagatcgcagaacagacagaatgccgcaccgcccagaaagcaggccgggatgaccagaatcggctttgccgtttttaacaggcttttcatcagctgcggcaccgcaattccgacaaatgagatcggcccggcaaacgctgtcacacaggcactcagaatactcgaaagcaggatcagctccacgcggaaccgcttgatattcacgcccatgttgcgcgcatagccctcgcccaattgatacgcccccatcggcttggagagcagaaatgccagcagcacagaaactgccacaacgcccgccatcatcgctacattgctccagtctgtgccggaaaagcttccctgcgaccagttgtgcaggtttacgatgttagaatcctctgcaaacgtcaccacaaaatccgtgaccgccgaacagatataaccaatcataactccgctgatgaccagcatggacatattttttaccttacgcgagacaagcagcacaaatcccattgagatcagggaacccgcaaatgcagatacaatcatcagaccggaaccggctgtcattcctttcccaagaaggaagatcatcgtcagagctacggtcagttttgcaccggaagaaataccaagcacaaacggacccgcgatcgggttattaaagaatgtctgcagcagaaaaccagacaccgaaagtgcaccgcccagaatcagtgccgcaagaatacgcggcaggcggatcgaccacacaatatttctggccgtctcgtcgccgcctttttgaaacaggatctgaaacacctcgcgcactgtcatcgatacacttccggaattgatattccagaaaatgagcacaagaagaaatgccgtaagcatcagaaatgatgcgatgtaacgtatttttgctttgtttttcatatttttcctaccgttccaatccacaattggtattttcgcagttcgatccaaacgcagaataagcatccatcttacccaccacttagtgctccgcgcacttgaagcggcggaatgcttatctgcgtccatttactcaagccggtacagatacgtcagtccctgcggatcctcctctgtcagcatctgatgcatatccatgatcacatcgcccagacacgttgtctcctgaaacatgctctttgtcaggcaccagacatttccttcctttaccgccttgaaatcctttaaaagtgcactttttttcaaaagctcgtcaagtgactttagctctccgtcgatcgtgctgttataaatgatgtaatccgcatctttggctccggcatagaagtcttccatgcccatgttcatcgtggactggccttcctcgtccgctccaagatctttaaaaatgtactgaccgccggccagatcgatcattttggacacatagtctcctgccttgcgcacattcgccgcacccatggaattgatatagaagaaagccacggtttttccggtattctccgtattttccagagatttcagctgtgatgcctgttcctcaaaaagtgcctctgcctcatcctcttttccgagcagcgcaccgtaaagcttcacccattcggtgcggccaagcggatggctttcatagctggaatgctccaccagcactggaattccaagctcctccagcttttccttcacctccggcttatgatagatcatcgtggactcaatcgcaagatcgcagcctgcagccagaatctgctcataatccggtgcgctgtactttcctgcaaacgcaatacttccgtcttcaagcgccgtcttcgccttatcgatataccagccatctgcattcgttccggacaaactgatatgatccagcgcatccagtccgcagaaaaagtccatcgcagaggttgccaccagataaatgctcttcggcgtgtgcgaaagcactgtgatgtcgtccggcagatcctccggcgcctcttccccatccggtaccagcaggaactccccatcaccctcgattgtaaaaagcttatagccgccttcgtagtaattcacggaaaactgatccgcataggaaagctccagcgcatgatcccaggtaagccccggaagcgccggtgcttcggaagccgatgtctgagcatgctcattattttctgtctcctgcgcccgtgctgcctgcggcaccgccgcagggacagcgcataccattgtcgtgctcagcactgcacacaggaacctcactgtatgtcgtttcatttttttcgccttttctgtcaactacttgttcaagttaaaggtcagtgtatactcgatctcgtgcggctcgctcattgcaactgtatccgcaacaacctccatcggataatcaaaaccatctaccggaatttcaaacgtagaatttccttctgtattgaccggctcgtatttttcaccgccaacaagcatatagtcataattcgggctgctccatacgatcgttgctgtcacttcgccgtcctttaccaccaggttcgccggtgaatccacagtcgctcttccgcttccgccttcaagtgtcacatcagccgtatattcgccgtcctccagaccaagctcctctgccgttaccttttcaccctcacctgcctgcgcaccctcatcttttaccggatttttgacgctgaccttgtggtcataccatttgccctttttgccgatggctgccacggtaaactcttcaccgatcgccggtaccgggatatcaaagccataaacctcctccgacattccatctttatacgttacggtatctgtggtcggctcaagaagctctgctccgtccttttttgcatcctcggaggttccggcgaaaaggttcaggaagccttttccgctgaggcttacatgaatcgtcatcttgccatcttttaccgtcagcacacccttgccgtcgtttgcctcattgacatggaacattgagctgtctgtatcaaactcagcggtataaacaccatcctcaagaacctctcctgttgtggcctccgtgctgtcctccgatgcctccacggcagcctcggtgcctgcctcagaagtaacctccgtcgtgctttcttccgcaaatactgccgggcagccactcattaaaagagatgccgatgtaaccagtgataaaaaaaatgctgtagagcgtttcataataattcctcctgtattttgttttctgtattttgttttccgcatttttccaaaattctctgcagatattttgctgctaccaaaagcagcccggatgtctttcaacattccgggcggcctttttatgaaagcttcaggacaaaagctgacttatcttattttgcgatggagtcgattgcgtcctttgtatgtgcaacatacagctgctcaactgcttcgattcttccaagtccttcaatctgaacatctacgctgtcaaatgcgcctgatcctacaaactgagttttccaggaatcctcgtcatcgcctgccatatcgttgtttgcatgatcacctgctactaccatcagcggacgaagaattactttcttgaatcctgcatccttaaccttctcgattactgcctcgcatgcagtatcttccggctcaccttcaacggttccgatgaatgcgtttgtgaatccgagattctccatctgtgtctgcatctgatcgtaggttacatttgcggtatgagaggtaccatgacccatgaatacgaatgctacgccatctgcagcagctgctgccatgtcatcgtatcctgcctcttttacagctgcatctgtaattgcctgtgcaacggccttcttgtcatcgttgattacggtagcgtcgtcgccaacctcgccaagcatcggctcagcgatcgctacggactcaaatttatccttgtagctgtcaattgcctctaccatctcatcgtactcagctccatgcatcagatgggtcggctgtacaacaaggttctttacgccattatcaactgcacgctgaagtgcctgatccatattgtcgatcttctcatcgtctcttgcctgtacatggttgatgatgatctgtgcagtaaatgctcttcttactgcccagtccggataagctgtctgcagtgcatcctcgatgcccttgatatcctcggcacggctgtcattgaaggaagtaccaaagcttacaaccaggatctcattgtcaccaatctcatctgcattccgcggatcatccttggaagcatcacctgtatcgcgtccgaagtactccgggcttgcctcttcgccctctaccagctccttctgtgcatcggtcagtgcatcccatgcttcctttgcagcggtgcagtctgcatccgttgtatcggttctttcctgtacgtaaattttatcgatcaaagctgcaacattgtcagcagctgcctgatctgcatcttctgtgccggcctcagatgctgcctctgtaacagcctctgtctcctctgcatagatgccaaccgggcttaccatcgtaagtgtggatgctgccatcatcattacaagtgcttttactactctgtttttcatgtctttttcctccttaatcttcgcggtagtgtcaaaaactacctgtttttttgttttaaaatcttttaaaaaccttgat

SEQ ID NO: 2106 - DNA, 32759 bp, Unknown
  16S sequences of unknown bacteria
caagatgcacttgccgccatccagcacggcaagctcatccacgctcatcagctccttgcccaatttctgatagttcagcgaatgggaaacctcgcggccacggctctcgccggtgttatagctgtcgatggtttccttgcccagcgccgccgccagctctttcagcgtaccgggttcctttccacccaaaaagatggaacagtccatgttgccgatgatcgtatccgcgctgtctttatacagggctttgagctggctctgtgcctgcaagacaaggcagcaggagatttctctggaacggatcgtcgcaaccagcttttcaagtcgcggtatctggccgatattcgcggcctcgtcgatcaggcagcggacatgaaccggcaagcgaccgccgtacacatcatctgccttttcgcaaagcagattgaaaagctgggtatagcacatggaaatgagaaagttaaaggtatcatccgtgtcggacatgatgatgaacagggcggttttccggtcgcccagcgtgtccagttgcagctcgtcataggccgtcagctcccgaagctcctgaatgtcaaagggcgcaagccgtgcgccgcaggaaataagtatgcttttcgcggtcttgccggcacttagcttgaatttggcatattggcggacggcgaagtggtctggcttgcgctttttcagttcctcgaacatcaaatccaccggatttttgaagtcctcatcgtcctcgcgcacctccatcgcattgataaactcaatgagcgtagagaaattctgttcctccaccggcgcttcatagtggatgtacccgataagggcggtgtagagcagcgtttccgctttcacccagaaatcgtcaccggctttgccctcgcccttggtgttggcgatcagcgtcgtgaccagcttcaaaatgtccttttccgagtggatgtaggcgaacgggttgtagtgcatggacttcttgaagttcagggaattgagaatcttgatctgatacccgttcttttgcagcgcatggccgcaggaaaccacgatgtcccctttgggatcggtgacgacgaagctggtgggataggtttttgatgtgcattggagcagattgggcttcaaccaaaagcgggtcttgcccgaaccgctgccgccgacgatcaggacatttttgttccgcgccgtttttgggtctttggggcggctgttcatcgtcagccgctccgtctgcgtgagaatgatgttgttttcaaacgcgggatcgacgtaaggcttgatgtcctcggcggttccccaacgggcgctgccgtactccagatttttgcggaatttcttggcgtttttgcccttgatatagaccgccagccgaatagcgatggcggcggcaacgcccacgcacaggtcaatgggatgaaagctggggacaagggagtggaacgccgtgttcagaccggtcataatgttcagcagcttcgtggaagcgtccgaaccgggagccagccgcaccacctcgctgaccttggtggccagcagcgcgatgaacacatacgggatgttgggaagaatgagctttttgacgtggacttgcttcatcgttccagctccttccgctttgtcctgtccaccacagccgcctgaatgagcgacttgaagtgttgcagcttttccagcaccgaggggcgttccgctttcctgacctgcttggcggtatattccttgaacgcggcggtcatggcgtcggcgtccggcgctttgaagaacaccatgtatcgcttttcgcccttgaccttgaatggagcgaagtcaatgccatacttccgggcgatccgattgaatgagccgatattctgatcggtgacttcaatgctctgcaatcccttatccttggcggcgagctgcttgacggtcatttttccgtggggattggccttgctgtactgatgcttctgatggccgttttttagctgctccagcagcttggtaacggccttgcgaaattcctgttcacccagctttccgcaggagatcatcagggatacgattctctgttcaacttcttcctgcatgacttatcacgctcctttcctccgatttgcagggagaatgccgggacactaaggcggtaccaccagccggtgcagaagatgctcattcatttctgcgcccctgtcccttgacggtcaggatgccgtccagcgtggtggcggtgatccgcaggcgctcggccacggcgatgtcgtttttcacgctttcatccacggtgctgccgcaaaccaccagcacacgagcgcggcgcagatactcccgcgccatgtcgatgcagtccttgtgctcctgcggaatctcatcgcgcaggaacagcggcagaaacagcgtggggcagacgggcgaaaagcccgcgtcatagaccgccctgcaatacttggcggcattttcggtgttctcaaactcattctcgctccacggagcggtgatgtaggcaagggggcgtttcatcggtatcaaatcctttctcccggaatcgggcatgaaaaatgacggcctttaggggccgccgtgaaaatcgtgattgaccagcatggcgtagtggttgtcgatggtggaaacggaattgaacagcgccgccatgagataggctttcgtattccaaacgcgggtggtgttctcgcggataccgtccatgaccttttcgatgtgcatggaggtgatcttttcaaagcgctgttgcacgaagccggtgggatactccgcatcccgcccgatcttgactgtggggctgcggttcatagcaacctccagcataatctccaccagctcatcaagctgcatccggtcatactgctgacagagaatgtcgtattcgatttgctctctgatctccgcttttttctcaaatccgtccgtcattccgtccgccgcaggcagaaagaatgaatgagtgcttgatagatcagtatttgatttttgagtattagatttcttagtatttaattgcgcgggattatccgtatccggtgcctccgtatccgggttatccagatacgggttttccgtatctggtaaagtcgtatccggtggagagggctttcggggcttctcgaagatggtgtactccgtgtcggaaatgcgcccgtccttgccgcgaagctgacggcggatgatgtagcccgccagctccagctccttgagcgttttcccgatggcgtccacgccctccttgcagatcgcagccagcccccgcgtggtgtaattccactcgtcggggagggagagcatcatggagagcagccccttggctttcagggaaagattgctgtctttcaggtgatggttgcacatcaccgtgtaatcccgcgtccgttcaacgcgaaatacagccatattgcttcaatcctttccgcagggcagtcaacctgtttggccgtcctcctcggcaaaccgcgtatccagccgctttacgctccagttctgcttgaactgtcccagcgggccggtgccgaactgcgccagcgcacggcgatccagctccagcagcttttcccacagctccgggtgatgctttcgcagcttccgcagctcgtcgatacgctggaacgggcagcaccagcaggacgcacggtggtaaatctcatacagcccgccgaagtcaaagccacggtcgtaacaggcttggagcgcctgcgcctccgtgatgccccattccacgaggggataccgctcatccttgcagcgccacgcttcatcggcggcgataccgacatagtggatcgcgcccagctcgcctttgagccggttgacctccttggtgatgaggtgcgttttgagctgcccggtacaccagcggacgcggattcccggccagccgttgccgtagggcgggatgcccagctttgcacggttttccagactgcggggcttctgcttgggttcgtcgaacatcaggtattcaaagcccttgggatgccgcagcgtggtaatatggatgccgcgctcccggaaaagatgctcgtccagtttggcaaggtgttcgtacatttccgggaactccatgccggtgtccgctgacagcaccatgtcgatgggcatatcccgttcgatcatcaaaagcagcatggcggtactgtccttgccaccggacaggctgacggcgtgaaactgcttgccgtttgcgttctgaatggtttcccgcatggggaagccgctccgttttcactcctttcccacatcacagctcatagatgggctgctcgtgttcgtagtagggatcgcacagggcggcaagctcggccaccaagtcctccaaatccagagaaatctcgctgtctgcccaatcgctgcccttgtagacgcggtactcggtgacgtattcgccttctcctgcgttcacgctgaatttggcaacgacggcaaagcccatatcctccagcagccacagctccatcgaccgggcggcaaacaccgcgccgatatagctgtcgcccacgtcctcatagagaagcgtcgctcgctgcttgaacagctccgagctgcgatagtccaagctcagcgcatttttgccgtctgcgcggtaggcatagaccgtttcagccttgttccaaacggcttgcagcagggcgtgatagtcgatgttttccagaaactcgtcgatctccgtttccgtgtagccgacctccgtacccttgcggaacagcgtggtcagcgctttttccagctctgttactctgctcatggtaattcctccaatcattttagtgacgccgctttttccggtcaggaaggatatgcccctcaatgacggcggcgtgtttgcggattttgatttctccgcgcctctcggatgcctgcgccttggcatatcccacgtcggagaggaacagccgcagccgttcgcccttttcacccacaggagatttccatgacaggacatcaaaaataatcatgtggcgggtttcgtccataaagcgctccagcgcaaggatgctgtgcccgccgacaaaatcatcagcgttcatattcggcacctcgcgctctgatctgaaaggcggcaagcccatagcgggcgatcagagtggcgttgacgatcaggcgcagcgcctccgggtcaatgacctccggttccgccaagtccgccatcgtgacggcctccgtcttgtcgcagaggtcgcgcgctgccatgaacagtgcgtagttgtgcggcgaggtgtttttcaacaccgcatagccgaactcaatcccgtccttgcagaagcagtttgccgtgcggcggtaaatgtcgtcgttggaggtcagcaggtacatggccgcataataggcgttggtatccctgcggcggcggtagccctgcacggcgcattgatactgcattcggcgctcatgctgctcgttgctccaaaggcttccgggatagtgcttgatcagcaggttcaggcgctggaacaggcggcgttcatggggaaatgtctctaagactgcctcgcggtagccgaccacaccggcctcgatacgctcggccagccacgggcagcgcagggcggtacagcccagctttttcacatactcggtacagagctggcagctcacatccttgggcgtgtatttgaacgtgttgatatacatggcgtcctccttttggcatgaaaatagcggacaaacaaactgcttgtccgctcaacggctctggtcgcgctggcgctttttctgccatgcgtccagtaatttgaagatggtgttctcgatctggaacggggtataggaacgcgggaagtatttgcggagcttttcaccggaaagggtaatgtcgtttttctccggtttcttctgctccatcataatggagagcatggtgtcctcgttcagctcgccgctctgactgagctttttcatccgctgcgcctgcgagagcgagggggtggcctgttcgctgtcgatggtttccagaagcagcccctgctccttgggtgtcagcgccgcgatctgataagcgggactgagggcgattttcttctcgtccaccatctgctgaagctccgggactaactgcgtcaaggcgatgtagttgcggatggtatctccgctcacaccggcatcctgaccaacttcatcatcgctgcggaacttcgccgaaattttcggcgaagtcagatccgttcgtgcgccctgccgcttgatggcctccatcttcatcttgtaggctttggcgcgttcggaggggagaatgttctcacgctgaaggttgctgtccaccatgatgatggtggcagcgtcccggtcaatgtcgcggacaatgacgggcatggtggccagccccgccagctcacaggcgtgtttgcggcggtggcctgcgatcagttcatagccgccgtcctcccgtggccgcgccagcgcggggacgaggacgccgtactccttgacgctttcggcggtttcctgcatggacgcatcctcccgcacctgaaaggggtgatccgggaatggatgcagctcggagagcggaatctgaacgactacttcctgctgcggtttcggctttttggatggcgcgggctttttgcccggttctttctgcgctgttttttcagtcatcgtgttcctcctgtcggcatctgattttgggtacaaaaaaaggacatttcttcttttcagaggaaatgtcctgatttcttggacgggctgacagcccgcccaaacggtatttagtttttgtcgttactataacaccccctacgatataactacttcgcggctcgatttttcggtttggaaaaggatgaaaaaccttgccagataaccgaaaacccttgatatacggggcttttccggtttgtcgtaattataccgtaagggcacagttgtgcaagcctgcttcttgcaaacggcgtaccgctgaaacaaattcaagagtggttggggcacagtgatttttccaccaccgctaacatttacgcccaccttgactacacttcaaaactgtcctcggcaaaggcaatggtcagcggaatggcacttcccgaatcggtgaatttcggcagcaagtgggctgaaatttcagctgatgacggaaagaactgatttttttcggttcgaatacgccaaaatgccgaaaatcgccttgttctttccaaaaaacggactgttctttccatagttttgagccgattttgagcaaacgagcaaaaaagaaaagtccggcaaacccgcttgtttactggactttttggcggagagttagggattcgaaccctaggttccttttgggaacacagcatttcgagtgctgcaccttcgaccactcggacaactctccgtgtatgtaattccgcatttcttccaaaaacttttggaaagaactgacggaaagaacaacaaaatattcaattttcgaaccggagaaaaccctgtatttatgggctttttaagcggagcaaacagccaactctacaaaaaatttcgagtgctgcaccttcgaccactcggacaactctccgtgtctattttcatccggttttctttccaaaaatttgcttaaaaattcgttggggagaaaacaggagagaaagcaaaaaatattcgattttgagattttctgtgttgaggaatatcaaggagaatcagggggacgaaattcccagcttctgccgaaatttcgagtcagcctcgttatgaccgcttcgatacgtctctatattcggctaaagcacggaaaaacacgctttgcgcatactattttatcggttttgagagaaaaagtcaagcgttttttggcaaaaaggttgacatatacagggcaaagcggttacaataactgtgtattatgatgtttagaccttttgttttcgcacggctaaagctgtgcggatatgacccggaaagtgaggatgccgcttttgcggcgaatgcttatggatatgaaaaaatggatgcgctgcgctgcggcggtcgttttgagcgttttggtggcgttcagcgcgacggcgtgctcgcagccggcgaatattgaatcaggcgccgtttcgcaggaatacccggtgaccgtgaacgaagtgacgttaaacgcaaaaccccagaaggtggcggtactctccggcagtttggcggatgtggtactggcgatggggtacgagacgagcttatcgcttgcaagcgatgactgtacgcagcccgatttacaggtgctgccgaaggtttccgcaacggatgcgcagagtgtgatctctgcaggtgtggatctcgttttggcggagacgatggacgacagcgaaaagcagacgcttgaaaacgcgggcattacggtgctccttttgacgcgtgcgaaaaaccgcgaggattttgaacgcctgtacgcgcaggtgggcacggctttgaacggcggctctacgggttataatgtgggcgtgaaggcagcacagaagatcttctcttcgctcgacgacctttcgcgcttggcaccggagagcaaaaccgtggtgacggcgtgctatatttcggatgtgaacggatctgcggtgacgggcgatgagcttggcagcgtgatgatgtcgtatatcggtctgacgaacatttttaagggccttacgggcggcacgttcacgtttgacgatttgcgcttgagcgacccgacgatgattttctgctcagaagatgtgcgcgggcagatcatgcaggacgcgcagtatgcgaatctttcggcggtaaaaaacggccgtgtttacgccgtcgacccgaattatatgaattggcagggcaagacggtgtacaacgcgtgcatcgacatgatgggccttgcataccccgaattgacggaggaaaactccgttgcgctggagctggattccgagctttcggaagcggaagcgacggcgagcccctcgcccgcgccggaatacacggcgatcaaatccggcacggagggcgacgatgtgttcgcgatgcagcagcgcttagcggagcttggctatctgacggtggaatacaccggcatgtatggcgaagtgacgatggaggccgtaaaggcgttccagaaagcgaacgggcttacggcgaccggcgaagcagatgccgagacgctgacggtgctctattccgcggaggcaaaagccgcagacggtgcggaagccacggcgacgccggagccggaatcggaaacgagcacggcggagggcaccgtgacaacacacgaggatgcgtaaaatttgagagtttgaaagggcggctttgccgcccttttttgtattgactttttctccgcttttttttataatcagaagcaagatgcgcttttgcgcgctattgtattgagtttggggcgcaggctccgggggaggaaacatgtttttcacaagagacaagagcttttacaaaacgctcgtcacgctcgcgataccgattgcgctgcagaacgccgtaacctttgcggtcggccttgcagataacgtgatgatcggcacactcggcgacagtgcgatttccggtgtgtatgtgggcagccagctgcagacgctgctgcaaatgttcatcggcggcattgagggtgctatcctcattttggctgcgcagtattggggtaaacgcgatacgaaaagcatccgccgcattgcggccatcggtgtgcggtttgctttgctcatcggtttggtcattacggtgacggcgtttttattgccgtcgcagatcgtatcactgttcacgagtgatgcttcggtcattgaatcgggcacggtttacgtgcgcgtggtgagcctttcgtacattttcttctgcatttcgcaggtgatggtggcgacgatgcgcgcggtggagacggcgaagatcggtctttacgtgtcatttgtgacgctcattgtgaacgtcatctgcaactatattttgattttcggtaagcttggcttcccggcactcggtgtgaccggtgcggcggtggctacgctgttttcgcgcatcattgaagcggctgtgatggtcatttacgtgcgctgcgtcgataaaaaactgaagcttcgctttgccgacctcttaaagcgcggcggcgaattgacgcgcgatttcctgcgctacggtctgcctatcatgggagggcaggtcgtatggtcggtgaacatgctggggcagacgatgattctcggccgttatgacgcgggcgtcattgcggcggtgagtatcgcgaatatgttgcacaacatgatgtacattgcaatgaacggcctttcgagcgcggtgggcattatcaccggcaagacggtcggctccggacgtatggaaaaaattcgcgagtattcccgcacaacgcaggtcattttccttggcctcggcattctttccggcattgcggtgcacttcctgcgcgacccgttcatcgggctgtacggcgcgagcgatgcggccgtggcgtatgcgcgtgagttcatcaatgtcatttccgttacgattatcggcacgtgctatcaggcggcgtgcctgttcggccttgttaaatccggcggcgacatttcgtttgtcttccgcaacgacacgatcttcgtgttccttgtggtgctgccgtctgccattatcgcgtcttacctcggtgcgccgccttgggtggtttttgcgtgcctcaaatgcgaccagatcttaaaatgcttcgttgccgtggtgaagatcaaccggtataactggatgaagaacctgacgcgcgagacgaacgaagtgtaaaactacgacttgaagggaattttcatgaagcaatttcgcggagccttgctcctgacgatcaccgcccttatttggggcacggcgtttgtagcgcagagtctcggcatggaccatttgggcccgtttgcgtttaacggcgtacgcaatttcattgccgcgctggcgcttttgcccgtgctgctgtttatgcagcacaaagcgccgaaaaaaacgcagacggacgaagagaggaagcagagccgcaagaccctgtgggtgggcggcgtgctgtgcggctcggcgcttgccgtggcctctaatttgcagcagttcggcatcagctttacgacagtgggtaaggccgggtttttgacggcgctttacatcgtgattgtgccgatactcggtttgttcctcaaaaaacgcgtgcccgcaacggtttgggtgagcgttgttattgcggcggcgggcacgtatttgttaagcgtgcaggagggcttcaccatcgcgccgggcgacctgctcgtcattttgtgtgcgctgggcttttccgtacatatcctcatcatcgaccacttctcaccgatggtgaacggcgtggcgctttcgtgcgtgcagtttcttgtctgcggcattctttgcacggcagcggcgctgtttacggagacattcacgcttgcggacattttaaaaagcgcggggccgctgcttttcacgggcctgatgtcgagcggcgtgggatacacgctgcaaatcttggggcagaaggataccccgcctgcggtggcgtcccttatcatgagccttgaatctgtgtttgcggcgctttccggctggctggttctcggccaaagcatgaacggacgcgagcttttgggctgcgttttggtgtttgcggcggtcattttggcgcagattccgcttgaggcgctgaaaaaggaaaaagcggtgaataagacggcataaagtaaatcggggcatttccgggaaccgtttcgcggttttctgcgggaatgcctttacttttgtaaattttatggtatagttgtaggtagaacctctttgggtaaaaacgcgcacggcataaggccggcgctttattgtattgaaaggatgaatattcaaatgcgcattatcaaaacgaaaacctatgaagaaatgagcgccattgcagccggtatcatcggcggccaggtgcttttgaagccgaactgcgtgttgggtcttgcaacaggctcttcgccgattggcgcctacaaagatcttgtaaagagctatgaggacggcatactggacttttccgaagtgcgcaccgtaaacctcgacgaatactgcggtctggacggtacgaacccgaacagctaccgctatttcatgaacgaccacctctttgaccacgtgaatatcgacaaggcgaacacacatgtgccgaacggccacgcaggtgaccttgaagaggaggctgtgcgctatgagagctttattcagtctctcggcggcatcgatctgcagctgctcggcatcggccacaatgggcatatcggctttaacgagccgacggacaacttcccggcgacagtgcacaccgtacagctgacggagagcaccatcaacgcgaactcccgtttgttcgagcgccgcgaggatgtgccgacacaggccatcaccatgggcatcggcaccattatgaaggcgaagaagattcttctcatcgcaggcccggataaggcggagatcgtcgaaaaggcttgcttcggcaaggttacgccggaggtgccggcttccgttttgcagctgcacccggacgttacggttatccttagcgcggaaaagtaatttcgtttcggcaaaactgaaattcggtagttgactttaagattaacttatgctataatgtagacagcaaagccgcaggaagcggtaacggtcaaaagatcgcgcggcgaaacgccgtttgaaagtattttaaagccactttaaaaaatagaccacgaaggtcttttcgctcggtatgggcggaatgcttcgtggtctttttgtatcagggagggtatttcaatgaaccgtacaaacagtaaattttccgttaaaaaccttgtgctcggcgcactttttctggcgcttgcgttagtactgccgttcttcaccgggcagatcccgcagatcggcgcaatgctgtgtccgatgcacctgccgattttgcttgcaggcttcgtatgcggcggcccggtgggcgcggttgtgggctttatcgccccgctgctgcgcatggtgatgttcggcatgccgccgttctacgtcgccatcgctatggcgtttgagctgctgacatacggacttgtaagcggcatcatgtaccgcaaggtgttcaaaaagcagaccgtcggcacgctgtacggcagccttttgatcgctatggtcgcgggcagaattgtctggggtatcgtgaaggtgattctcagcggcatcgcggcggacgcgggcgcgttcacatttgcggcgttcatctccggcgcactcttaaacgcaatcccgggcatcgtggtgcagcttattctggtcccggccgtcgtcgtcgccttgcagaaagcaaagctgatagaagcaccgagcgcggaaaaagcgtaagcactatgggttccctgaaagggcggcattgccgccttttttcatgcacaaagcttgcactcacctcgccatcgtgctatgataatcccaaagagacgaaaagcaggatgggggaaagactatgtttacggatgcgttcggcaaaatttggtataagggcaatctgcacacccatacaacgaactcggacggcgcgtatacgccggaagaaacgattgcattatacaaatcaaaagactatgattttcttgcgctgaccgaccactggttccacggtgaggggcggcaggagggaagttttctcctcttaaacggcacggagttcgacgtgggcagtaccgtgcaggagggcatttaccacatcgtcggtatcggcatggagaaagcgcctgcgcttacaaaacgcgcgccggggctttccgcgcagaagatcatcgatgaaatccataacgtgaacggcattgcaatcttggcacaccccgcatggtcgctggatcgcgcttcggaggtcgtgaagctgtacggcattgacgggtgcgagatttacaacaccacttcgggcctgccgtggaactgccgtccgtattccggtgtgtttttcgacgaaatggcgcttttggggcactatttgccgtgcatggcggcagacgatgcgcatcactacacgggcgacgagacgcgttcgtacatcatggtgcaggcggatgaattgacgcgcgagggtgttttggcggctatccgcgcaaaccgcttctacgcgacgcaggggccgaatttccgcgttgaaattgaaaacggaacggtcacggtgcatacctcgccggtgcaggaggtcgtgttcttcaccgataccgtttgggcgggcgaccgcgcgacggtaggcgaaaatgtgaccgaagcgacgtataaagtgcagcctacggacacgttcgtgcgcgtggagctgaaagacaaagacggcaactgcggctggtcgggtatttatcccgtcaacaaaaagtaaaaggaaaaggtctgctcaccaaaacggagcagacctttttgcgtatgaatttaaagcgtgatttgcatgtcgtcgttcacaaatttgacgggcagcggagcgagcgtttccgcaagctgcatgacgttcgggatattccacggcgcgtagtggttgacgagcacctgctttgtgggacaggcggccaaaacgggcgcgtaatcggtcgccgggaagtgtgcggcctcgcagatgacaaattcggtcggcttttccttggcgattttcggaaaatcgacgttgggatgctttaagtcgcccgtgaacagcacggctttgccctcggcttccacgaaaaaagcgtgggaatccgggcaatgctgcgtgggaatggcggtgacttttaaatatccgtcgtcgaagattgtgccgtccgtgacctttttaaagcgcaggtcgcgcatttcgcagtgattcgctttgagccatgcacggatggcctcaacgccctccaagttcggcaggcaaatttcggggtcggcggttttaaaataccagctgataaggtcgacgaacgagatgagcccgtttgtatggtcgccgtgcatatgcgtgatgaagatgcccttgacgtcctccacctcgatgccgcgtgtgcgcagggcatcgatggcgttgacgcccatatcgatgaaataatatcggccgttcgtttcgatcaaggtgcaggagcagcggcgatttgcctccggcacgccgtggcttgcaccgagaaatgtgatctgcatagagtttaaattcctttcttttcaatacttttagtgctttctgagattttcaagaatttgcgctgcaaattctgtgggagaccccctaattgggtctcccacactttaacagtccgccggactgttaaagctcccatcctgatttttaggtaggcaaaagagtttcgaactctgcggagttcgaccaaaagcgttgcctttggatttcacgaccgaaccatgggttcggtttgaccttcatttgaaaaaaggtcgatcaaaaacttttgcgtcgcttcgctgtgttcagtttaacacgtttatgtatcgactgcaatgcgccgaattcacagattttcgctttcgtttttgtctatcacagctttagggtttccagcagacggttcgtttctcgctctacatggtcgtagtcgacgaacgggcggtagatggtttcaatcgcgtcatgtgtgcgcttgcagagcctgagctcctccacggcctgcgcagtcaaggtctcggcctcctgcatggcgaacgggatgaagtccgaaagcgggctcaaaaggaactcgtttaatgtgctgcgggtatcgtccgcggcacacagcatggtgtcgccgatgcgcacgcactgcggtgcttccggcgtgagcggatgcaggaaaatttcagtctgtgtattctgcacgagcttcatggcttcatttaagaacaccgcgcccaaaacaccgggcaggtacacggtgctttcggcatcctgtgtttctcggaaatccgcaacgccggcgggcgtgggggtcgttaaaaatagtgtgcgcggtgtgccttccttcggcagtgtgaaaccctcttttaaaaatgtgcggatcatggtaaggtcggcagaccttgcggcttcgcttacggcggcacggcgcaggctgcctgcggcggaaaggcacgcgaacgcgtttttgtagtgcgcgcggttttcttctgcaaggacaaaaagctcttcgcggcggcgtttgaagacctctttgtgcaaaaaccgtccgagatccagcgtttcgccgtcgatccccggcatggcggggtctatggtgtgcggcgcggtgccgtccagtaagacgagccgccgctgcgggatacgcacggcgtcaaagctttcggggtcgcttgcgcagcgaaattcttcgacggtaaacccgtttgcccgtgcgatggcggcgcattttttcatcaatgtgctttttcctaccccggggccgccctttaaaacgtaggtgtagtgcggctcgctccacggcggcacgatgccctcaaaatgcccgatgaatccgcgcccggtgttggcgcccggaaaataccttcttttgccgtttgacataggaaaccctcctcatttctcatcggtgagttatatgcgaaaagccgttaaaatagtcgccgcggacaaaacaaaaagtggaaaacccgtgcggaaaatggctttcccacacaagaaaaaccgcgctatgtcacgaattttttacaatctcgccgcggtgctgcgtattgaattgcgcgcgcgcctgtggtatcattaaaagtatatttgggtaattttgcggatatgtaagagctgccgaaacaggcggcatttatgcggtaccggtatatcgatgcggaaagggtaccgcagaaaggatgaatcaacatgatgagaatcggtttggacgttggttccacgaccttaaagtgcgttgttctgaacgagcagaacgaggtgcttttcaaaaaatatgagcgtcatctttcgcgcatcgtggagaaatccgttgagatgctgcgtgaagtggcagagcagtttccgaaagaaaaggtgcttttgagcatttccggctcggccggtatgggtcttgcagagcgcagtgacattcagttcgtgcaggaggtgtacgcgactcgcattgcggtgaaccgccttgtgccgggtacggatgcggtcatcgagcttggcggcgaggacgcgaagattttgttccttacggacggcaataacgcctccggccttgaggtgcgtatgaacggatcctgcgcgggcggcaccggcgcgttcatcgaccagatggcgacgcttttgaacatcaccccggatgaactcaacacactttcgaaagagcatgagaagatctacaccattgcttcccgctgcggcgtgttcgcaaagagcgatattcagccgcttttaaatcagggcgcgcagaaaaaagacgtggcggcaagcattctctacgccgttgtgaaccagaccgttgcgggtcttgcgcagggcagagaaatcgcgggcaaggtcgtatacctcggcggcccgatgacgtttttgagcgagctgcgcgtggcgtttgataagacgctcggcattacgggcatctgcccggaaaattcgctgtatttcgtcgcgttgggtgcggcgtttgcggcggacggcaatgagacgacgcttgcggagatcatcaaccgcattgcgcattacacggcaaaggaagaataccgcgcctgcccgccgctttttaaggacaaggcggattacgaagcattcacaaagcgccaccttaacgccggcgttaaggtgcgcgacacactggaggacggcgagccggtttatatcggcatcgatgcgggctccacgaccgttaaagccgttgtgacggataaggacggcaatattgtttgttcgcgctatatgtcgaacagcggcaaccctgtcccgctgatgcgtgaattcctgcttgaagtttacacgcgtttcccgcaggcgaagatctgcgcctgcgcggcgaccggctacggcgaagacatcatcaaaaacgcgttttccgtcgattacggcatcgtagagacgatggcgcatttctacgcggcgcgcgcgttcaacccgaaggtcgatttcatcatcgacatcggcggtcaggacatcaagtgcttcaaggtcgaaaacggcgtcatcgacgatattttcctcaacgaggcttgttcctccggctgcggctcgttcctccagacgtttgcgggtgcgctgggttactccattgaagattttgcaaagctcggcctgtttgcggatcgcccggtcgacctcggctcccgctgcacggtgttcatgaactcctccgtgaagcaggcgcagaaggacggcgcaacggtggagaacatctccgcgggtctttccatcagcgttgtcaagaacgcgctgtataaagttatccgtgcggtcgattccaaagcaatcggccgggagatcgtcgtgcagggcggtacgttcctgaacgacgccgtgctgcgcgcgtttgagcaggagatcggccacgatgttatccgcccgaccattgcgggcctgatgggcgcatacggtgcggcactgtatgcacacgaaaaagcacaggctgcgggtaaggcgacggagctttcgacgcttttgagcaaggaagcgctcgaagaattcacccacagcgtaaaggccatcacctgccgcggctgctccaacagctgcaagttgacggtgaacaccttttccggcggacgcaagttcatcagcggcaaccgctgtgaaaagccggtgacgggcgtgaaatccaccgaagcgcagtacaacatgtttgaagaaaagcgcaagctgctcgcgcgctatacatacaaagacacgggcaagccggtcatcggcattccgatgggcctcaacatgtacgagcttttgccgttctggtataagttcttcacaacgctcggctacgatgtgaaaacgtcaccggcgtcgaaccgccagctttatttaaagggtcagcacaccattccgtccgatacggcgtgcttcccggcaaagctgatgcacggccacgtggaagcgctgcttgacgagggcgtggacgcggtgttctatccctgcatgacgtataactttgacgaaaacctcggtgacaaccactataattgcccggtcgtcgcctattacccggaggtcatctccgccaatatccagaaattaaaggacaccgtcttcatcggcgattacgttggcctgcaccgcagacacgacttccccggcaagatgtacgagattttacgccgccacttcccgaacggtacgttcacgaaaaaagacgtgaagaaagcatccgacgcggcgtatgcggagtatgacctctacatgcgcgccgtgcgtgccatcggcgacaaattcctcgcgctcgccgaagaacagcataagcccgttatcgtgctggccggtcgtccgtatcatgtggacccggagatcaaccacggcattgacggcctcatctgcgactgcggcgcggtcgttgtgacggaagacgccgttgcgtgcaaggagaagaaattcccgacgaaggtcctcaaccagtggacgtatcactcccgtctatacgcggctgcaaagtacgttgtagaccgtgcggataagcgcgtgaacctcattcagcttgtctcgttcggctgcggcgtggacgccatcacgaccgacgaggtgcgcggcattctgcacgacggcggcaaaatctacacccagctcaagatcgacgagatcacaaacctcggcgcggtgcgtattcgtctccgcagcctgtttgcggcgctggatttacagtaagggaggcgcacgaatatggcttttaccgatcgcgttgaatttacaaaggaaatgaaaaaagagggttatacgatccttgcgccgaacatggcgcccatccatttccgtttatttgaaaacctattcgcttcttacggctacaacgtggagattctccagacgcgcggccgtcagattgtggacgagggtctgaaatatgtccacaacgatacctgctacccggcgctgctcaccatcggccagatgatggacgcgctgcacagcggcaaatatgatctgcataaaacggcgctcatcatcacccaaacaggcggcggctgccgtgcttcgaactacattcaccttttgagaaaggcgctggaaaaagacggcctttcgtatattccggtcatttcgctcaacatgtccggactcgagaaaaacagcggcttcaagctgacgctgccgatgatccgtaaggcgctgggcgtgcttgcgtacggcgaccttttgatgctgctgcacaaccagacgagaccgtatgagaaagaggcgggcgcgagccggaagcttgtggacgattggacgaaaaagctgaccgatatgttcgcaaaggaaaagggctactccgcaaaggagatggagacgatcctgccgcagattgcggaggattttgcgaacgtgcccgtgaccggcgaaaagaaagtgcgcgtcggcgttgtcggcgaaatttacgtcaagtattcgcccatcggcaacaatgatctggaagagttcctgtttagccagaactgcgaaacgatggtgccgggtctgcttggcttcatgctgtttaaagtcgataaccgcatggaagatattaagcttttcggcggcagcaaggcgaagtttggggttgtgaagatcctctttgactacctcgtcggcatcgaaagccacgttatccgcgccgtggagcatgcgaacaccgtttctaaccgcttcactgtgccgtcctcgtatgcgcacctcaaaaagctcattacaggtgtcatcggctacggctgcaagatgggcgagggctggctcttaaccgcggaaatgatggagcttattgaaagcggctacccgaatatcatctgtgcacagccgttcggctgcctgccgaaccacatcgtcggcaagggcatgatccgcagcctgaaaaacctgtacccgaaatcgaacattgtgccgattgattacgatccgggcgcgacgaaggtcaaccaagagaaccgtatcaagctgatgctggcggttgcaaaggaaaacatggagcaggccgaaaaagagaacgctccgaaagcggaagaataagataagctgaaaaacgcctgtcctttttgcgaggataggcgtttcccgaagggcggcattgccgccctttttctctattttctcaaaaccggcagcttctccaacagcgggagtaaaacctgcagcaaaagcccggtacagatgccgcagacgaccgaatacagcgcgagtgcgggaatataccccagcgcgccgaagccggtcagccatagcgcgacgagcagctgagcaaggttgtgcccgaacgcaccgcagacaccgatgaagaccggcgtgaattttgtttttttccacagtatgcccatgatgagcgtgctcaaaagcccgccgcacaggctcatcagcccggcggaaacaccacgcgtcaaaaacgcgaacagacccttgatcgccgcaatgaacagcgccgcgggcaggccgatagcgccggcggcgaacatggtgacaaggtttgaaagcccggcttttgcgcccggcggcatgcccggcagcgggggcaggagattttcgaggattcccagcaccagtgccagtgcacccaatagtccgatgagcgcgatgtgctccgtttttttcttcatggatgtcctttcaattttggggtgtttttttctaaggctcgcgttggctcgccctttcaagggaccccctaattgggtcccttgcggctaaactgtccactggacagtttagcctatcctcctgattttgaggtaggcaaaaagatttcgccatttgcgaatggcgactcagggcgttgccccgagacctcacgaccttttgaaaaaggtcgacgaaaactttattcgtcttgtttcacatcacagcagtgtaagctgttcaacttctacggggatcaagtggatgacctcaagtccctcttttttcgctcttcttacggtataagcggtgccgccgcgtttggcggcagggtcgcgcagatagcagacgcagtaaccgctgcgcgataccatggcgtcgtcacgccgcagcatacagtccggcgtataccgttcaaaaaggaattccgcagtatcggcctgctttaaaatttcacggtagcggcgcttttccgcaaaatgccagcggtcgctttgccctttgcacggcaaaatgaggtgcagccgcacgggcagagcttcgcgaattttcaagacggcttccgccgccatggtgtcaaatcctcttgcgccgccggtgtaaaactccgtcacgcctttttctgcatataatctttgaatttcggagagcagcgccgcgcggagcggttcccggtcttcgggcggaatttctcggtgccctgtaaagcagcaggcatttttccgcatggcacagcctccttttcgttcgatactcatagtttacagctttttcataccgctgtaaagatgtacggtggactttaaaaccaatctgtgctaaaattgttccgaaactcaaacggaaggaatttcgtctttatgaaagcaaacgtaaagcgcccggcgcgtttttcttttaaaacgattacggaaaagaaagcgaaacatctgacgctgatttttgttgcagttttgtttttggtgatcgtcgtcttggcgctgtttccgcttttggaccgcgaagaagaacggtacgaggtgacgacctacgccatgggcagctacgtgcagcaaaccgtttacggcgaaaaccgcgaggacgtggccgtgaaagcggcggacgcggtggaagcgctggagcagaaaatctcctggcgtgtggcgaacagcgatattcagaagctgaataacaacgcgggcaaggactgggtgacgctgagcgatgaaacgctgaacgttttaacgcaggcgcagtcggtttcggaaaaaagcggcggcgcattcgatgtgaccattgcgccgatctcgcgcttatgggactttgatgacgaattgaacgaagtgccggacagtgacctcatcacatccttactgccgtatgtgaatcactctttgctgcgcatagacgaaacggagcagacggcgtctttgaaaaatctcggcatggcggtggacctcggttcggtcggcaaaggtgcggcgtgtgacgcggcagtcagagcctacgaagaagcgggcgcaaaagcggctatcatcgcggtcggcggcagcgtgggcgtatacggcgaaaaaagctccggcaagccgtggagcgtggcggtgcgcgacccgaacggtgacggctctctcggttcggtaacgctggcggagggttttgtctccacctccggcagctacgaaaaatactttgagcaggacggcgttttataccaccatctgctcgatccgaaaacgggctacccggcagaaagcggccttgtttccgtgacagtcgtcgcgaaaagcggcgtgctttccgatgcgctttccacagcgtgctttgtgctcggcagagaagacggcatgaagctgctggaagaattcgatgccgagggtattttcatcaattcggacaacaacatcacggtgacggacggactgaaagaccgctttacacttacaagccgcgattacacgcttgtttcctgaaagaggggctgcgatggaaaagcgaaaattttcatggaaagaagcgctcctgctcgttttggtgctcgctgtggcggcaggcgtgtatctctatgccaaaacgcgcccgaagggggcagaggccgtcattgagcgggatggcgaagtgtaccgccgcgttgtgctggccgatttaaaggaaccattaacgctggaagtgaacggcgcggtgattgagcttgacaaagacggcgcacatttcgtttcgagcccgtgcccggacaaaatttgcgtgaacaaggggattatcaagcgtgcgggagaatctgccgtgtgcctgccgcagcgcgtgagtgtgcgcatagagggcggcgacagcgagatagactccgtaacgggataaaagaatatgaccatagaaaaagagacgcaccaaaaggtacgcctctttttctgaagggataaaaaatgaaaaatataaaaggtaaggtaaactcaaattgaatgtgcaaaggcttacttctttgcgggcggcttgatcttgccgatggccgtaatgatgatctccgcaacctcgtcaatatcgaattcggaagaatcgatggtgaggtgataattcgagagatcgtcccagcgcttattcgagtagaagttgtagtaattcgctctttgcttatcgcgttttgtgataaaatcggagaccttcttctcatcgcacagacctttgctcaaaatgcgcttgatgcgcgcttccttgttggcgtggatgaatacgcggaacacgttgtcgtactcgcgcaggatgtagtcgccgcagcgtccgatgatgacgcacgggcctttatccgcagccgacttgatgatgtcgctttgcagaatgaacagcttatcgttgatgggcatatcgttgatgccggtgatacggcttccgaaagtgtagtttcccatcaccatggaatacaaaaggctgttgcccgctttttcgtccgccttttcaaagacttcctcgctcagcccgctcttttttgccgccatggcgatcagctgcttgtcgagaagggggacattcaatttttccgccaggcgctcgccgacctcgtggccgccgcttccgtactgacgcgcaatggtaataatcggtaacatagactcgcctcctcggatttctcaacataaagtgtacaaaacacccgttccgcccatctctatgcgataaaaccggaaaggggattgtaaaaacactctaaaatgagggaaaatacttggatgatttgtatgtattttctataaaatatcttactccacttttcccgaaatgtcaacaggcaatagaaaaatttcttcgtgaaagaaataaatcgtggaaatacttgaaaacagggccggatatttatataatttccacatggaataaaagcgggaaggcgcatacggcatggcagttttcattcggcattcaccgctttttcacaaaagtgcgttatgatacaggtaaacggagcggaacagttaaaaggaggccttgtcatgtacagaattttagtcgtggacgatgaagcgaaaattcgcctgctcatccgcaaatacgcggagtttgaggggcacgaggtgacggaagcggaaaacggcatggaggcggtgcgcctgttccgcaaaacgcccgatgcgttcgatattgtcatcatggatgtgatgatgccggagcttgacggtttttcggccgtggcggagattaagaagattgcatcgccggccgtcatcatgctttccgcacgcggcgaggagtatgataagatccacggctttgaactcggcgtggacgattatgtcgtgaagccgttctctccgaaagaactgatgatgcgcgttgctgctgtgatgagccgtgtgcagcgcaccgcaataccgaagcacgagttgttccgggcggagggcctgacaatcgattttaccggacggatcgtcacggtggacggtgtgcgtgccgatttgtccccgaaggaatacgacctgctgttttacatggtcaataaccgcaacatcgccctcacacgcgaaatgcttatcacaaatgtttgggggtatgatttctacggtgacgaccgcacgctggatacgcacatcaagctgctgcgccgcagcctcggcccgtacagtaaattcattgtgacactgcgcggcgtgggctatcgctttgaaacgcacgacgcataaggacggcgggactatgggcgaacagacagtaaagaagcataaattcaaaaaatggcgcaagccgggcatacgcatgcaggtcatgctggggttcgtgctgtttacggcggtcattgtgacgttgctgtggacatttcagatcacactgctcaacacattttataaagccatcaaggtcaatgaggtgcgcagcgtggcgaaccgtgtggtggcgatgctggacgaaagtgcctccgcgagcgattattttgaagtgacgcgctcgacgaatatttctatcctcatttccaacagcgacggctcaaatgtgtcgttttccccggcggcgcgcggcggcgtactggagcgctttgattacctcgattgcaagcagcttttcaccgaggtgaaagcggcgggcggcagcgtgatggacgacaacatcacagacccgacgagcaccatagaacggcaggaccgcacgatcatttacgcgcagacggtcacgctttcgagcgggaacgagtatcttgtgctgctgtcctgcgacgtgattccggttgattccacggtggaaacactgaaaatacaattgtggtgtctgactggcgtaatgatcctgctttcgttcgggctggcactgtttatctcttcgcgtctttcaaagcccttggaacagatgaacgaatctgcaaagcagctgggcgagggaaaatatgacatccgtttcccggaacagggcgcaagagaggtggcggagcttgccgcgacactgaactatgccgcggcggagctgagcaaggttgaagatctgcgccgcgagctgatcgccaatgtttcgcacgatctgcgcacgccgctgacgatgatctccggctatgccgaggtgatgcgcgacattccgggcgaaaacacgccggaaaacgtgcagatcgtcatcgacgaagcgaaccgcctgacaggcatcgtcaacgaccttttagatctctctaaattacaggcgggcgcattgacgctgacggtttccgaattcaatttgacggaggatatccgcaatacgctgcaccgctacgacaagttggcggatttcagcttcccgttcacgtatgaccgcacggtgtatgtctgcgccgatcagctgaaaatttcgcaggtgctgtataaccttgtgaacaacgctatcaactattcgggcgggaacaagaccgtgtatatcgaccagaccgtgacggaaagcaccgtgcgcgtatctattcgcgatacgggcgagggtataccggcggataaattgcagtacatctgggatcgctactataaggtcgataaggagcacaaacgcgcacaggtcggcacgggattggggctttccatcgtgaagaaaattctggacctgcacggcgggcggtacggcgtcgcgagcgtggagggtaaaggcagcacattctggtttgaactgccggtgctgcgtacggaatctttaattctgccggaaccgccgacattactggaacaaaaagctgacgtggaacggggccaataaaattttcgccgcctttttcaaaaggcggcggaaccccggtcaatgggtttcccaaacggcgttacgaaacattgtcggaaagatgttcacagtcggctgaattaaactgaaaacagcaagcgtaaacgaactaaaagcgtacccgaaggtgatttgggcgcgcttttttcgcacagagaacgaaacacggaattcgtatttgtgaaagatgtatcaaactcaaaagaggcccgcgcggcttttgttttactttctgaaaaagccgtaaattccgatattttcatatagaaaaatcgcgaaaatgcttgataaaaagatatcgatatgatagaatttattaggctgagtatgtaccccgtgagtggggaaaggggaaaactgtgttttgcccctttgttttcatgtaactcagaagatctcgcccgcggaggaacattgtgctcccccatcgggcacagcacaggaagggaagtgatccgggacaatgaaaagcaaaatcaccgtaattggtgccggtagcgtaggcgcaaccattgcatatacgctttccaatgaagacatcgcaacggagattgtcctgatcgacatcaacaagcaaaaggcagagggcgaagtgatggatatcattcagggcacttgcttccgcgacccgatttccattaaatcgggagattacgaggatgcaaaggactccaacatcgtcatcattacgtccggcgtggccagaaaacccggtcagtcgcgccttgaattgacgcagacgaatgtcgacatcatcaaaagcattgcaccgaacattgcaaaggccgcaccgaacgcgctgtacattatcgtcagcaatccggtggacatcatcacctacgtgttcatgaaaatctccggcatcccggaaaaccagatcatcggctccggtaccgcgctggataccgcgcgtctgcgtttcggacttgccagccactttaacattgcgcagaagaacattcatgcctatgttttcggtgaacacggtgattcttcctttatcccgtggtcgtgcgcagaggtttccggcgcgaaactggacgactatgtggagctgatgcatgccctgcccgtggacaaggacgccatggcggagtatgtacataaatccggcggcgagatcatcaagaacaagggcgccacgttctacgcggtcacggtttccgtgtgcagattgtgcagcatgctgctttccgcatacaattccatcgtgaccgtttccaccatgatgcacggtgaatacgggttagaggacgtgtgcatcagcacactcgccattgtgggcccgaacggcgtgcagggcaagctgcctgtgaggctgacggaggacgaaatgcaaaaactccacgcttccgcagacaagctgaaagaaaccatcggtcaaatttattttgaagcataacccaaaatcaatttatagaaaggatgacaggagtagctatgaagtacagctattatccgggatgtaccttgagaacgaaggcaaaggatcttgacgcctatgccagagcttccgcaaaggcgctcggatttgaattggaagaaatcgaaaactggcagtgctgcggcggcgtctacccgctcgggtccgacgagatcgcaacaaaactttcctccgtccgcgctttgaacgaagcgaaggaaaagggccaggacctcgtgacgctttgctccgcatgtcatcatgtcatcaaaagagtcaacgacgacatgagaaacgtggaggacatccgcacgagagccaacaactacatgcagcttgacgagccctatgccggcgagacgaatgtgctgcattaccttgaagttctgcgcgaccgcgtgggctttgacgaactgaagaaaaaggtcgtcaacccgttaaagggcagaaagatcggcgcatattacggctgcctgctgctcagaccgagcaccgtgctggcctttgacgatccggagaacccgcagatcattgaagacttcattcgtgccatcggcgcagagccggtcgtatatccgtaccgcaacgagtgctgcggcggctatatctcccttaaagaaaaagaaatgagcggccgtatgagctgcaatatcgtagacagcgcagccggtgcaggcgcggaaatgctcatcacggcatgtccactctgcatgtataatctcaacaagagcggcagcggcaagatcccggtgtattacttcaccgagcttctcgcagaggcccttggcgtgaaagaggaggcgttaaagtgagcatcagcaaacaggcggagcagatccgcgagatcagcggcgtcaacccctacaagtgcatgaagtgcggcaaatgttccgcatcctgcccgtcgttcaacgaaatggacattaagcctcaccagttcgtttcctatgtgctgaatgacgacattgagtcccttgtgaattccaagtccctttggaagtgcctttcctgctttgcctgcattgagcgctgcccgagagacgttaagcccggcaagcttatcgatgcggcaagacagcttgtcgtgcgccagcgcggtgaagcatatcttacgccggacgagatcccggagcttttggatccggatctgccccagcagctccttgtgagcgcgttcagaagatacaggaggtgatagcgtgcagagaattggtgtatttgtgtgccattgcggcagcaacatcgcagctacggtagatgtaaagaaagtcgtagaaatggtcagtcatgaaccgggtgtcgtgcacgcggaagattatcagtacatgtgctccgaggtcggccaagcgaagatcatcgaagccatccgcgagaaacacctgaccggtcttgtggtttgttcctgctccccgcgtatgcacgagacgactttccgcaaaacggcggaaagagccggtctcaacccgtacatggtcgagattgcaaacatccgtgagcactgctcctggatccacaagaacatggaagaagcgaccgaaaaggccgtcatccttgccagagcggctatcgcaaaggtcaatcttgacgcgccgctgttcccgggcgaaagccgcgtaacaaagcgcgcgctcgtcatcggcggcggtattgcaggcatccagaccgcgctcgacattgcagacgcaggctatgaagtcgatatcgttgagaagacccccagcatcggcggccgtatgagccagctcgataagacgttcccgacgctcgactgctccgcatgtattttgaccccgaaaatggtggaggcttccgcaaacgagaagattcatctgtatacatacagcgaagtggagaaggtctccggcttcgtgggcgatttcaccgtggacatccgcaagaaggcgcgcagcgttgatatgtctaagtgcaccggctgcggcgtctgccaggagaaatgtccttccagaaagaccccgagcgaattcaaccgcggcttgaacacgagaagcgctatttataccccgttcgcacaggcgatcccgaacgttccagtcatcgaccgtgaagcttgcatcaagttcaagaccggcaagtgcggcctgtgccagaaggtctgccaggcgggcgccatcgattacgagcagaaggatgaaatcgtcaccgagaagtacggcgctatcgtcgtcgctaccggcttcgataccatcaagctcgataagtacgacgagtacgcatacagccagagcaaggatgtcatcacctccctcgagctcgagcgcatcatgaacgcggcaggccccacgaagggtcatctggagcgcctttccgacggcaagcacccgaagaatatggtgttcatccagtgtgtaggcagccgttgctccgataagcgcggtaagagctactgctccaagatttgctgcatgtacacggcaaagcacgccatgctgatccgcgataaatacccggacgtcaacgtaacggtgttctacatcgacgtgcgtacccccggtaagaacttcgatgagttctaccgccgcgccgtggaagattacggcgtaaactacatcaagggtcaggtcggcaaggtcatgccgcagccgaacggccagctgcttgtgcagggcgttgacctgctcgacaacaagcagatcttgatggaagcggatatggtcgtcctcgcaacggcgattgagccgaacgcggacgtgcgccgcattgcgaccatgctgaccgccagcatcgataccaataacttcctcaccgaggctcacgcaaagctgcgcccggtcgagtccccgacggcgggcgtattcctctccggcgtatgccagggcccgaaggatattccggaaacggtcgcgcaggcaggcgcggcggctgttaaggccatcggtctgctcgcgaaagataagctgatgacgaacccgtgcaccgctaagagcgacgagctgctctgcaacggctgctcgcagtgcgcaaacgtctgcccctacggcgcaatcagctatgagacaaagctcatcaacgaccacggcatccgtgaagatcgccgcgtagccgttgtcaacagtgcgctgtgccagggctgcggtgcctgcaccgttacctgcccgtccggcgcaatggatctgcagggctttgcaaacagacagattcttgcggaggtggatgcaatatgtcgataacagcaaacgaagagttcaagccgaagatcgttgcgttctgctgcaactggtgcagctacgccggcgcagaccttgcaggcagcagccgcttggtttatccggcagacgttaagatcatccgcgtgccgtgctcctgccgtgtgaaccccatgttcatcctgcgtgcttttgaaaagggcgcagacggcgttatcctgtgcggctgccacccgggcgactgccattacagcaccggcaactactatgccagaagaagaatggcgcttctgttctctatgctcgattacatcggcgtggagcacggacgcacccgcgtggaatgggtctccgcagcagagggcgtaaagttctcccagaccatgaatgagttcgtggcgaagattacttcgctcggcaagaacgtcagactggaggatttgagatgcaggaaatgatcaaccgcgcaaaagagctgctcagcgacggcaccgtaaaccgtgtgctcggctggcgccgtggcgatatgtcctacaacccggagccgtcttactttgagacggcggaggatctggacgcaaacttcgtctacaacggcttctgcggcgcgaacctcagtaaatatatgatcgagggctcgaagcttgagggcaagacgcttgtcttcctgaagccctgcgattcttacagcttcaaccagctcatagcagagcaccgtgtagaccgtgacaaggcttacattatcggtgtcggctgcatgggcaagctcagcttcgagaagatcaaggagcagggcgttaagggcatcacgaacatcacgatcgacgatgcaaacgagaacatcaccgtggagacgctctacggtgaaaagacgctcgcctataaggattgcatgctggag

SEQ ID NO: 2107 - DNA, 32759 bp, Unknown
  16S sequences of unknown bacteria
ggatgggatgctgcaacaggcggaaagcatcgtcaccagctacggtcagcagcaattttggatgaattacgaccattttgctccggattatgcgactgttctggagcaaggtgtgccgggcatcctggaggctatccgtgcttccgcccggaaacatagccgcattccccaaaaagcggtatttcttgaagcctgccggatctccatgcagggattttcggatatgctggaccggtatgcacacgccgccggagaaaaggccgccgcatcggcagacgaaaccggaaaccgtttccgagagctgtcccggatctgtcattccctgaccctctctcctccttccaccttccatgaggcactgcagctcatctggctgatccatctgaccttttccctccagggacggtatgccatggcattcgggcgtctggaccagcttctttaccccttttacgtccgggataaggagagagggatcctcgacgacggacggacgcgggaactgctggcgtgtaccttctacaagatcggtgaacggcgcctgttcgcagcggacgatgtcgtgaatatcgccgtcggaggagtgaaacgggacggctccggcggagtcaacgaactgagttatctcatcctgcaagcggtggaagagtgccatattcccggtccgaatctctcggcaaggctgtatgcggacgtcccggaggagtttgtggatgcctgcctgcgcgtcatagggaccggtatcggctatccggcactgatgaacgacgaagtgaatattcccgctctggcccgatacggatatacgctggaggattgccgcgactactgtatggtcggctgtatcgaaaattttatccagggaaagcagcctccctggtcggacggccgcttccattcgccgaaatatctggaatatgccttaaacggcggcgtctgtatgcaaaccgggctgtttctgggaacggacacaccgcccgccgaagagatcggggatatgggggctctgctggacgccgtggaaaaacagatggcctttggcgccgcggaatacatggcggttttccgcaacgaaaatgcccggtataaccgggatcaatacgtccagccctttttatcctgcttctgccgggactgcattggccgcggcctggatatcaacgacggcggcgccctctacccctccgtccatggggtctgcggtatggggatcgccactatggccgattctctcgcggcaatcgagcaggtggtattccagcagaaaaaaacgacgctggcggccctgcgggaagctcttaaagccaatttcgacggatatgaggcgctgcgggccgatctgttggccgccccaaaatatggcaacaatctcgattttgtcgacaaatacgcggtctggtttgtggaatgccatgcccggatcttttcccggtacaaaacgcgggacggcggcggtatttatctggccatcgcctcgaatgtacagaacatttcggccgggctggaggtcgccgccacccccgacggccgtctgaacgggacgcctctgagcgacgcggcatctcccatgcacggacgggaccgggacggccccaccacggcgttccattctcttgccaagccggactacacgctggcgggggccggtacggtcgtcaatcaaaaatacagcccggcgatgttccgcgatccccaaaaacgagcctgcctgtccgccctgatccgcgcctatttccagatgggcgggcaggaagtgcagatcaactccatctcccgggagatgctccgggatgccatgatgcatccggatgaataccgcgatctcgtggtgcgggtatccggcttcagcgcgtattatatatctctggaccaagcggtgcaggaggatatcctgatgaggacggaacatggatgacgtcaaggggatcatcaccgatatccagggcttttcaacagacaacggccccggcatccgcaccaccgttttcttgaaaggctgtgctcttcgctgcccctggtgccataaccccgaaaccctgttcccggccccgcagctgcttttctatccacagcggtgcctgcactgcgggaggtgtgtttcccgttgtccgaggcactgccataccgatgacgaaagcggccatacttttcagcgcgccgtctgtaccgcatgcggttcctgcgtttccgtctgcccggccgaagccctggtcatggccgggaaagaaatccgcgtcggggaggtcatgtcccggatcctggccgacaaaccgtattacgacctgtctggtgggggactcagcctgtcaggcggggaaccgctgctgcaagcggatttctgcgcggagctcgccaaacgatgctccttcgaggggatccgcaccctggtcgacacctccgcctgtgtcccatacagccggttcgaggcagtacggccatatgtacgagagtattacgtggatctcaaatgcccggacgaagcggcttatcgccgccataccggcggcagcctcatcaccgtcctcgacaacctgcaccggttatcggacgacggggcggatattaccgtccgcattcccatcattccacatgtcaacgacacccctgaggcctgcgcacacatggcgcggcatttggacggtatcgcggtgaaagccgtccatctgctgccctttcacaaactcggcttgagtaaatatcaggcgctcggcctggtttatccatatgcggaggtcccgagctattcagtcggggatctgctccctctgctccgcgcattttcatcctatccggtatccattgccggatgaatcgaaggaggacatcgccatgccccatgcgaaagccgccctgttcaaagggccgcagcaaccgtttgaaattcgcgagtatcccctgctcccaccggaaaaagggacggtacgcctggaccttatcgcctgcggcgtctgcggcacggacgtccatatccacgacggccggctgccggctgcatttccgtccatcatcggccacgaattcgtgggccgggtacgggatatccatagcgaagacagcaaaagcagcggtatccgtgccggagatgcggtcattgtcgatatcgcttgtccctgcggctcctgtgccctctgccgaagcggagacgacgcgaactgcctccacatgggggtgacgaatgcgggcgatcccgagcagcctccccacttttggggcggttacgccgaggcaagctttgccccggtcgaaaacctgatccgtatccctgacagcctcgatcccaagaccgtcagcgtatgcgcctgcgcgggtccgacggccctccacgcctttgagcttgcgcacagggccaatgccggcatcgaatctgccggcaccgcagtggtgcaagggctgggtccagtaggattcttcgccgtcgcgtatctggccgcggccggagttccccatatagcggtcgtcacagccagggaaaatccacggcgggccgcactggccaaacggttcggcgcgaccgatgtctatagcctggaccggcaggatatagaagaaatcaccgcttcggtggcctcctcgaacggcggcatgggtgccgatctggtcttcgaggcgagcggcaatcccgccgccgttccacaggggcttgccatgctccgcaaccggggtgtctacctgatccccggacaatattccaaccgcggcggcattacgatcgaaccgcagctcatcacgttccgcgccctgcacctcatcggctcttcccaatattcccaccgggatgtcgaagagtatctgcggttcctgcaggcccacccccatctctggcccgtcatcgacgagctggtcacggaatatcccgtcggcagcgtcaacgacgcgtttgcggatatccgggcgggccgcaatattaagacactgctggtccccgaatccgctcgggccctataaaccataaacgctccgtcccttccaaaagagggacggagcgtttgttcctcagtcaaacaaactcatctgtttgcccgcataggcgggccggaaagcggccgtgctctctctccggagaaacgcgcccggcaaatcccgcagaaacggcgacggttcctccccggtcagcagcagcagctcttccttcgcccgggtcatccccacataaagcagccgccgttcctccgcctcgtcacagggccgcccgggcatcgtcagcggaatgagtccctgccgcgccccgcacaaaaacacgacgggaaactccaacccttttgacccgtgcagagtcatcagggaaaccgcatccgcgtgataagcgcgggacccgctgcgccgcacatcggtttcctgcccgaacgccagatcctgcaggaaggactccatatccggatacagcaccgccatatcgagcagccggtccagcgcggcccgtgcagccggagccgtgccttgcacaaacacctcccggatatacccatccagcaggatatccggcttttcccgcctgatgcggggtgcataggcgcgcagacgggccgccagtgccgccgcgccctcacccccgctagattccagacgctgcgccaggtcagccgcccgcttctttcccccggcacacgcttccaggccctccgccgttcgcgggacgcccgcggcgcgcagcagggtacggagcgagacggaatcctccggacggatcaaaaagcggaaaaaagccagcacaccgcggaccggttcctccgcgagaaagtcctcccgtccggccaccacataggggatcgactccttgcgcaggcactgctcgatgagctctgcctggcggtgggtgcgatacagcaccgcgatatccgagaagcctaccgcgtccataggccggaccggacgacgggacccgcccatcccggcctcgagcatatccataccgccgaccaggcggttgatctctttggcgatgaacagcgcctcgtcaaaaggatcggacgccgtcagcagccgcacccgttccccctcgccgcgctgtgcctccagacggggaggggcctcgcccggaaggcgggacaggaccggaagcgccgcgccgataatcggcggggcggaccgatagttccggaaaagggtgatctccctaagcgccggccgttcctcccgcagccggtcgaaacagcgggcgtcggaaccacggaatccataaatcgcctgatccggatccccgatgacgaagaggctctcccctccccggctccatgcccggatgagccggaactgaacgggattgatatcctggaactcgtcgacgagcagatgggtgaacccgctgggagcggttcccccctcctgcgcctgcagctcccgaagcagcagatcgtcgaaatccagcaccgacagattctgcagccgctgcgtataggcatcgtaaaaaagggaatatggcccggccttcccctcattttcccacccatccaaaccgctttttcgggccgagaccgcctggagggcctcccgcaccgagagcttcagccccaattcgtccaggatctccaacgcgatggccacggcctcctcctgatccagaaccgccgctggttccttccgttccgagaggcggttcaggcagatcgcgtgaaaggtgccgatcgtcatagccctgacggtccgtttgtccccaaaatgggccagcagccgttccttcatttctctcgccgctttgttagtgaaggtgacggcggtgatatgggcgggatccacgccccgctcctccaccagataggcgatgcggcaaaccagggtccgggtcttgccggttccggggccggcgatgacggccacggcgccttcttttgccgaggcggcggtccattgctcgtcgttgagtccataatggggggcgtcctccaaagccactgcggccggggtcccggcctttttccggctcaccttcccaggtttttttccggtttcccgccctgccggccgcactccgccctcaaagagaaaaagctgacccgcgtaccgttcaatttcctccggatctaagaggcggacctgcccgtattccccgtcgtagcctggacggagctccaccttccccgcccgcaggcggcggatcccctctgccacgcaggggccggccgcccgctcgacgagatcgagcggtatctcacgcaggatagaaaattccggcccaagcttccgcagcagatcgatatacgcctcctggacctttttccccgtggccgggcgtccggtggaagcggcgatgacttccggcagaggcaccagactttcatagtgccgccgtgcctccggaagatagccttcctcccggtcggccagttcttccacccgatggagaacccccaccgtgatccggccgccgcagaccgggcatctgccccccagctgttcggtctgctccggcttgagacattgcccgcaggagcggtgtccgtcgaaatggtatttgccttcctcggggaaaaactcgacggttccctgaaatccaaggtcgccgggcgtctccaacgctctcgccatggccggaaaggacagctccgtcccgaaaagattggcctcccgtcccagcttggcaggcgaatgcgcgtcggaattcgagaccagcgtatacccgtccagcgcggaaaggcgccagttcataggaggatcggaggataggcccgtttccaacgcgtggatatggggcgtcaaatcctcaaagcactcccggatgtcgtcgaagcccgaataggccccgaacagggaaaaatgcggcgtccagatatgagcggggataaacacggcgccgggacaggtttccagtgtgatttcgagcagatcccggctgtccaggcccaggatgggacggccgtcggaatgcaggttcccgacctcctccagcctcttggcaaggcgttccgcctgctcgagtccgggaagcaggagcaggttgtgtaccttgcggacccggccgttctttttgtaaatcgagctgatctcccccgtgacgatgaaccggggccgcgccaccgtcccgtccgtctcacagggcagacggagagggtccttgagcgtatacaggccgtcctcggcgggctccagcttctcccgcagctcatcccgccaggccggatgggtgaagtcccccgtcccgatcacgtcgagccccttgcgccgcgcccatgcttccagatgctccggcacacaatcccggctggtcgcgcgggaataacgggaatggatatgcaaatccgccaaaaacatccttttcccccactttctgacaaaaaattgcctattccctatcataaaccaaatgaagggaaaaggcaatcctttgtatattggaatatggagaggatagaccgcccattcagcggccggcttcctcttctgaaacgctgctgtaccggggatactgctgccgcaggcaatcgtacgcccgttcctgagccaggttgaagcggcgaagcgaaaaaccgcgctcgtccaccaccacaccgccttcgacgtggaattccggacccgccatccggataaaccaacgctccatgaccttccgcgcactctcggccaccgtaggatccgcatcgtccagcagccgggccacctccggcaccgccgagaccgacagggagcccagatgctcgacatcgacctccggaaggttcccgtcccggtaggcctggacgttgtagccggcgacaaagcggtccacgtcggcgaagcccacagacaataacaggacggcggatacggccaccgccaccctcaagaaggggaaacggccgatgaacaggcggaacagcaccgacaccatgaggacggacaggccgatcatgaacaccgatgtcagcacccgcaggcgcgtcatgccgtacaggcggatatagagcaccatcttggaaaacgccgtcgcccccagcagcagcgtgaacacgccgataaagagggaaagggccttgactcccggcgaaatccggccggttggcccgcgtttcgccaacagcaggacgagaaggagcagcaggatattgaccgccgcgatggcggtcagttcaaaaaagccccgccgggcatacgccgcagaggtgaacccctgtccttccggaagcatcccggaaaacgcgctgaagaaataggcgagctgcgaaaacaggtagctgagataaaacagggagacgcaggacaggagcgcgatgaaaaagggcgtccccgccatctgcaggcgttccctgcggttgtcggcacatggaggctccaggcgtttccgataagaaaacagcagcgaaaccagcagcggcgccgtcaataccgttagcaccagacggaaaaccaggccgcccagatggtccaggatgccggtcatcatcgattcgtaagcggcgtcggcctgcatgagaaggggcaccaccaggaacaacaccggcagcgccaggagcaggccgagcagcgcttgcccaaaatgaggcgatttccgggattccccggccatcgaacggaagggctcggctacatgccggaagggcgcaaccactgtattcttccaccatgtcgccaccttggcgagggcatcgccaccggtcagaccgccgcacagccctcccacataaagggaatacaggaacgccgtcaggaacaggtccaacgtattgatgagcagatcccgggccagggctggaaccacacagccagccagggacaaaagcccgcagacgatgccgaaagcggattttttcgtctcccggacggacaaatagaaggtggtcagtacaaaaaggacaacataagcgatggaaaacccgagggcaaacccgccgaacacggcaaaatccataaacaaaaatgtagcggcggcaaacaaggcgaaaaagaccatgtcccgcttttgcagcggcacccgcggcttctccggataaacgcggtcgaacggaacggcatatggattctgatagggataagggttcgaagaacccgctccccaatatccctgcaccggtcccggatttggatatcccatttcatatccctctttctgattctgagttacaggtcggacgcctctgtctttctatctcaaattccgctccaaatacactctatagcggctctgtattgtgtatccgccccctttcaaatataaccatatattagcacatatttattgtttgtcaataaatttttatctatatccgttctatacccttgtctatgtgctcttttcggcagaattgccttctcatgcgcggacatacagaaacatctttttatggtttgatatctttctgtttgacgggatgccagatacttttgcgctctcatccccgtagcccagcctcttatgtattgtcgtggattatgatcatatatcataaaaaaggggcagaggttttcccctgccacttacaaatcctcctgtatttggttgtatcgattgacatacatagtgcttcctatatgtgtcaaggggattgcagggaaatcctccgtatgcggaacaggagcctatttcccgtcctgacagcatcccctccaggggcagtcccggcacagcttgaaagtgcggtttgagcggcctccatcacagacggtctccgacaaagggattcccttccaaacctcattcctcccgccgggcaaccggctgaatccaagctcagggtttaactgtacaatcaaaaccactagaaaactagtggtttgcacagcccccggaagggtcagaacttgcggacccctggaaggggtactgagggtttgtcatcgcatcactatcacaggcagccgctaaaagcggctgttttctttttgcctacttcctcttaacgggtctatgtactccttgagtgtggtctggtcacttgctcaatctttctctagctggttttgagtgtacccctcaatcatcttcgcgttttttctaccgtatccacaaaatatacccctggttcaccaggaggctcttgcttaagcgacaagtaaaatgccgccccgcaaatatacgggacgcacttcgctgtagaattgtaatgtgaggttaaccattgacgtaaatatcaaggatcacctattatggatatagattcgattcaatagaaaaaacataatgactatcaatgtcacaggtaaaacagcgttaatggcgatgtttaatatttgaaattgcagatcactacagtaggccggtatattaaagatttcaaaagtgattaaatgagtaatatctgtgatacccaaaggaaacaaaacgatgcttccaactattagtaacccattagaataaccgaagaacgctccttttttgcacagaacaaataccataatagtacagcataaacttatgaggaaggtaatttgttcaaacagtgaaaatggtaaatctgacaaatgaaattcagaaacggccgaaattatattatcgatatacaaatatatcagcaaacctaaacataggccaataaatccccatacatagaccttattccttattcctatctggcgttcgtcccctttataattattatctattatggctctaaacaaattctccttcataattattcctcccaaaacaaatcatttaaagttttattcatagctttgcatattgcgatacataaacgtaaggaaggattgtaatcgccggattctattaagctgattgtttgacgagtaacgttaacggctttggctaattctgcctgagaaaggctacattcaattcgagctattttcattcgcttatttatcacttcatcatcaccactatttccagtataatatataccggtctaaatgtcaattataaattgcatttagaccggtatatacttggaagtcttcctgcttatgctttgttttatccgtagaataacttcggggcaaacacgataggataacatgccgaaaggtgagtattcagatgccgaatgacaataaaagtttagcacacatcactgggaactgcaaataccaagccgcacgttccttttaccaagcggtagtcatcctgttgctcccataaaacttcgtcataataccgctctcggcaagcgcggaagagcaacttttataggtacaacaaaagatgaaaaataaagcagataaaatacaataaaatgcgcacatcgaaaaaaagataaaaagagacatgtattacagatccctgatagaatgaagttgcgagacaccattctgaaaagagacagcaaaccatgtccgaaaggattgaacaactgaacgaggaaataatcaaggagcagatgaacccccttattcgcgattaattcgcttaatttcaataaagagcttgcaaaaaatcgtccaattcatccaaattcagttgctgctgttgatcgcttaaagcatattcaggctgtgggtgaacctccagcataattccgtcaatccccatagccagcacagcctttgccacgggaggcaagatatcttttcgaccaagcgagtgacttaaatccacaacgaccggaagcgacgtttctttttggatgagcgcaatacctgctatatccaatatatttcttgttgagttttcaaaagaacgaatccctctttcacacataattaaactggtattgccttctgatacgatgtactcggctgcatggagaaattccgaaacggtcgacatataaccgcgttttaataaaaccggtttttttgtctttcccacttctttcaataatgagaaattactcatattcctagaacctatctggataagatcgagatattttacccccagttccacatcgcgcggatcaagaatttccgatactgtcagcagcccatactgacggccgatttctgatagtattttcagtccttcgattcctaatccctgaaaggaatagggggatgtccgtggtttataagcacctcccctaataaatggaatataacagcgaacaagtgattttgccacttgctccatctgttctctactttcgattgaacaggggccggcgatcactgaagtcgtctgtgttaatgaaaacattttttgcaatgttctgaaactgagttctcgtacgtttaatatcaatttgcatcacatgcactgcaactgctaaagcagtcgtttctctatagtcactcacttggggcgaatcgattactctcattcgcttcgttctacactgaaggccaaatctttttattctcaccggctaagccggtgctttatttttgcttaagctgacaaatgaaagaactagatttacaaaagtaaatctagttctttcggtctgatacagttctttattgtgcagcctgaaattcagcatcaatcaggtgccgataaaacggaagatggccgatatccggatgataaaaacggaaactttcatttgtacatttgcaataatttttaccatgcaaagaaaagcgaattcctccgcactgttttgcacatccggaacaagaatccaccatgatgatgtccctttgcatttcttccggacactcttcaatatacgtctcatattgatgcatatttctcaaattcatcttaacaattacaccgttggggccgataaaaaccgttgcgaataatttttgtttcacttttttatgtgtatagatgattttccaatcacctcggtcaagcccccctatccggacagtcggctggcaacctatacggacgagcagagcatccagatctcgaacaaatttctgatcagattcttctcctaaggatttgacagcatcttccaggcagagatccgggcctgcctggaagattgcggcagcaaccctgaagtcccccctgcgaaaataagcgttttccttatttttcaagtttttgcatgcttcggacattattttaattcccaaaagcagcaacggatgttctttgtgcctcagcaccaaaaactgcaaatcctttaatcggattttaccggagcacccctctacctcggtataataaaaaccgaaattgtctaataaaggaaacaaagaatccacattttttattttcattctggagcaggcctcccttagctgctccccgtttacgtttaaattcaccatttcccggtctccgccgggcacacccgcttcaccaaggcaggataaaaaatgaggtacgccgaaaaaggcatggtacgatttcatgtattccgcaccggaatagtttccgggtatttcaggaataaccggcagtttcagtttttctggctgttccgatattgctgtgtaaatctccttcagcaaatcataaaaacacattaacgcttccctgcattcggattctgtgtacccgaaacgcaattcatcgcagacttccggcatctcagcccggtcagccatgttcttcaaatgattttccgctattctttgaacataagagcgattgaccatatcaatctccgcctttaaccatatttcttgtactactccatttgtatatgatagctttactcactacaccgccagtcagtcttttcaattaccaaagtgcaggcatcgaattcatcttttgtgccgtccgccttttccacaaatttaggatttttaaaagttctgattacttccattccaagcttttttaagggggccagtttgtccacatcattcagcgcccaattggcttgaatacgctcaattccatagtgtttaaacgcaaaatcatataaaacgttcaagccttcatattcataatctctgttcaaatattccgaattcatcacatggccgatatccaacgttttgttttcatcaatactattaaaattgacgaaacagaccaccttggaaaccgcttttgcctcaatcgcccaaaactgccctccatttgcaaaaaattccgtcatttcctgcacggcgtcgtcttccgttggccaggactcgtcacagtcggcaaagggggaattggcattgcttacggctattccttttaaatccatccaatcctctttctgaaaccgacgtaccagaacattttcagtttcaaaagatatagcatcatcgccgttgaagctgacggaatacggaacgctcatgaacataatcagctctccttttctctttattgaattcgtatatttcgcatataacttttcaatttatttgaattattatagaggataacacggaaccaaaaatttgtcaattatttccttacctttatttgtttttcctcatttacatcaatttagtattttttcaatcgatgctgcgtttacgtttttctcagttgctgacatccaaaaagtgagaagacgcaccgatgtgaatgatatcgttagaaaaataacgatccatattcattgagatatatcctctaagatgggtgagcttatggatggaataaccaatggattccgcagcgagctgataaagctgaagggtatcgaactgatatttcccattgtcatcataataatgttttatggtgtctgagacaagccgtttgtgtttttcgcttaacaccttacaagcaaaatctggagaaatgttcacctgaacacggatatcactgtacgcgtgcggtgtaatatcaagaccgctttcatacacacttttcacacaatctatgtttaaaaataaaaagtacgtacacataaattcatgaaactgattctgaatcgaccatactgtattagcaaatgttctcggttccagaacaatcattttaccgaaaaaacgggggtttaacacaaaacagtcgatatccagccacccaaaatgatattcgtttacttgagtcaaacactcccaaacgtcgctgtcctgatggtattcctctatatggtaaaaaggaagctttaaattttttctaatccattcgatttcatccgcgtctaaattgcatcccaaaagcaccagatttacctcctgcggaacaaaagacaacgatttcagcacccagaacagtaatcctcgcgtaaaaaacatataaaatatattttcttttttcttaagggctgagtagaatatcctgaatcggttcatccaatttttccatttctgcattctcctcttctcctcttagcatgagccctgaaagacgccccgaatatggtcaactctgttaaaaggacagcagctgacgcattttttgcatatatccggacaattgccgctgttcaggaaagggcgacaaacggcttttatcactttttgatatgccatgccgtttataatatcggacaggctgttggaagtgacattcccaatagaacaggtgcacatccagtcaacgcagcacaaatgaatatcgccatgcgaatctatgggcaactccaatagaaggcctacggcagccaaacggattttccagttgcgattcatacaccatgagcctattgtccatcaattcatcaatgatttctatattgccgtatttatttttaagttcctggaaaaaagcaagctttttttgtcatagcaagtgataaccacctgattaaacaaagaaagaaaggtgttttgctcgatgcgggaatcgggcaaaaacccgttcgtccacagtacatatttttcctttctttcggaaataatactcagaattcgcttaagatccatcagcggctcattataatagttaaagttaaaatgtccggcaaaacccagagcctttgcttcatccatcacacgcaaaatgtcttcgttggtcaacctgtttttactgacatatttccgcagcgaaacggggcatctaggatgctttttcgccaggttgcaatgcccgctcatttcaaatgaaatcattttcatcgcagataagttcatgtggaagcctgccttttttccgtctcttttttggttactacataatggccaatgcacaggcagtccatatcggcctttataaagcttttaagggcatccgacggtgtttcgattatcggttcccccttaatattaaatgatgtgttaagtaacaccggcactcctgtcagtcggtaaaatgcattaatcagtccatagtacactgggttatctttttcatttaccgtttgtatcctagccgtcccgtccacgtgggtaaccgccggtatcacgctttttttactttctttcacaggatgaacaaacagcataaaggggtattctgtgccgtctgtctcaaagtaatcttttgcatattcctgtaaaacagatggggcgaatggtcggaagctttcgcggaatttcactctggaattcaaaatatctttcatattttttctgcgtgggtctgctaaaatgcttctgtttccaagggctctcggtccagcttcgcatcccccttggaaccagcctaaaatctggccggattttagtttcaatgctgctgtctctgcgacttcttccgttgtttgtttcgaccaagcaatattttcttcattctttttcagtgcgttctctgtctcaagatctgaataggattttccccaatacacgcttttgattttatggggatcatatctgccaccgttgcggcagtaatggccatataacgctgaaccgattgccgttccggcgtctcccgacatagggggaataaatatgtcggtaaatggtgtttcctttgttatcttaccattcagggtactattgagggcaactcctcctgaataacacagttttctgcacttggttaagctcctccatcagcaggaatgtgcttttttccagaacagcctgagcggcaaaagcgacgtccgcccttatctgaaataaatctttgcccaccgactctttttttaaggtacgtataaaatcaaagaattcttcccgagggaaatttatttccctccctccgtcttcctttacggccacgcatttccacatttcctttacgtatcgatccgttccatacgaagctaaccccatcagcttaccttcccccaaaaaatggaatccacagatgaccgtacatagggtataaccccccagggaattatctatcaccgtaaaatcataaatgaactgatatgcccatatttagaatagcaggtttttctacttaattaaaacatctaatcgtttaatcacctctattcatttaaccgaaatctttacgctttataatataggatagagacaatgcaaaaaatgagttacagagaaattactcgattgttgggtttcacaccacgagcatggcgtccccaaaactgtaaaaccgatatccatcctgtacggcatgacggtaggcctccatagtgtgctcgtacccggcaaaggcgctcaccagcataatcagtgtactttccggcaaatggaaattggtaatcagcccgtcgagaatccggaacgtatagccgggatagatgaagatactggtccagccctccccaggctccacccggccgttcgtcagcccgacactttccaaagtacggcagctggtggttcccaccgcgatgacccggccgcctctctcccgtgtccggttgagccggtccgctgtttcctgcgaaagttcgtaatgttcggcatgcattttatggtccgtaatgtcatctgcctttacaggtcggaatgtccccagccccacatgcagggtaacaaacgcgatatccacacccttggcgcggatacggtcgagcagagcgggcgtgaaatgcagccccgccgtgggggctgcggcggaaccgggctcccgggcgtagacggtttgataccgttccttgtcctggagctgggtcttgatgtaatgcggcagcggcatctgccccacctgctcaagcacagcgtaaaaatttccctggaaatcaaattgaaccagccgattgcccccttccaggatctcgatcacctccgcttcgaggaggccttccccgaaacgcagccggtcccccggctttgcccggcggccgggcccggccagagcctcccagcgatcccccccctttggatggaggagcagcagctccaccgccgcaccggtgccgcatttttccccatacagccgggcgggaagtacccggctgtcattgaggacgaggcagtcgccctcccgcagataatccagcacatcgtaaaaatgacggtcctcgaatgttccggttttccggtccagcaccagcatccgggaatgatcccgcggttcgaccggctcctgcgcgatacgatcctcgggaagctcataaaaaaagtcctgttttttcatagagtatgcctgtctttcttattatttttgcagacttttagaaatctctccaacaccgattgacaaggagaagcacggatgatacaatgagaacacaaccatgctaagtgaatatactgaatagaggcgcgtcagcacaagagtatcccgtgggagataccggatccgtgatcacgggagaaagggtgcgacgccgaagatcaccggcctccggcgggcgggcggtctggccttacggttaagagccgtagggttgtcatcatgctttatgatggagcgctattctccggcgaaggggccgcccctccgtgggcgtcaacgcatctattataaggccatgacaaccggttttcaaccggtttttttcatatcccggcctgtttttcacgcggcatgaagtccaccccgccggggtgaaagtatccgcagacaagcggaaaggagtttttcccatgaagaagtttcgcgtcggtatcatcggttgcacaggcatggtggggcagcgcttcgccaccctcctggcggagcatccctggttcgaggtcacggttctcgccgcgagcccccgttccgccggtaaaacatacaaggaagccctgggtggccgctggtcgatgaaaacaccgctgccggccactctggaacagatggtggtgcaggatgcctcccaggtggaaacggtcacgtcgatggccgacttcgtgttctgcgcggtggatatgcccaaggccgaaatcaaggcccttgaggaagcgtatgccagggcggaatgcccggttgtctccaacaacagcgccaaccgctcgacacccgacgtgcccatgatcatccccgagttaaatcccgagcatgccgcggttatccctttccagcggcagcggctgggcaccaaacggggatttgtggcggtcaaatccaactgttcgctccagagctatgttcccgccctcttccccctctccaaatttggggtcgaaaaggccctggtctgcacctaccaggcgatctccggggccggcaaaaccttcgagcgctggccggaaatggtggataacgtgattccgtatatcggcggcgaggaggaaaaatcggagcaggaaccgctgaaaatctggggcaagctcgaaaatggggtgattgtacccgcaaagtcccctgcctttacagcccaatgcctgcgggtaccggtctcggacggccatttcgccgctgtttactgctcctttgcgaacaaaccctcgaaagaggagattctggaaacctggagatcctacaaaggccgggcacaggagctggatctccccagcgcgcccaaacagttcctccattatttcgaggaggacaacatgccccagacccgcctgcaccgcgatctcgagggcggcatggccatctcgctcggccgcctgcgggaggatacccagtatgactacaagttcgtcggcctgtcccacaacaccttgcgcggtgcggccggcggcgccgtcctgatggcggagctgctttgtgccgaaggctatatggaccgatgaacccgacattttgaatgggggctgtcaatatgagtaagcaaacgattttcaccggctccggcgtcgccatcgtcaccccgatgaaggccgacggcagcgtcaactatgaaaagtaccgggaactcatcgagtggcagatcgaaagcggcaccgatgcgatcatcgcctgcggcaccaccggcgagtcttccaccctcacccatgaggaacatatcggcgtcatgcgcgccgccgtcgagcaggccgccggccggatcccggtcatttcgggcacgggctcgaacgacacagcctactgcatcgagctctcccaggaggccgaaaaactgggcgcggacgccctgctgctggtgacgccttactacaacaaaacctcccagcgcggcctcgtggcccactataccgccgtggcggacgcggtggacctgccgatcctgctctataacgtcccttcccgcacgggggtggacatcaaacccgaaaccgtcgccgccctgtcgaagcacccaaatatcgtggcggtcaaagaggccaacggcaacatctcctccgcggcgcaggtggccgcgctgtgcgatatcgacatctattcgggcaacgacgaccagatcgtacccctgctttccctgggcggcaagggggtcatctcggtcatggcgaacgtcgagccccgccgcacccacgatatcgtcgcgaaatggatggctggggacgtggaaggcagccgcgccctgcagctcgagctcctcgagctggccagcgccatgttcatggatgtcaatcccatcccggtcaaggaggccatgaacctgatggggctggatgtgggcgaatgccgcctgcccttgtatgggatggacgatgcggcgaaatccaagctcgcgtccgttcttcggaaataccggctcatgaaataaggcccggccccgatctttcgatcggcatggtcaacagaaaggaagtccaatatggttcgtctgattctcagcggatgcaacggcaaaatggggcgtgtcatcacccgctgcgccgccgaacggtgcgactgttccgtcgtcgcggggttcgatctcaataccgagagccatgcgggctttccggtttacgccaatccggccaattgcagcttggaagccgatgtgatcgtcgatttttcccatccttcggccctgtccggcgtattggcctacgccctggataaacgcctgcctctcgtggtggccaccaccgggctggatgaaaatcaggtgctgaagctgagggacgctgcggccagtatcccggtctttttcagtgccaatatgtccatggggatcagccttatcatggatctcgcgaaaaaagcggcgtcggttttaggtggggacttcgatgtggagatcctcgaaaaacaccacaaccagaaggtggacgccccttccggcaccgccctgatgctggcggacgccgtgtccgaagggctcgactacaccccccgctatgtcttcgaccggcatgaccggcgcgaaaagcgggccaaggcggagattgggttctcctccatcaggggcggaaccatcgtcggggagcacgaggtgattttcgccgggcacgatgaaatcgtcaccgtcacccacaccgccatgtccaaggagattttcgccgtcggggcgctgaacgcggccctatatctcgccggccggccggctggattgtacagcatgaaggactttatcgccggcgaatgatgccctaaacacaaacgttgaaaacccccacggtatcaccgtgggggcttttggatgtgcgcgggggactctatggaccggtccggacccgcagccgcagaatcccgttgaccctggtggagggcgagacggttcttccctctccggtgatgtacccgtcccggattgccgccttgacctgctcgcgcgataggccgagcccgctgctgagaatcttgtccaggcgtaaggcggcgttttccggacagcggatttcgagcagcccctcttcccccgcctcccgccgttttttgatccggaacccctcatcataaaccgggacggcctggccatgggcgaacagccggggatcgcacgcgcaggcgcgtgccgcggccgggttgttcgactcatagacgcgaaggcggccgggagaaagctccgacaccggcgttctcgcaacgacctccatattccaggtcgttccgcaggccgggcatttatagatcagccagacatcgagacggcgcccattggcgttcatgcggaatttgccactcgagacaaacggccgttcgcatccgcagccggggcaaaaacgcctcagcgccggtacaccgtcctggtggatttcccatcgttccatgccgtccgcgcccctcctttcccctttggaggacgcgggcgggcggtcgccccgtaaacagcgtgccaacagccgtccggcaggcggcccctgccgctccgggccgcgaaagagggcgcaagcgcctctcgaaaaccgtgattcatgttctatcttttccgaagcctctgcggcgggaaagcgacaaaaaaaccggccttatccgggtttcgtgaacagtctcacgaaaccagccgaataaagccgggatcacccatagataggatgtcaggcgctctgccgcgcagcagctctactcaattcccgtaatggcgcagcccaaacaagccatgaatggcgtttgcggtgcggcggtatgcggaatcaagcggctgtaggcatgggaacacctcggatcatagaatagctatagtatacggcataacaaggaggatggcaagcttttttcctcttcagcgtttgacgcgccactcccgatgaggggagaaaagccccagctcatgatcgtcgatcccctggtattgctggagcagcaggcgtcctgccgcctcggcatagaggatcccgttgtccccgcagcacatcgcgtaggcgatctggctgcaatcgggcaggcggccgatcacgggcaaccggtctttggtcgtgccgtccttggccgcgaacacatactcgaccgtgatattgggaatggcggggaacatatcccgcaggatatacgccaacgaatcgaagcgcttttcgacggctggcgtcatgtcgagcagaccggccacccgccccttttcatccatgaaggcgctgtcgagacccccgatgaggatccggttgtcctccgtgacgctcaggtaaaggcggggctcctcctcccgatggatgacgcaggggccccgccatccggcaaacccgtccaccggctcggtgagcgccatataggtggtgcgcacatcgtcgaggccgccgcagtggcggctgacatcgagtcccgtagccataaccacataaccggccgtcacggtatgcccggtgctgcattcgaccaggaccgtcccctcttccgtctgctcaatggtttcagccccggtattttcaaaaatacgggcccccttgccaaccgccaggccggccagcccatggaccatccggtaagggtcgacctgcgcggcggtgtttttcgtatacacccccgcgctcatcggaaacgtaaactgctcgctcgcggtatcggcgtcgagcagctccacatccatgccgttgtgcagacggagggaatattcacggcgaaggacggcggaaccctcggattccgtcgcgtaccgcagactgtccatacggcggaacccgcagccgttctggaacgagccgcacaggttttccacattatccaaagcctcggcaagcagatgcgccgccgtcatcgcgcgttcggggccgattttctccgccaaacaggtgagggtttcctcacccgagagtgtcatgataccggaggacacggccgtgctgccgtaaccgaggggcgaatcactgagcaggacggtatcgatgcccgcctcggcgaaacgcatggcgatcatggcggctgcgatgccgccgccaaccacggccacctcacacgcggtatcctcgtcgagccagcggtactgggcgggagccggggtcaaagaggtccacgcggatgcatggacggtattttttatcatggatgcttcttcctctctgcttttttcttagtgtgcgacattggctccaaaattatgtacccggtccagcggcccggatgggaaaaatcttgatccggcattgcgatccagggaaaaatacggtatactttttccatccctgtaactatttttgatggaaaaggatgaagagacatggaacagcttatcgccgcattcgaagccttgtgggttaaaatcgtcgcgtttttcccaagcctgctggccgccgtgatcatttttgtgctggccctcatcgtcaccaagctgacggaaggcccgatcgccgccatgctcaggcgcagcaaaatcgatatcgacgaggtggccatcaaatatgtcaaccgtgtcgtaaagatcttgatttggtttatcgccgtcatcatgatcatggataagctggggattccggtgggaagcctgctgaccatgctggccgcaatcggtgcggccgtggccctggccatcaaggacaacctgtccaacctggcctctggggtcgtcctgttattcaccaagcccttcaaagccggcgattacatcgaagtggaaggcgcctccggctcgatcaaggaaatcgagatcatgcacacctatctggacacgcccgggcacacgctggtagccattcccaacaccaagatgatgaccgccaccatcgtcaattattccacatatgagacgagacgccaggatctgcttttctccattggctacgacgacgatctgcttggggcaaaagccgtgctgcaggaattggcagaggctcatccgctggtcctgaaggatccggccccctgcgtcatggtcaacgagcagggggaatcggcggtcgtgctcctgctgcgcgtctggtgccaaaacaccgactattgggatctgcgttttgacctgcttgaaaaagtcaagctggcgttcgaccgcaaaggcatcacgatcccctataaccagctcgatgtccatctgcccgctcctgcccatccggaagccggcaaataaaaacggtaacatccggccgcgccatatttcagcaatctttcaaaaacgttcggattcgctgctcaaaatccgatattccgggcggatagaacggacgaactatgggtaatccgtccgggcggcataagaaggccctgctcgcgcttgccgcgggcagggccttcctgtgttgatgtgccgataaaaccaggcttgtcttttttcaaaaaagcatctgcataaaaaccctctattcgcatcatgatgtgtatgatagagaaaacaggtatccagatactttgagcgagagccgatcaacccataaggttaatcatggggggaatctgcaatgttatccagacaagttggccgcaatatccgctggcgccgaaaaaaggcccgtctctcactggaagaactggcgtacagagccagtttggacacctcacatatcggaaagatcgaacgtggctgctggaatccgaatttacagaccctcgcccgcatcgcgacggctctcggcatttcccctcgcgccctgttcaactgcggcacgctggacgagccggattacgcccgtctgatcgctttcgcctgttccaccatcccttattacgaatttctcagcgtatacgatcctctctttttaggggaatttttaggcagctttctcatggagcgcatcaccgtggcggaaatcgactcgattgccgaactctatctggcggaggtcacgtatgaggctgttcccgagaccatcccatctccggacggcgcctactgcggctatgggatcgccgccgtccatcagggaaaacggcacaaggtccggctttccctgatgcgggatgtcacgacgaaccggccgctggccgaaacgattgcccgtaccctgaccgaaaaccgggtcccttatgatcaattccgttacatcgcccgcgatcttgctgtggaaaattttgtctgacacatatagctttcacctgattccgcaccgagggccgtatccccaaacacctgaaacgaggccgtatggacgaaccatacggcctcgtttttcgttgagccttactcctccgccggtacgggctgtgcatcgaatgaaaagcggttgtcctttacaccgacctgtacgacatcaccgctccggaaccggccctccaagagctgttcggccagtacgtcctcgatccgggactggatggctctgcgaaggggacgggcgccgtagaccggatcgaatccctccttggcaatctcggcaaccgcgtcgtcgctgacctccagggtcatccccatatcctcgagccgcttgtcgagcgactggagcatcctccgggcaatccggcggatatcctcttccgagagctgctggaaaacgatgatatcgtccacacggttgaggaattcggggcggaaggtctttttgagctcgcccagcacatcttcccggatctgcttctggttttcggcggcatccttttgcgtcgcgacggcaaatccgagtttccgatgctcggtaatcatgcgggccccgacattggaggtcatgatgatcacggtgttcttgaagtccacccgccgcccctgggcgtcggtcagaattccgtcttccaggatctgcaaaagcatgttgaacacatcgggatgggctttctcgatctcgtcgaacagcacgacggaatagggtttacgccggattttctccgtcagctgcccgccttcgtcatagcccacatagccgggcggcgacccgaccaggcgggagaccgtgtgtttttccatgtattccgacatgtccagccggatcatggcgttttcgtccccgaacatagcctctgccaaggctttgcagagttcggtcttcccaacgccggtcggacccaggaaaatgaaggagccgatcggacgacggggatccttgagccccacccggccgcggcggatggccttggccacggctgtaaccgcttcatcctgcccgacgatccgctcgtgcaggatctcctccatacggagcagccgttggccttcggcctcagtgagctgtaccacgggcacccccgtccagctcgacacgatttccgcgatatcggcggcggatacctcgccggtaatcccggcgtttttctcctgccaatggccgcgctgctcttccagcttctgggcgagttccttctcttcgtcccgcagatgggcggcgcgttcaaaatcctgttcgttgaccgcagcctttttctcttcggacaggcgcttgacctcctcctccagcttcttcagatccggaggagctgtaaaggcttttagccttactctcgaggctgcctcgtccaccaggtcgatggccttgtccggcagataccggtccgaaatatagcgggtggacagggtgaccgccgcctcgagcgcctcgtcggtgattttcaccttgtggtgcgcttcgtatttgtcccgcagccccctgagaatcaggatagcctcctcggccgtcggctccccgaccgtgaccggctggaaccgccgttcgagggccgcgtccttttcgatgtacttgcggtattcgtccagggtggtggcgccgatgacctggagttctcccctggccagggagggcttgaggatattggccgcgtcgaccgctccctcggcggcgcccgcgccgatgatggtgtggatttcgtcgatgaacaggatgacgtttttctcccggatgacctcgtcgatcgcgtttttgatccgttcctcgaaatcaccgcggtatttggtgccggccaccatgccggtcaggtccagcgtcaccacccgcttgccccgcagcagctccggcacctcgtcggccgtgattttctgggccaggccctccgcaatggcggtctttcccacaccaggctccccgatcaggcaggggttgtttttagtccggcgggacaggatctgaatgacccgctcgatctctttcccccggccgatgaccgggtcgagtttgccttccctcgccatggcggtcagatcacggccgaattggtcgagtgtcggggtttttccaggccctttggaagcggaggaggcgccgccgcggatcccctccgacgcggtttgagcggggttggcgccgatcgctttgccgatgtcccgcatcagttcgtcgggacgggcgccgagagaggcgatcagccgcacggcgacactgctttcgtcccgcaggacggcgataagaatgtgttcggtgcccacatatccgtgctgcatcaccgccgcctcggccacggccatttccatcgcctttttcgcccggggcgtaaaatcctccggggtcaggcgggtatgctgcccgctcgattcgctttcgacgatcttctgctgatactgcacggcggtcacgccgcggccgcccaggaccgacgcggcgaccccggtgccctcctgcagcagccccagcacaatgtgttcggtgccaatataggtatgcccgagcgcctcggccgattcgatagccaggttcaaggcggtattggctttttcagtgaatcctttaaaccggtacatgatattcctgcctttctaattgagctgtccggatcaggccagccgtgtgcggaccatttccgccctggcggcatcgcgttcggccggctccatctcttttccggccatcgccatcacggtagcgggctgcgcgtccccgatcagtccgccgatgaggtccagcgagattccctcgatcattcccagggatacccccacccgcagatttgaaatcagagacatgaactcgtctccccggagcagccgcgctgtgcgcaggatccccagagaacgccagacccggtcctcaaaatgcgggttgcggcagagctcctcccggcccgcgcgttcctcacggataatctgggcggcgatccctttcagattttcgatggcggccgactcggagatgcccagcgtcacctggttggaaagctgataaatagccccttccggtttgctgccctcgccgtacagcccacgaatggtcaggccgagcttggagaccgtgttggcgagctgctggatagcacccccatcctgtagggccggcagatggagcatcaggctcgcccgcataccggtgccgagattggtcgggcactgcgtcaggtagccgagccggtcgtcgaaggcgaaatgcaggcggctatccagggcggtgtccagctcatccgccgtccgatacgcgcggtcgagctccaggcccgcctgcatcacctggatgcgcaggtggtcttcctcgccgatcatcaaactggcgctttcgtcctccgaaaggcacaggacgctcccctcttcccttttggaaaactcgggacttatcaggtggcgttccaccagggacagagccgtgatatgaggcagcgtgtgcatgtcgatgacccggtagcccctctcgggcagagcctttaggatcgtatcggcggcctgccgtttctgctccggattcatacaggccgggaagggcacacgcggcaggttccgcgccagccgcacccgggtgctgatcaccacatcgccgtcctgcccggtagaccggtaccacttattctccgtcatgctgcgtctcctccttttcgagtgcccggatgcggtcccgcagcgcggcgcattcctcatactgctgctccgcaatgcattgcgcgagctgctggcgcagggcgtcgagctcctgctcctttttcaggcggtcgccggccccggccggtacctttcccgtatgcttggcttttccatggatacgctggatagagggcaggagtcggtcgtaaaaggtggtatagcaggacgggcaccccgccttacccgactgggcgatctccccaaagctccggccgcagacctcacagcgcacggtatccgctttttcacgcgccgtcggctcggaaaacagcgctccccagaaatcccccaggtcaaagccaaggccgttccacatcgaaaggccctgctggccggcgcagtcggcgcacaggtggatttccgtcgtttctccattgatcgttttctttaaaaaagttgtcgccggtttcttgccacagttttgacaaagcatcgtctttcctcctatatcctacatattcaaagcggtgagcatctgtttcatcaattttgcccgcagccggtcccggcattccaccgggacatcccgatacgcctggtccgacaaagcggcgccaatcaggcgggcggctgctggggaaatccatctctccccggccaggctgtccaggatcgcctgcgcagccgcaggcaccagcgtctccccgatagaattgaccacgtgcatgagcggggaacagcccggcgtatactggacgcggtggatccggatatagccgccgccccctctccggctctccacgatataaccctgctcgggagtaaagcgggaggtgatgacatagttgatctggctcggcacgcagccgagttcttccgccagctcgttgcgccgcagttccgctgaaccgtccccggcttcatctatcctatgaagaatataggccgctatggcgtcgcttatgcgcatgacttccccacccttctcataaactattctcattttattcgattggtcaggaaaagtcaaagtcaataatggtcaaatttatcccggattttcccgttattctccatctgccgcaacaggcgggggaggacggcgccggccggctgttttcgccggcttatgccggatccaaaggctccgcattttcaccgcgccgtgctgtaaccattctcccgaggcggcatagtatggaatgtacccattgaaaggaggcggcaaagaatgagtctgcggaacgtattttgcggcggaaacagctgcacatggatcctgttcgtcatcatcatccttttgattctcgatgacgacgattgcggttgtggtgccaataacggctgcggttgcggctgcggttgctaaggagcttcccctttttcaatagtacgattaagaaaggagaaatcgactcatgtgcctgagaaacctgtttggcggcggtgattgcacctggctgctcttcatcatcatcctctgcctgctgttcaacgacgacgattgcggctgcggctgcggcaatgtacagaacaacggctgcggttgcggctgtggctgcggctgctaagcccttttccatcctccggccggtacagcgtccgctgaaccggccggttcctttttgcccggatccttccggccccgcttatcctttttccagcatctccaaaaagcggccgatcacctcgacctcccggtcacgcaggcttgccagtgcctcttccacatcggaacaggaaaggccgctgccttttaggttgcgtttgagcactttattcagcagggtgcgcgcctgatcctcaatctcccgaaacggtgcggcaaattccgctgccgggcgggcgtcgtcaagaccacccataaattccgcccgcagggtcagcatatgcttatgtgcccacaaaatataaaagatgcggtgatccaacgggccttccgccggcacactttccctgacatactgcatcagcacgtcgtatacccggatacctcccaccgtatgcccataggaatcgcgctgtttttgacggatccggtagcggtacaggctgttttcacctcgaatatagtctgcaagctgggtacagaccgcctgtgtgtcaaagtcatgagaggccgccagatgaaagtcaaaatgacgccggtgatggtcgggagagaccagcctcaccgtgttgtgccaggaaaggggattgacggtatcggtaaagtacgcgttttccatatcctcgaacgggcatgtccgaaggcggaaattcccttcgaaaaaatccgcaatataaaacagccccttggtcatatcgtatccgtgaatcatcatatcatgggtaccgtccccatcatcgtgaaacgcgtcgataaaacggcggttaaccggcaagataacatattggccgagggaaaggctgtcggtcaaaaaatctgcaatccggtcataccgtacattgatggtttcctttgacatctcctgcgtatagagatgggggcaagcaaaccaatacgacggggcgacgaaatagaggaacacgccgcccgccgcgatccttggatcgcaggcccataactgtgcgaactggcccatcatccagggatagaaagccgcactgttcagtccgaccgcctgcagatacgcatcctgcgtgatgcattggatgacaggttcctgcaccggcagcttgatatacgtctgctttttcattgggcaacccccattcgatattaatattcataggaattcaaccaaatgttacagtgaattttaagagaagtcaatcaaactttagagatggtatcgggattcttagcaggaaaaacgaactcttaaccatttgtccaattgacaggccgccttcaaatggtataataaaaacggccgtatccagaggcgaatcgcggtacggggcctttggtgataaggggaccgccttccggcatgcctgcgaaaggatggaacatcatgatgccagaaaccaggaaacggcgctttggcgatcggtatgacggctggcgcctgcggcatacccagtcgtttttctccgtgatgccccatattatgaaacgccgttcggatagttcggtcctgttcgatgatgttgtggaaatcgaggaactcgaaaaatacgtgcggcgtctccggcggaacgaaaacatgcccggattctcgatgttccatctgtttatcgcggcgagcgtccgcatgattaccctgcggccctggctcaaccgtttcgttgtaggggggaaaacctacgcccgcaaccgtctgaccatttccatgaccgtcaagcgcagcctgtcgaaggatgcggaagaggtggtgatcaagccggatttcgaagggacggatacggttttcgacgtctaccgcaaaatcaacggggccattcagcatgaagtccgggatcccgatgtggaaaacgacaccgacatggtcgcgcggatcctcgacatctgcccggcctggctgacccgtg

SEQ ID NO: 2108 - DNA, 4801 bp, Unknown
  16S sequences of unknown bacteria
cttcgccgtttccagtgcggaagtgagggcgttccagctgttcgtcgtgtagtcttcgccatccagtgcctctgccgccgcgatggcttcattcaatgcgctcttgtcgatctctgcggtcggcgcggtgatgcgcagttcggcgccgctgccataatcgccgatggtatcggttgcctgcagccggatattggtcgcatgctgcggttcaaaggcggctgccttccaggtggcgctgcctttccatcttccttcgctgaccttggtccatgtctcgccctcgtcgttgctcagccagatctcatagcctaagatcgtcccgttcgttccgaccttgcgcggaagatagcgcagaccgtcgatgagcgtggagcgctccaaggcgatctccacccagcggttttccatcggggtgccgccgtagaccgtatgccagatggtgctttcgtcatcgtccagcagattggaggcgggaccttcgacgccgctgtctgcgtgctctgatccggcgctggcctgcatgtctgcagtcggcagatcgtatttgtcagtagtgggatccttagcgtccaggtccacccacatcgtgtattcatccatccagacatcgttcagataatcgcgcacgcggatctctatgccatcgtcatatacattgacctgatagccgatctgtgcctgtgcatctccataggaggagtaccagaaacaaggcacatcgaccacatgaccgaaatcgcggtcaaagacatctgccagatcgatgccgttgtggacatgtccggtgaagatgacggcctgcggatgatcgcgcaggacttccttcagcttttcttcactttcccccgccgatccagtcgagctcttcgtgatcggccgttccttggaacgtctggtggatctggatgaagatcggctgatcaggatcgctgccctcgagcacggtatccagccagctgatctgtgcgtcagagagataggcctgatccttcaggtcttcttcggtattcagggtgatgaagtgatagccatcgatccattgatcgaaatacagctggccttccggcacatcgcccatatatttctgattgtgttccagatatcgctctttgaatggattggtgcctgcctgacaggtcgggatgcgcaggccggcctcattgcggtcttcgctgctgcacagccatctgacatcatgattgcccagcgcgaccatcggataagtgctggcatgccgatcgacgatgtcaaagaacgcgtcatattgggctgccgacccggagttggtgatgtcgcccgggaacaagatggctgaactgtctggatccatgacctggatgtcctgcagggcatcgatgaggttagcgttggtgtcgacgctgtcttcgctgccgttgatgtgcacgtcgctgagcacctcgaaggagatgatcgggtcttcgtgcgtggaggcaaaggtctcatatgcgatgttcagccggtccaggatggcgcgcatttcctctggtgcagcttgatctgcggcttcgtgtgcctgatcgatcgccttctggaaggcatcggcacgctctttggtgcaggtgcctgcggatagtgcgtcatccaggatctgctgcatctgttcgatctgcatcggcacgctgtccgcatagtacagctcgcttcgctcttcgctgctgatcagccgcttgtagacacgcagttcatccaccgtcacatcatccatcccatatcgtttttctccgtctgcgcccagcacgagatcggtgtagtcgatcgtgctgcctagtgtgtcgctgatggatgcactgccggcttcttcattatccacccaggcggtcatgtcgccgtcgcggtcaaagccgatgacgatgaaatgccatgtgtcatcgttggcgcccaggccgtaaatgtcgtctctgccatggccctgagcggtgtaattgacacgcaggccgttggtgaagttgccgaccgtgaatccttgattggatccggatgtccagtctttgttggacagcagcgcgccttcgctggcgccgccctgtgcagagcgataccagaatgcgagcgtgaagtcctctgtgccaaagcgcagatcttctgcttgcccgaaattgacatactgctgcgcggtttcggtgctgctgccgttgtcattgacgatatggatggctttgccagatacgccgctgacatattccacttcgccatgcacggaaccatggttggcgcgtccgctttcatccttggcgtcttcctcatcgaagctggcatggagcatgaggccgtcgacgatttccggcatgccttcctgcagctcttccatcttttcatttacgacactgattgcggccatgatcgcgtcatgatcttcgccatcctgcagggcctgggcctcagtgaccgcgtcctccagcgccttgatcttgtctgggtcgaagaacgtatagtgctttgcgttttctgccaggtctgagccgcgggcgatggtataggcgagcagatcttgcgcatatcgcagcggcaggctgtctggatcttgcaggcctttgtagacgtgcagttcatcgatgagggcatcgttgagcccgttgcagaaatagccgtctgcgcccacgacgaaattggtgacgtcgatggagcggccagcatcggcagagatatctgcgctgacgctctgtaccccgtccatgtaactggtcatctgcccgtcgcgatcgaaattgatgaccatgaaatgccattcgccgtcaatcggagagatgccatacagatcgcgccggctgcttccttgagcggtgaagttgacgcggaagccattgtcgaagtttcccacggtgaagccctgattggatccggatgaccagtctttgttggagatgagcgcaccgcctgaggattcgccgttatctgatctgacccagtaggtcaggctgaagtcttcgctgccgaatttcaaatcgcttcggttgccgaagtcgacgtattgttcggcctttgctgaggtgctgccattttcgttgacgatgtgcagggcgctgccgcggatgccttccacgtattccacatcgccctgcgcgctgccgtggtttccccggccgctgctgtcttcactgtttccgtcaaaggctgcgtaaagcacttcgccgtcttccggcagcggctcgctgatctggctgtggacctcttcataaagatcgcggatctgctcggcgctcttggcggaggtgaagatcttcacttcgtcgatcacgctgtccagcagggcgttgcgcagatagccgtcagcgccgatgaccagcgaaccgatatcgacgctcttgcctgcgaaggcggagatgtccgatgtggaaacgagcgcgccgtcggtgtaggcgctcatcaggccgtcacggtcaaaggtgacggcgctgtggtgccactgcccgtccaccggcgtgaagtagatgtccttcctggtgccgtcaaaggccaggttgacacgcagctcgtcggtaaagctgccgatggcaaagccgtcgttgcttccggaattgtaatctttggcggagatgacggcgcctccgctctcattgccggtgctgctctgataccagaaggagatcgtgaaatcctctgcgcccagctggatctgatcgcccaggtcgatataggatacggcatcggcagagctgctgccttcagggttgacgatatgcgcgccttttcccaggacgccttcatcataagtgacattgaccgcattcccgtcatgaccgctgccgctttggtccatggcattgcctgcgtcgaagttgaggcacaagacttcgtcatctccagcatcgtaaagccgctggatgtcttcctcctgcagcagtccgctgtatacatataattcgtcgatggagctgtcgagcagcgcataactgccgttgcagtcggcgccgatgctcatggtcgaaaaatcgatgggttttctggcatcatcggagatgtcggtctgcttgacgagctctccgtcccgccatgcgctcatcatgccgtctcgatcataggtcaccgcgatatggtgccatgcgccatcgatcgatgagacatcatacagatcgtggcgggaaccttcctgcggggtgaagttggcgcggacattggaggtaaagctgcccagggcaaacccgtcattgcctccgctggcatagtccttgttggtgatgatcgctccgccgtcctctgttccgctgctgcttttataccacagggaaatggagaaatcatcgctgcccagctgcagtgatcctgcctctgggaactgcaggtaattctctcccgcagccgagctgctgccgtgttcattggtgatgtgcagggcttttccgctgacgccttgcacatagtccatcgtgccgtgcacgacggcttcgtttgcatgagcgctgctgtctgtcacattgtcctcaaaagacagatgcagcagctcctgcaaggtggtctcactgcgttctgcagcttgcagcggcaagccgctcagccccatgcagatcgacagggccgcagcagtgaacttcttcaatatcatatagatcctcctttctttctgttctgtttaggcagatagccagagcagacgactgtctttatcatatcatcaggataattgtaatatcttgtcaattgttgtatttttgtgacattgccatccgttcctgtacagttcgaccagagcaagcgatccggtttccggatgaacagacggtaattttcgctgaagtgaaaaagtaaacgcaactctaataaggcaaaaaatgatcgttgcact

SEQ ID NO: 2109 - DNA, 24153 bp, Unknown
  16S sequences of unknown bacteria
aaaatcaaagaaaggggaaagttaaaatgacagtttcaaagtttttcaaagaagcagcacacagctttgcaaataaggttgtaaataactaattgagtttaagatagaaaatcaaagaaaggggaaaattaaaatgacagtttcaaagtttttcaaagaagccgcacacagctttgcaaataaagttgtaaataactaattgagtttaagatagaaaatcaaagaaaggggaaagttaaaatgacagtttcaaagtttttcaaagaagccgcacacagctttgcaaataaggttgtaaataactaattaaggataaaaaggaaaaaatcgaaaggagctacgatggcagtacaaatgattatcaaaaatgccgatacagagaaaaaggtagtcggcaaaaagaatattattgacgaaatcaacggcgtagagagagccggcgattgtgaaacaccactttgcagaaagcgcgtcgcaggctctaacaacaagattttgttaataaaataatggaaaataataccgaatattgaaacaggattgaagtttaaagttcaatcctgtttttgtttttaaataaccttttttgtcacgccttggtgtgacaaaattggtgtttaatcaaattgtttgtatcaagttttggatataaacaaatatatctataaatttgaatcgtaggggcgttcattgaacgcctatgcaaaccgcaggtttgcactgtgtggttgctacaacaaccctctgtcacttgtaaactcgtgacatctcccttaacagagcgaataaggtttacagtttatttggattgatattttatagtggaaaataaaattaaataatccgcctaatcaatctctcagtcggctgtcgccgacagctctctttaccaaagagagccgaaagatgcgtatttatttgaaatactgttttatgtcggaaaccattttaatcaatttataaaatggcggtcaatgaccgccgctacgggttatctataagttgttgttatcggttacaaaataacagccctaaaatcaacaatgccttgttgtccctgttaagggaaaatgtcgcgctttgcgtgacaaaagggttgttaaagcaaattgtttatattaactttttgttacgaacaaatatatctataaattcaagccgtaggggcgttcattgaacgcctatgcaaaccccgggtttgcacacagacagccctcccgtctgcgttagccgtctgaggggttgtcttgcaaattgtttacatcaaatttctgttacaaataatagccccaaaaatccgcaaccttgccgcccttgtacccatagggcataacatgtaaaggaaggtgatttttcgtaagaaaaatcggaggggttgactttcataaaacaagttgatttataaacaaatatcggatgtaaacaaaatgtttccaatctctcagtcggctatcgccgacagctctctttaccaaagagatccgaaagatgcgtatttatttgaaatactgttttacagcagaaaggcatacaaataaaaaccatcaaaaaaggaaacgacattcgttacaaattgtcgtttccttattttaaaattatttgatattattcagccgagaaagaatctttgcctacaaagcacaaaggacattcaaagtcttccggaacatcttcccactttgtaccgggggcgataccgccttccggatagcctaattcttcatcatattcccagccgcaaacatcgcaaacatactttgccataatttacctccgaaaaattatttaaaatatctgttaagcaagccttcaaatgctttgccgtggcgggcttcgtctcttgccatttcatgtacagtgtcgtgaatagcgtccaagcccaattcctttgctttcttggcaataaccattttgccctctgttgcgccgtattctgcggcaactcttgcttcaaggttttcctttgttgaagatgaaagcacttcgccaagcaattcggcaaattttgctgcgtgttcagcctcctcgtaagctgccttttcatagtacataccgatttccgggtaaccttctctgtgggcaactcttgccattgcaaggtacatacctacttcggaacattcgccgttgaagttctcacgcaagccctgcaaaatttcttcgtcaacaccctttgcaacaccgagaatgtgttcggcagcccaaactttttcgccgccttcttctctttctttcatttttgctttgcagattgggcaaatttcgataggttcatctgattcgtaaccgcaaaccgggcaataatatttctttgacataattttaatctcctttaaattataattttttaaatccttaatcctcttggtctgtctgaccttgtgattatattataattattctaattctaaaagtcaagaggaaatttttagaatgacttagaataagatgtgaaaattttgtgtaaacacttgccttgccgcattttatattccaaatgtcggaaaagctataaatgtatattagagaaattgttttactgtcataaaatagtatcatcaaatttttatatattagtgcaaaaaatatattgtaatgaattttctgttgtgataaaattatcccgttaaaaataaagtataaggcggtcggtattatggaaaattattcggaatatatatctccactttcacaaaggtatccaagcaaagaaatgaaatatctttttagcccggaaaaaaagtttaccacatggcgcaaactttggattgcccttgcagaggcggaaaaacaacttggacttgacataaccgaccggcagataaaagaacttcgtgacaatcgggaaaatgtaaattaccgggaggctcgggcaagagaaaaagtggttcgccacgatgttatgagccatgtttacgcctacggtttacaatgccccaatgcaaagggaattattcaccttggtgccacaagctgttatgtaggggacaacaccgacttgataattatgcgtgacgcacttgttttggtgagaaacaagatcatcaatgttcttaaaaatcttgcggatttcgcccttaaatatgcggatatgcccactttggcatacacccacttccaggcggcacagcctaccaccgtgggtaagcgtgctactctttgggcacatgatttgctccttgacttagaggatatagataatttaatagacagcttaaaacttttgggctcaaaaggcacaaccggcacacaggcctcatttatggaattgtttgacggcgatgaggaaaagtgccgcagacttgataaaattatagccgaaaaaatgggctttaaagcctgttatccggtttccggccaaacatattcaagaaaaatagactttaaggtactgtcggttctctccggcgtggcacagtccgcacataaattttcaaacgatatgcgccttttacagcaccttaaagagatagaagaaccctttgaaaaatcacagataggttcttccgccatggcttataaacgcaacccaatgaggtgcgagagaatggccgcacttgcaaattatgttatcagcgatttaaacaatgccgccgttacaagttctacccagtggtttgaacgcacccttgacgatagcgcaaataagcgcctttccataagcgagggctttttggctgttgacggcattttgcagctttacatgaatgtaaccgcaaatatggttgtttatccgaaagttatagaaaaacacattatggcggagttgccctttatggcaacggaaaatattatgatggacgccgtaaaagccggtggcgacagacaggaactccatgagaaaatcagggttcattcaatggcggcaggctccgttgttaaaaacgagggtaaggaaaacgacctgcttgaaagaattgccgcagatgaaagcttcggtctgactttggaacagctgaaagccagaatgaaaccggcggaatatgtgggcagagcacctgggcagacaagggagtttgtccgtgattatctgaatcccatatttgaagaaaacaaagatattctcggccggcaggcacaaataaatgtttaatattgtataaacttaaatttaatatagatttttaataagtttataaggcgtacggaaataaaaacctgcgcttaaaacccacagagctaaggcaaaaggatgaattttcatcggatcaccttaaatctacttacaaaggagatttaatatggtaaaagctattgtgggcgccaactggggcgacgaaggtaaaggtaaagtaacggacatgcttgcagaaaaagcagatgttataatccgttatcagggcggtttcaatgccggccacacaatcgtaaacaattacggcaagttcgcattgcatttgttgccaagcggcgtgttttacgaccacacaacaagcgtaatcgcaaacggcgtagcgctggaaataccggcatttatcaacgaacttaaaggtcttaccgacaagggcgtgccgatgccgaagattttggtttcagacagggcaaatgttgttatgccttatcacaaacttcttgaccggtatgaagaagaaagacttggcaaggcaggcttcggttcaacaaaaagcggtatggctccttgctattccgacagatacgcaaaaatcggtttccaggtaaacgaacttttcaatgacgaaacattgaaagagaaaatccaccgtgttgcggaacttaaaaatgttcttttggaaaatctttatcacaaaccgcttattgacgaaaaggaactgtatgatgaaatggttcgccagcgtgaacttatcagactttttgttgcggacacaacggtatttttgcacaatgccatcaaagagggcaagagccttttgcttgaaggtcagcttggggcaatgagagatatagaccttggcatctatccgatgacaacatcatcttcaacattggcaggtttcggcgcttccggcgcaggtattccgccatatgaaatcaagcagatttacgccgtttcaaaggcttactcatcatgcgtaggcgcaggcccatttgtaacggaacttttcggtgaagagggagatgaacttcgcagaagaggcggcgacggcggcgaatacggcgcaacaaccggcagacctcgccgtgtgggctggtacgactgtgtttcatcacgctacggctgtgcggtacagggcgctacagactgcgttctctctgttcttgactgcttgggttatcttgacgaaatcaaggtttgcaccgcttatgatgtaaacggcaatataacaaaggacttcccacacacaacggatttgtacaatgcaaaaccggtttacacaactctcaaaggttggaagtgcgacatcagaggcattaaaaagtttgaggatcttcctattgaggctcagcagtatgttgactttatcgaaaaggaaattcagtgtcctatcacattgatttcaaacggccctgcccgtgaagatatgattgaaagaaaatcaaaactttaatcttaacacaaattaaaatttgcccgccttttggcgggcatttttagaaaggttttgtatggcttttttaagatacccggtttactataaagattttaagtgcaaaggcggcgactgcaccgacacctgctgccaaaagtgggaaatcgacatagacgaaaaaaccgccgaaagatataaaaaagaaaaatctcccataggggagaaaatccgcagtgccatggaggaaaacgacgacgggcggtatataaaattaaattcaaagggtctttgccccttgcttgcggaaaatggcctgtgcagtattattttggaaaagggagaagattttttgtgcgatatttgccgcctgcacccaagatatttcggttggtattcccgctttaaggaggccggtgtggggctttgctgtgaagcggcggcagagcttatactgaattgtaccgactttgccatgtgccaagaaagttttatcgacagcgacaatgaacttgaatacacaaatgacggcgaaatagaagatttcctctttgaaaagcgagaaatcttgttaaatgccgcacaaaagcggatagaaaataacgagagcttacaatcactttttgataggtgtttgaattttgctcacgagttttttgacgagtacaccgatttgattttttacaccgacccggaaacggcagacaacaatcaaaatatgggcaagtttgaaaatatttatacagcggacagaataaggcaaattcgggaatttttctccggccttgaaatctccgttggatgcgattgatagagggcgtttatcaaaatgccggagaaataagcggatatatcgaaaattttcaccggcaaaactcgtgggttaaagataaaataataagccttttcgcctattttatctatcgccactttatgagagcttacgacgatgacgatatttacgctaagataaattttgcggttttaagccgggggtttattgatgtaatatctgtctatatgtggttgaaagacggatgttttgagataaaaactttggtaaatattgcaaaattatactctcaagaaatagaatacgacattgataacacctatcgggcggaaaaattcaatatattttaacctgtgaaaaaaatcggcaaaactgccgatttttattttgttttgtaaccttttagcctgcgagtaataaagctactgatctgtgcataagcatagattggaggactttattatgaaaaaaaggaatttaatcttaggcgtggcgttgagccttatcacgcttttttcaaatcacacagaagcaaaggcattggatgtgcctgcgataacagtagataaatccgagtattcaaatggtaactgccgggtttattttacaatcaacggcgcaccggagggcggtgtaacccttaacatcggcgatgaaatttcaaaggttttgctggaaaacgtaggctatgtaacgccaagcgaccagttcaccgcaacggtacatattaccaacaataccgacggagcccttgcataccaaaaaggcagtatgaatttaggcgcagatacatccccaatacccggccggccaatgacggattttaccggctacaacggggcgaaaattccccttacccatgtggcaagcatggacaccggacacttggcaatgcgtcagcttttcgacaaaagaataggccgcaaagattggaacttggtgctaagtgtttacgacctgttggctgaaaaaggctacaccggcggcagccggataagtgattatctgctggacttctacaagaacaagtacggtgagccggagctgacatggcaaagtttagagcaaaatcattgggatgatgtgataaatgattttgccggaagcggaacaagtgtttacttcgatcttacaccggaagaatacgcccgggcacaaaatacttctctcggcccttatgtgtaccctgtggggcagtattcaaacggcaattatcaggttcagcttaaatggccggaggaggcaccggctgccttttcttacaatgctttttacaaggatttgtttgcgattacatttgcagatgaaaagccaagtatccacacgggtatgcgcacaaggggcgtaggggactatgcggacaaaaccggcgaggcatacacagtggcagaaagctatatttctcaaatgggtcacggcggcattttggaaaaaggggaaagcgccgaatttgtgatgacccttacatttgaaggcttcggcataggcaatatgtacatgggctatcagttcggcaatttgtttaatatgagccttaattttgaaagagccgtaaaagacataacaatcaccaaacaatggcaggacgccgacgaccaagacggcttgcgcccaacacaggttacggttaatattttagccgacggagaagtgattgacagacccgttaccgtcactgccgcagagggatggacgaaaaccgttaccgatttacctaaatatcaagatggcagggaaatagtttacaccataaaagaaacccctgttccaggctacgaaagcaaagtagagggttacggtattatcaatactcacacgccggaagttacaacggtaacaggcacaaaggtatggcgggatgatgacaaccgtgagggcaagcgccctgccggcataaccgtaaaacttgtaacagacggtgaagttttggcagaacaaactgtaaccgaaaatgaagattggtcttggagctttgataatttgccaaagtataacaaaggacggccgataaaatattcggtaatcgaggacgccgtacagggttacactgctatttacgaagaaaacggcaatatcacaaacaagtatacacctggtaaaataggctttacggttataaaaagctggaaagacggcgacaacgccgacagcatacgcccaaggtcaattaccgtaaacctgcttgcagacggaaaacccacaggaaaaacccttgttttaaatactcaaaacagttggagaggcagttttaccgacctgccggaatatgaaaatggcaaaaagataacctataccgttaccgaaaaccccgtaagcggttatacaagccaaattcggggagatacacaaacaggctttgtgataacaaaccggcacaccccaacaacaaaaacacgaacaaccacaaccactacaaacacaactactacaaacacagcaaaatccccggacacatcggacataagcggaattttggctttgaccggtacaatccttaccgctgccgcaggtggggttttaaaaaagcgaaatgacagaaaataaaatcacatttaatatataatttcatatcaatgatataccaatgcaaaaacggctcgatttcgagccgtttttgtttgttgttatttgtacacatcaaatatcctgagaataatatcaggcattctacaatctgttttgagtttaatcaaaatatgccttacacagtacgaaatcacagaattatgcagaattttgcttatattacacctcaaattccacggttacaatttcgggagggttaaacagtctgaatgggaaagagcttttgcctattcctcggcttataatttccgttgtggttttaaactttttcattccccgggcgtactttggcaaaaagccttggcttggcacatacaagcctatgtccgtaaaaggtatgccgaactgcccgccgtgagtgtggccggttaaggccaaatccacgccccggcagttgtaagtgtgtataaattccgggcggtgagataacagcaatttaaaattgccgtcattttcgcaaagagagataagtttatttttaaatgtggttttatcccggcaggtgattttttcatggccgaaaaatctcggatcccgtatgcctacaaggcttataaattcgccgttgcgttcaagctgtattttgccgttgtccataagagtgacccctgtttcgtcaaggcatgcggctgttttttcaaaatttttaattcttgcttcgtgattgccgcttacaaaatacactttgcatataccggcaagcttttgagcaagggataatcccggcagagtatccgttgtgttgtcatctcttcggcagtcaaacaaatcaccggttatggcgattatatccgggttttcggcttttgcataggatattattttatcttccaaaacccggtagttgtggtagtcggaaacttgcagtatcttaaagcccgaaaaagcctttggtatttttggattagaatatacatatcgggtaacacgcaggttggtattttgccgatttaaaaacaccgccccggctattactcccccggcaaccgccaaaatatcattgctctccatgtttccgcctcctttttgttctataataagattatattatttctttgtgaaaaaatgcaaaaaagcgaacaattttaggtataagcctaaaatgtccgcttttgtttatatgtttgatttatttcataaatccggcgatgatctgttcttccgcctctttttcagtaagacccaaagtcataagtttaataagctgttcccctgcaattttgcctattgccgcttcgtgaacaaggctggcatcggtgctgtttgcgtgtatttcaggtattgcgcttaccgtggctctgtccattacaatggcatcgcactcggtgtggccgttgcaaaggttgttgccgtacacatttgaaaggaacaactgctttgaattgtcccttgccacacttctggaaaccacatgggtgtggctgttttcgccgtcaagggtaacttcaaattcggttgtggcgttttggttgccgtgggtgaaaatcttttcgccgataatcaaagttgcgtttgcctttaagtcggctttggtttttctgtttgtggagtcaacaccttttatttgcacggtttccatttccatgtaactgccctcgtcaaggtggcaaacggtaacagggttaagtacattttcacctgtgccgtccccctcgccgtagtgcttttcaacatactttaccttggcatttttgcctatataaaatgtgtgtatgccgtcatgctggcttttttggttgccgcaattatgaataccgcagccggcaacgattaccacatcggcgccttcacctacataaaaatcgttgtaaaccatatcttccataccgctttcggaaaggatgacaggtatgtgtacgctttcgtttttagtgcccggctttatgataatatcaatgccgtctttatctgtttttgaaactatgtcgatatttgccgttgtccgtctgtccagctttttgccgttttcacgaatgttgtaagccccccgtggcacaccgtgaaggtcggatattgtggcaagcatatccatttcaagtttatcaagttttacagccatatcagttttcctccgcttttatgataaggggcataacctcttcttttgtgccaacgcacttgacttcgccaccggagagaagaataatcttgtccgcaatatccaaaattctctcctgatgggaaattattatcatattgccgcctacattgtcgtgcaggtgagcaaaaacttttataagactgttaaaactccaaaggtcgatgccggcttccggctcgtcgaatatggaaagttttgtgcctcttgccaaaaccatggcaatttcaattctctttaactcaccgccggaaagtgaaccgtttacctcacggaaaatgtactgttttgcgtcaaggcctacctcggttaaatattccaaagcctggctgtactttattttgccgccggcggcaagcataataaggtcttttaccgtaatgcctttaaatttaaccggccgctgaaaagcaaagctgataccggcgtttgccctctcggtaattgacatagatgttatatcaactccgtcaaggaaaatttgtccggaagtaggggttattatacctgcgattatttttgcaagggtggacttgccggaaccgttaggccctgtgataaccgcaaagccctcatcaaccgtaaggtttacatttttgagtatatctttccttacgccgtcattatcgacggaataagatatgtttttaagctctaacatttttatctccgaaaattttaaatttagaaatttttagcctataatattatacaatctttgtatgtttatatcaacacactattgtagtatgttaatatgcttttgtcaataaatttgacggttttatgtagtttgggcggatatttacatccttagacttgaaaaagcaaaacaatcatgataacatgcaggtgtaagcctaaacttttattttaaatatggtgaaccgatatgaaaaatgataaaaactctttaaaaaaacgattgtatgtgattttttgcgttatcctgtcatcttccgtttgggcaatatccgaatatgtacattcctgtttgcctgttgtccgtgggcgcaccgtcctcgataaccttattattatagctttactttgtgttttaggggtgtattcggcaaataaattataaaaaatatcggcggcagaccttggtttgccgccgataaatatacaaaacaaaaagccgccaaaggcggcttaaattatggtggacatggcgggacttgaacccgtgacctccagagtcggagtctggcattctaccaactgaactacacgcccacagtgtttaatcattatatcatactttttttgaaaagaaaagggtaaattgcgaaaaattcagacaaaattcatatttagcatacaaatttatcaaaatctccctgtatatttaactgtgttataagtcaaaatgcactttgtccttgcattttaatatataatagtttaaaattagggttggtttttaataacttttaattatcggagggtataatgaatattaaaaaaatacttgctcttgtccttgcaggggcattggcaacagtcgcattggcaacagccgtttttacagcctgcaaaagcagtgatgacagggacgtgccaagttacagccaaagtctcagcaaaaatggtctttttaaggacggcaagaaagaacttaaagcaaaagaatatatagatttggcagattattccaatatgcagatcgccaaaagtgatgttgaacttacagaggaagaacttgatgacactattaaagacgcaatctcaagttacaccacaacagaagatgttccacgggatgaggctgcagcagagggagacacacttaatatcgactatgtgggttccgttgacggtatagaatttgtaaacggttccacaaacggccagggcaccacacttgtaataggctcaggggcatttttgcaggccggcgatatgactgacgaaaacggaaatataactcactacaaaggctttgaagaacagcttgtgggacacaaggcaggggagagctttgatattgatgttatgttcccggagggatacagctcttcaaccgacgccgacggcaacgaagttattttaggcggcaaggctgcggtgttccacgttacaatcaacagcgttaagagaacaacttaccctgaaatcacagacgagttcgtagcggaaaactttgccgacgaatacgaaagcgcccaggatatgattgctaaaatcaaggcaaatgcggaagaaatcaaattgaaaaacgcagttgccactaagctgtaccgggattccgaagttaaggaatatccccaggttatgacagattacgaaaaaacatatatccgtgaatactttacaaatcttgccacacagtacggcacaacgcttgaagaacttatttcaagcagcggcgactatgacacggttgacgagtttatagaaagctacacagatgatatagagtacaccgttaagggctatcttatctgccaagccgttgtgcagaaagaaaatatcaaggccacagatgacgacatagaggaatattttgttgaaaatgtaggcacagaggactattcttcttatgaagaacagctgggcaagccttatttgaaacttattgttcttatggataaataccttgatgttgttattgaaaaggttgagttggtttaaatcttaaaaaagcgttaaaaaggcggactttttgtccgctttttgtgtaatatcggcgataaaacttgaaagttttgccgttatgatataaaataaataaatgtcacaaaagcggcggcacagatttaaaagccgcctcataaaatcacacggaggacaaaatgagttcaaataaaaaggaaaacaaaaacggcagcaagaaatctgccagaattttggccggctttttggctgcggcaatgcttttgggaagttttgtaaccgtttttcaggcattttttgcaggaaaaaacaacggcaattcaacggtttcaaactttaattacagcgaaggccttgacaaaaacggctttatgaaagacggcaacgaaacaatcaaagctcttgacattgtaacattgccggattacaacagctatgaaatttcagatgatttgaagagtgccacagacgaagaacttcaagcacagttggatacaatcaaaaaaaattacaccaccacaacaaacaacagcgacagcgagcgcacagtacaagatggtgatgttgtaaaccttgattacatagccaaagttgacggcaccgaatttgaaggcggcacaacaggcggcaagggcaaaaatattgttgttggcagcgatgatgcaattcgggccgcaaacggcgattatcaaggttttgaagaacagcttatcggccgcaaaatgggcgaaaagtttgatgttaccgttaaaatgccttccgacaaggcacggtcaaaggacggcaacggaaacgaagtcgttcttgccgacaaggaagttgtttacagcgtaaccctcaactacgcacaggataaacatgtgcctgaacttaacgatgattttgtaaaagaaaatctttcaaaatattatgacagctatgaggatatgctccgggatattaaggataacatagttctctcaaagaaactcagctacatttggaacaaattaggcgacgagagccagttcggtgaaattcctgccgcagttacacggttgcagaaaaactacgcaacacagagcatcaccgcaacggcttcacagtacggcattgatgccgcaacctatgcgtcacttacaggtgcggaatctcttgacgctttggttgaaaagagtgcggaaaccgcaagcaaaggggctgttctctgccaggctttgtgcgaaaacgagggtattgaagttacggatgaagatgtaagttcattcttctacaagaacttcggcatcgacaatttgtcaacatacaagagcacatacggtgaaccttatttgaagtacaccgcaatgcagaatgttgttttgacaaagattttggaaaatatcgaaaacaaataattttgtaaaataattcaccccgaagatttgatatgcaccccaaaagtgtctaacttttagtgtgcatatcatatatccgggcgttttttaatttgcgtgaattttcattcccttaaaatagccgtcggtaattttgccgtatttaaagttgttgcccaaaacttcggccaaaatatcgtttacatagttggtgtaattaaggctgtagctgtaataccggcttccgccggtaactgtcaaacctgaaaaagcctcggattttacggcgaatattcattttttgttcaagttatataaaattatctcaaaaaaataatgttttttctgcttgaaatggacaacctgttttgatataatgttaaaaatgccaagagaggcaaagcggtacactgtcttggcggtgtaccgcttttttctgagcctcttttctcataactttaattgaatacatcagggggaatttttcaatgaaaaacttgtttaatctcagcagcctttccatagaggaaataacagcgattttggatcgtgcacagcagtttgccgacggcgtaaaaagcgatcgggcaaagggcaaagttgttgccagcttgttttttgaaccaagcacaagaacccaaaattcttattccactgcggttatgcgcttaggcggccaggtgcttacatttaacagcagcgtttcttcaatgacaaagggcgaaacattttacgacaccgtaaaggtttttgagtctttgggctgcgacgccgcaattatcagagataagaaaaatgagtattggaaagaacttgaaggcattaagatgccgattttgtccggcggcgacggcaccggcaaccaccccacacagtcccttttggacttgcttacaatcaggcaggaattcggccattttgacggattgaaagtttgcatcgtaggcgacattattcactcccgtgtggcacacacagatattgaggttatggagcgcttgggtatggaagtttacacttccggcccggacgaatttaaggaagaaggctttaattacatagactttgacaaagcgatcaaagagatggatgtgattatgcttttgcgtattcagcacgagagactttcatccgaaatggttatgagcaaagaggattacaacaagcagttcggtttaaacaaagaccgtgttcgggctatgaaacccaatgcgattatcatgcacccggcaccgtttaaccgtggagttgaaattgacgatgactgtgtagagtgcgaaaagagccgtatattcaagcagatgtcaaacggcgtgttcgtgagaatggcggcagttgaaagaagccttttgggttaatttcggtttatatttaaaagggtaaaagcaattttaccctttaaatttgtaaaaaatcggcgggttggcaaagacaaaatccgccgtaatttttacaatatctttaaaatttacaatattttaatttttatatatagaatagaggtcaatgttgtgttataatcaatgtaaagcacaatttgtaaccgtataattcggaaagggaaaaatatgttaaacctattgcttaaaaacggcacagtttactatcaaggcaaaatgcaaaaggtagatgttcttatacagaacggcgttgtttgcaaaatagacagggacattcaaacagacggttgtcccgttattgacagttcaaaatttaatattataccggggctcgcagatgttcatgttcatttgcgagagcccggtttttcctataaagagaccattctcaccggcacaaaggcggcggccaaagggggctttacccttgttgcggcaatgccgaatttaaacccggtgccggacagcgccgaacacttaaaaatcgaacttgaccggatagaaaaaaatcgggtgataaaagttttgccttacggttctatcaccgtaggggaaaagggcaaagaactgggggacatggccggaatggccaaagatgtcattgcattttccgatgacggcaagggcgtacagaacagcgaaatgatggaaaaggcgatgactgtcgccaaggagctgaacaagccgatagtcgcccactgcgaggtggaaagccttttaaacggcggttacatacatgacggagaatatgcaaaacttcacggtcacaagggtatttcttctgccagcgaatacgaagaagtaataagagacataaatctaagcgaaaaaacaggctgtcaattccacggctgccacatttccacaaaggagtcggttgacgcaataaggcaggcaaaggcaaaggggcttaaagtaagcggtgagacaggcccacactaccttgcatttaccgatatggacttgcaggaaagcggcaactggaaaatgaacccgcctatccgcagtgaagaggacaggcaggcacttataaaaggggtgcaagacggaacgattgagtgtataatcaccgaccatgccccacacagccgggaggaaaagagcaaaggtcttgcaggcagcagcatgggcgttgtgggcttggaaacaagctttgccgcagtaaacacatatatggttgaaaagggttatatatcttttgaaaaacttgttgaagttatgagtataaatccaaggaaaattttcggccttgaaagcggaatacaaataggcaagccggcagatataaccatagttgacccaaaggcaaagtgggtggtaaacccggaagaatttatctcaatgggcaaggccacgccctttgccggcaaaacacttaccggtaaagtaatcgccacaatttacaacggcgattttgcatacagcgaattataaggaggacagcaatttatgccaaagagaaccgatatcaagaaagtaatggtgataggctccggccctatcgtaataggccaggcggcggaatttgactacgcaggcactcaggcctgccttgccttgaaagaagaaggatacgaggtggttttgcttaattctaacccggccaccattatgacagacacaaaaatggcggacaaggtctacatggaacctttgacgcttgaatatgttgcaagaataatccgctacgaaaggccggacgcaatcgttccgggcttaggcggacagacgggtcttaacctctgtgtacagcttggggaaaagggaattcttgaggagtgccaggtagaagttttaggcacaaagataagctcaattcaaaaggcagaggacagagaattatttaaggaaatgtgcgaggaaatcggcgagccggttatcgcctcggaaatagtacactccatggaggaaggccgccgtgcaatgaaagacatcggcctgccggtagttttgcgcccggcttacacccttggcggcacaggcggcggctttgccgacacagaagaagaatttgaagaaatgatggaacacgcccttgcggtttcaccggttcatcaggttcttgtggaaaagagcgttaaaggctaccaggaaatcgagtttgaggtaatgcgtgacgcaacggataaggcaatcgcaatttgctcaatggaaaactttgacccggtaggcgttcacacaggggactcgatagtttttgccccggcacagactttaagcgaccggcagcttaacatgcttaaaaattccgcacttaaaattttaagacatttggaaatcgaaggcggctgcaatgttcagtttgcattaaaaccgggtacaatggagtactacctcattgaaatcaacccccgtgtttcccgttcatcagcccttgcctcaaaggcaacggcttacccgatagcaagagttaccgcaaaaatcgcagtaggtcttacattggacgaaataaatatcagcggtatccccgcttcatatgagcctgcaatcgactatgtggttgcaaaggttgcaagattcccatttgataagttcacctctgccaacaataccctctccacacagatgaaggcaacaggcgaagttatgagcttgggtcagtctatattggaaattttgttgaaagccgttcgtggtcttgaaacaggcgttgaccactttgaaatgtctaagtttaaatcatggacaaaggaacagcttcttgaatatatacacacacctaccgatgagcgcctctacgcccttggggaggcaatcagaaagggtgccacaaacgaggaaattaacaaggaaacagccatcgttatcccgtttattcaaatcatccgtgatgccatagactacgaaaaggttattgccgagaatgttaaaaacccggatgttctcttaaaagctaaggacatgggcttctcggacagctacatcggcagagtttggggcatgagcaaaacggatatgttcaaattcagaaaagagcataacattttgcctatatacagaattgttgacaacgttgaacatcagcaggattatgtaccttacttctactcctgctaccacggggaaaacgaaagtatcagaacagacaaaaagaagattttggttttgggctcaggtcctatcagaatcggtcagggtgtagaatttgactactcaacggttcacgccgtttgggcaatcaaagaggcaggttatgaggccattatcataaacaacaacccggaaacagtttccaccgactacacaacagccgacaagctttattttgaaccccttacggttgaggatgttatgaatgtaatcgactttgaaaagccggacggcgtcgttgtttccctgggcggccagacagccatcaatcttgcggaatctctccacgagcttggagtaaagatcatcggtacggatgttgaggccattgacagagccgaaaaccgtgacagctttgaaaaggttatgcacacccttggaattccggagccggacggcgaggcggttacaaacattccggacggcttaaaggttgcaaacagaataggctatccggtgcttgttcgtccgtcatatgttttgggcggcagagccatgcagatagtttacagcgacgacgaccttaaaaagtacctgcaaactgcggttttggttgatgttgaccagccggttttggttgataaatacatagtaggtaaagagcttgaaaccgatgcaatctgcgacggcaaggatgtatttattccgggtattatggagcatatcgaggaaacaggggtacactcaggggactctatctcggtttatcctgctcacacaatttcaaacagcgttcgcaacacaatagttgactacacagttaagctgggcttgggcataggcattaagggcttgtttaacattcagtttatcgttgacgaattcgacaatgtctatgtaatcgaggttaacccccgttcttcaagaaccgttccgttcctttcaaaatccacaggtgtacctatggcaaatgtggcaacaaaggtaatgctgggtcacacacttaaagatttgggctacggcacatatttgcaggaggagccaaagcgcttctatgtaaaagtacctacattcccgtttaacaaactccgtggtttggacgcatatctgtcacctgagatgaagtccacaggcgaggcaatcggctacgacagacagcttaaccgtgcgttgtataaagcattgcaggcatccggcatcaaggttcagaattacggcaccgtatttgtaactttggcggataaggacaagcagagagctttgccgcttatcagaagattttataagctgggctttaatatcgaggccacggaaggcactgccgcattcctgcgcagaaacggaattaaaaccagagaaaagaagaagatttccgagggcagcaacgatatttttgacagtttctcaaagggctatgtaacatatgttataaacacgcaaaacttctcttccgaatcacagcaggacggcttcttgattcgcagaatggcagcagaaaataatataagcgtatttaccgcactttcaacggtaaatgctctcctcaatgttttggaggacatcacaatgccggtttcaaccattgacgccgacaagcagtaaaggagcgactatgtacaaaaggaacatttacaccgttcttgaaaacaagaacatagcaaaggatgtttaccgtatggtgttggagggggatacctccttcatcaccgcaccgggacagtttataaatatagaaatcgagggctactatttaagaagacctatttcaatctgcgattgggacgataaaaccattactataatctacaaggttttaggccacggcacagaaaaaatgagccggatgccctcaggtgaaaaacttgacattttaaccggcctcggcaacggcttcacccctaaaaagggcagtgtaaagcctcttgttgtaggcggaggcgtaggcacaccgcctatgtacggcttggctaaggcactcattgcacagggcttacagcccatggtggttttgggctttgcctcaaaggaagatgtattctatgaggaagaatttaaagctctcggctgcgatgtgtacattgccacaaatgacggcagctacggcacaaagggctttgttacggatgtaattaaaaatcttgaagattttgactacttctacgcctgcggccctatgcctatgttaaaggccaccgcactggcaacaacagtatcgggtcagctttcattcgaagagagaatgggctgcggcttcggcggctgtatgggctgttcatgcaaaactctcacaggcaataagcgtatatgcaaagaaggtcctgttatgttaaaggaggaaattttatggtaaacacaaaagtgaccctttccggctggacactggacaatccggttataccggcttccggcacattcggctacggcgatgaatttaaagacttttacgatataaatatgcttggcacattctcattcaagggcaccacaaaagagccgcgcttcggcaacccgacaccgagaattgccgaatgcagagagggtcttatcaacagcgtcggcttgcagaacccgggcatcgaggcggtaataaacgaagaactgccaaagatgaaaaaattctttgacaaaaaggttatcgcaaatatatccggcttctcacttgacgaatatgtttactgctgtgagaaaatagataaagaagatcaggtgggcattatcgaagtaaatatttcctgccctaacgtacacggcggcggtatggccttcggcaccgatcctaaaatggctgcggaaataacaagagccgttaaagcggttacaacaaagccgatttatattaagctttcccctaatgtaacggatattgtatctatcgcaaaagcatgtgaggatgcaggggcagacggtttgagccttataaacacattgctgggtatgagaataaaccttaaaacaggcaagccgattatagccaatacaatgggcggtttttccggcccggcaatcttcccggttgctttaagaatggtttaccaggttgcccatgcggttaaggtgcctgttataggtatgggcggcgtgtcaaccgcagaggatgtaatcgaaatgatgtacgccggggcaacggctgtacaggttggcgcggcaaaccttaaaaatccctacgcctgcaaagagatcatagaagatttgccaaaggttatggaaaaatacggcataaaagacttaaacgatattataggcaaagcctaaaaggagatataaatatgaaaagagatgtaattattgcccttgactttaaggacggcgaaaccgccttgaactttttggacaagttccaggaggaaaaaccgtttgttaaggtcggtatggagcttttcttcgcagagggtccctcaatcgtaaaagagattaaaagaagaggacacaagattttccttgatttgaagctccacgatattccgaataccgttaaaggcggtatgagaagccttacaaacctgggtgcggacattctcaatgttcacgccgcaggtacaatcgaaatgatgaaagccgctttggagggcacacagcgcccggacggcacagcgcctatgcttatcgccgttacacagcttacatcaacaagcgaggagagaatgcagaaggatcttctcatcaatgccacaatcaacgatacaattttgcactacgcaaaaaatgccaaagaggcaggccttgcaggtgtagtttgttccccccttgaagccggcatggtaaaagcggctttgggcaaagattttgtaaccgttacaccgggcatcagatttgcagacagcgcaaaggacgaccaggttcgtatcacaacaccggcaagagcaagagaaataggcacagactatattgttgtaggccgtcctatcacacaggcagaagaccctgttgccgcataccgccgttgtatgaaagaatttgtaggcgaggacgccgaataatttaattaaaatatataggagaatataattatggaaagaaaaattgctaaggatttgctggatattgaggctgtatttttaagacctaacgaaccttttacatgggcatcgggtattaaaagccctatttactgcgacaaccgtttgacattgtcattcccaaaggtaagaacagacatcgaggacggccttgcacggcttattaagagagaatacccggaatgtgaggctattttcggcacatcaacagcaggtatcgcacacgcagccatcgttgcggataaaatgggcttgcctatgggctatgttcgtgccaaggctaaggaccacggccgtgaaaaccttatcgagggcaaagctgttcccggttcaaaggttgttgttatcgaagaccttatttcaactgcaggcagctgtgttgacgtatgcgaaaacttgcgtgccgcaggctgcaccgttttgggcattgcttctatctttacatacggtatgaaaaaggcagaggacagattgaaagaacacaaccttgtaaaccactctttgtcaagccttgacacattggttaaggttgccgccgaaaacgatattatcgcagaaagcgacatcgaaagagttttgaaattccgtgcaaacccatctgatgaaagctggatggcaaaataatctttgcaagtaaataacgaaagagccgcgctattgcggctctttttgcgtttaaaagggcgacaaggcggcaattctcttttgtgccgggtaaaatttaaaaaattatcggtatttgttcacaa

SEQ ID NO: 2110 - DNA, 7091 bp, Unknown
  16S sequences of unknown bacteria
cgcatcatggactacggcaagtaccgtttcgagcgcgacaagaaggagaaggaagcaaagaagcgccagactgtcgttgaggtgaaggagatacagctctcctgccgcatcgacacacacgatttcgagaccaaggtaaagcacgctcaccgtttcatcggcgacggcaacaaggtcagggtcgtcgtcaagttcaaggggcgcgagatgagccatctcgagatcggccgcgatatactcgcgaagttcgaggaggcttgctctgacgtcggaacggtggataaacgtccggcgctcgagggacgcttcatgagcatggtcatcagccctgcaaagcagcccgcaaagtgattcgttgctttgccgttcaaaccggctgacagcacatcggaagcaatgccaccgccgcccgatgcccgggcggcatacaatttgcaaaaagcagaaggagaaaactaaaatggcaaaaataaagactcataaggcaacagccaagagattctcgaccaccaagagcggtcttgtaaagctcaaccacaccaaccgtcgtcataagctcggcatcaaggcgccgaagagaaagagacagctccgcggcaacgcatatctttcgaacgctatggcttcgaactacagagcacttctcggcgaataattttaagattatcgccaaaaacgtcgtgaccggatgagtttcgccggtcggtaaaataagattaattcggaggatatataaaatggcaagaatcaagggcgctatgatgacgcgcaagagaagaaataaagttctgaaggccgcaaagggttactggggtgccaagtccaagcacttcaagatggccaaagagcaggtgatgaagagcggcaactacgctttcgccggaagaaagatgaagaagagagacttccgtcagctctggatcgctcgtatctcggctcaggcgaaggtctgcggcatgaactattccacccttatgcacggtctcaagctcgccggtatcgatcttaaccgcaagatgctcgccgagatcgccgtttccgataaggacgcgttcgcttctctcgcagagaaggcaaaggcagctctcgcgaaataagacataaacgaaaaaaccggctcgttccggtttttttcttacctgtgggtcaatgatgtacgggcgacggacgctttcaacacatccttgaccggagaattcatatgcagacaaagatcacatcgagacagaatccgcttgtcgtgcggctctccaagctctcggacaaaaaacacagggatgatgaggggcttttcaggctcgacggcgtgaagctcatctctgaggcgctgatgaacggggtacttccggaatatgtcttcgtgacggatgatatgagcgcgtccggatttctaaaggagattcccgatgatcggctgtatacggtaacagatgaggttctcgcgaagctgaccgacgagaaggcgcctcagggaatcgcggcgttcatacgcatggacggcgtgaaaaatatcacattcactgattgcccgggcggagccatggatcacagggttctcctgctgtcgtcgatacgtgacccggggaacgtcggtacgataatacgctccgcctgcgcgatggggctcgacagggtttatctgagcgccgactgcgcggatatattctcgccgaaaaccatgcgcgcgtctatgggaatggcgctcagacagaagataacggttgtcggaagcgacgtccggcttgtcacggcgctgagacgcggcgggactgaggtcttcgcagcagcgctgagggacggctcggcgaggctcggggagttctctctcccggagcgggtctgcttcgtgatcggaaatgaggggcacgggctgtcggacgagcttatcgacgcctgtggcggaactgtcataataccaatggcgcccggctgcgaatcgctcaacgccgctatggcggcgggaataatctcgtgggaaatgcgccgggtctgacctgttcggagaaagaaaatgaatagaataatttttgaaaacgcgaagatttacgataccgcgtcccgctcgttcaggacgggagagttgacggtctgtgacggcttcatcgtcatgaacggcggaatttccggtcgtgacgccgaacatattgacctcggcggagcttatgtcatcccgggaatggtcgacgttcacacacacggcagaggcggctttgagtcgaccgaggtcgacgccggggacatgataaagatggcgagaacctacgctaaagcgggtaccacatccttcttcccgacgatgatgtcggttccctttgaccgtctcgaagccgggattgacgccgcggcgggcgctatgaagatgcaggcgggcggcatggacggcgcgcgcgtcatcggagtgcacctcgagggaaggtacctgaacgtcaagaaaaaaggcgcgcacaaccccgattacctgaagccgctcgaccagaacgagttatcgggtctcgtgaaacgcttcgcgtcacagggcggaaagcgtttccaccttacctgcgcgccggagctcagtaatggcgaaaacttcgtgaagagcgccgtcgcggagggcgtcactgtcagcatcggtcactcgaacgccaccgcggaagagtgcgaaaaggcgctcggatggggcgtcaccggattcacgcatctctacaacgcgatgagcgccatgtctcaccgtgagccggggtgcgtcggcgtcgggctcgcgtctgacgcttactgcgagctcatctgtgacgggcgtcatatcgatcctgtcgtcgtcagggcaacctatagggcgaaaggctcggacaagctggtgctcatcactgattccgcgccgtccgcgggtctgccggagggacgctacactatgggcggcgccgagatcctggtcggcaacggcgcggcgtatctgctcgacggaacgctcaccggaagcatcatcgacctttacaccggtatgcgcaacctcgcgaagttcgccggaatcccgatcgaggacgccatcccctgcgcgacaatcaatcccgcgaaaatggtcggggcggacgacgaggtcggctcgctggaattcggccgccgcgcggacttcatagtcgcggatgaaaaccacgatatcaaacaagtatacgtcggcggtaaaatcgtcgaataaataaaatatcacggaacccgacaccatgcgtccggttctgtgacaaccaaccgccctcattcgggcaaaggagagtaaaatgagctgctgtaatcacaaccacgaaaaattctatatcacgaccgcgatcgcgtacgcgtccggcaagccacacatcggcaacacctatgaggtcatcatgaccgacgccgtcgcgcgccgcaagcgtcaggagggctacgacgtcttcttcatgaccggcaccgacgagcacggaatgaagatcgaggacaaagcaaaggcaaagggcgtcacgccgaaggaattcgtcgacggcgtcgcgggcgagatcaggggaatctgggatctcgtcggcgcttcctacgacaaattcatgcgcacgaccgacgaagaccacgtcgagaccgttcagaaggttttcaagaaactctacgatcagggagacatctacaagggctcctatgaaggctggtactgcgtgccggacgagtccttcttcaccgagacacaggttgtcgacggaaagtgcccggactgcggccgccccatcgtcagggcaaatgaagaagcatatttcttcagaatgagcaaatatcaggacagacttctcaaatacatcgaggagcaccccgactatatcgagcccgagctcagacgcaaggaaatgatcaacaacttcataaagcccggacttcaggatctctgcgtgtcgcgctcctccttcaagtggggcataccggtcacattcgacgagaagcacgtgatctatgtctggctcgacgcactgttcaactacgcgaccggcgtcggactcaagttcgacgacaatggaaacctcgttcacgacgagcgcttcgagaagtactggcccgcggacgtccatgtcatcggcaaggacatcatgcgcttccattcgatctactggacgatattcctgatggcgctcggtctgccgcttccgaagaagatcttcgggcatccgtggttcaacttcggcaccgacaagatgtcgaagtcaagaggaaacgtcatctacgcggacgacctcgtaaagcgcttcggagtcgacggcgtgagacactactgcctctccgagatgccatattcctccgacggaagcatcacgtatgaggaaatgataacccgctacaactccgacctcgcgaacaatctcggaaacctcgtcaaccgcactatcgcgatgactcacaagtatttcggcggagtcattcaggcgcccgtcagaacgaccgacgaggacgaaaagctcgacgccgagctgaaatccgcctgcgccgacgcctgcaaggctgtcagcgacaacatggactccttccacatcgcggacgcgagcgacgcggtcttcgcgctcttccgccgcgcgaacaagtatattgacgagacgactccgtgggtgctcgcgaagagcgaggagactctgccgcgtctcggaaccgttctctacaatcttctcgagacgataagaatcggcgcgatactcctcgagccgttcatgccgacgacctccgccgcgatcctcgatcagctcgccgcgcacgagcgctcgctcgagagcacgtccgcgttcggcgggctcaaggccgacgaatcggtcggcgaggcaaagccgctcttcgcgagaatagatgaggcaaagctcctcgccgagatcgaggctgaacgcgccgaggcagccgcaaaggcggaagccgccgaaaagaaggctgaaaagccggaaggctgcgcggtgatcggaatagacgacttcatgaaggtcgagctgagaaccgctcaggtcatctcatgcgagcctgtgccgaaagcaaagaaactgctgaaactccagatagatctcggatacgagaagagacaggtcgtctccggcatcgcgaagttctacaagccagaggatcttgtcggcaagaagctgatcgtcgtcgcgaatctcgcgcccgcgaagctctgcggcgtcgagagccagggaatgcttctcgcgtccggagaggaagaggtcagggtggtattcctcgatcccgagacccctctcggagagagagtgagataaatgcccgggttcagacgaacgaccgactttccgctgtttgacacccacgcgcactacaacgaccacaaattcgacgagggcggcgaaaccgaggaccgggacagaatccttgaggatctgttctcgcagaacatccggcacatcgtgaacgccgggacaaaaccggagaccaatctcgagtccatcgcccttgcggagaaatatcccggaatgtacgccgcggtcggtatacacccggaagatataaacccggaggacgacattgaaacggtcatgggagagctcgaaagacagctctcccacccgaaggtcgtcgccctcggagagatcggactcgactaccactgggacaccgtgccgaaggacacgcagaaggtgtggctccgccgtcagcttgccctcgcggagaagaccggtatgccggtcatcatacacgaccgcgaggcgcacggggacatcatggacattctgcatgacttcccgcgcgtcaccggtgtgttccacagcttttccgcgagcgcggagatcgcgagacagctcgtgaaccgcggctggtacatctcattctccggcgtcataaccttcaagaacgcgtcacggctggcggagatagtgccgacggtgccgctcgaccgggtcatgatcgagaccgactgcccgtacctcgcgccggtgccgttcagagggaagattaaccattccggtctgatggaatacaccgcgctcaaagcggcggagctgtacaggctcggaccggaggagttctgccgcatggcatatgagaactcgatgagattctacaatctcaaagactgacaaaattcacggaggaaaccatactatgactttctttaccgaaaacattaccgttcagggcataaccgtcccgctccgctgctacattccggatctcggcggagtaccgaagtacgcgggaaaccgtcccgccgtcatcatcttccccggcggaggatacagcataacctatcacggcgaggcagagccgatcgcgctgaaatacgtggctgacggcatctgcgcgttcatactcgactacagctgcgcgccggtgcgtttcccgatcccgcagcttgaggcgttcaaggcgatacgctatgtcagagagaacgcagagcgcttcggcatcgacccgcacaacatcgcgacgaccggcttctccgccggaggacatctctgctcctgcaccggaacgctctggaacaagttccaggagtatttcgaaaaagagggcatgaatgacgtcgacgcgcacgtatatcgcccggacaagatgatactctgctacccggtcatccgctcgacgaccagattcgctcatcagggctcgataatcaaccttctcggtgaggaccgcatgagcgacagcgcgctcctcgactttgtttcgaccgacaagcaggtcgatgatgagacgcctccgacattcatctggcacacgagtgaggattacggcgtttctccggtcaattcctacagcttcgctacggctctcgcggagagaagaataccatgtgaggttcatgtttatctgcatggtaatcatggcctctgccttggcacctgcgtcacgaatgatcttgatttcaccgcgccgcatgaggtctccgagtggatcaacaaggcgataaggttcgcttacgtgaaattctgaatctgagaaaacgctgattcaaggttgttttcgcagaataaagcctacaaaatcaagcccttttccgcgaaagcccgatttgatctttgtatcaaaaaaagtgactgtcacgctatagacgggtatccgtaaaacagttaatcctccgtatggcttagaccatgcggaggatttgttta

SEQ ID NO: 2111 - DNA, 32759 bp, Unknown
  16S sequences of unknown bacteria
ggtctcggagtatccaaaactgtcggcgaccttgcgggaccttgtatgttctccatcctcatgggtgcttcaagagtattttacgcaaaagcgtctgaaaaaatcgaccttcttggatttattatcggaagcggagttctctgcatagcggcttatcttattgcgtcgctgtccccgaatcctgttttgtcactcgtcggatgcgcgctgtgcggtctttccgtcggagttctctggccgggagtgttcagcatagcttcctcgggcttcccgaaaggcggtaccgcgatgtttgcgtatcttgccctggcgggagatctcggatgctcgggcggacctacgcttgtcggatttgtttccggtcttgtcggagataacctgaaaaccggaatcctcgcgggtatcgttttccccttgattctcgtcgtctgcgctctcatatacaagaagaaaacaagttcaaaaacaaattaaaataagattaaatacggataataaaacggctaaaatagttgacaaatcaactttccggtggtatactcatatcgtaagcaaatcccaaattttttaatgaaaaggatatgaaacaggaaaaatgaaagaatacctgaccgatgtcggcgaggtaatgaaaaacgaaaactcatctctcgccggattgacaacggctgaggctgaaaaacgcgcggaaaagtacggaaaaaataagctcaaggctgcaaaaaaagttccgcttatcgtgcgttttctgtcacagcttggagaccccatgacgattattctgatatgcgcggctgtggtatcgggaatacttgccgtagtcgagggcgagagctttgccgacgttatcattattttagcggtggttctcatcaatgccgtcctcggagtatatcaggaaagcaaagcggaaaacgccatagaagcccttcaggaaatgtcggcggcaacatcaaaggttctgcgtgacggcgaaactgttgtcataaagagcgaggatatcgttcccggagacatagtattccttgacgcgggcgattctgttccggctgacggtcgacttgtagactgcgcgagcctgaaaattgaggaatccgcgctgacaggtgaaagcgttcccgtgaataagatgatagacgtcttgaacctcaaaaaaggcgaggacgatattcccctcggcgaccgcaagaatatggtttacatgggaagctctgtagcctacggacgaggaactcttgttgtcacagcgacaggcatggataccgagatgggcaagatagcggacgcactcacaaaggctgaggacagcgaaactcccctccagaagaagctgaatcagctctcgaaggttctcacatggctcgtgctcggaatctgcgtagtaattttcggcgtgcagctcattaaaactggtgtaaatgccgatactatagttgacacgttcatggttgctgtgtctcttgccgttgccgctattcccgagggacttgccgctgtcgttacggtggttctctcgataggcgtgacgctcatgtcgaagagaaaagccattatacgtcaccttaccgcggttgaaactctcggctgcgcacaggtgatatgctccgacaagacgggtacgcttacacagaacaaaatgacggtggttcagtcctacggaagcgacagggaagagacggctcggtcattcgcactctgcacagacgctaagctcgcagtcggtcagacagtatcgacaggcgaccctactcagacagctgtggttgactatgccgcgaaaatcggactgccgaaatacgagcttgaggaaaaatacccgagagtaggcgagataccgtttgactccatgcgtaagctcatgactaccgtacatcgcgacggagagggctttgttcagtacaccacaggcgcgcccgacgttgtcataggaaaatgcacctccgcgcttgtcgacggcagagaagtcgagatgaccgacgagctgagagaaacactctttaaagagaacaaaaagctcgcggatcaggcactcagagttcttgcgtccggcagaaagacgtatatttcctcacctgaaagctacgaacccgataagatggagcagggactttgctttctcggacttgtcggcatgatagaccccgtcagaccggaggtaaaggacgctatcgaggaatgcagaagcgccggaatccgtccgataatgataacaggcgaccacaaggatacggcagttgctatagcacgtgagctcggcataatcgaagaaggacagtacgccataacgggtgcagagctgtcaaaaatggacgacgcgacatttgcaaaggaattcaagaatatttccgtctatgcgagagttcagccggagcataagacgcgcatcgtaaatcaatggagagccgcaggctacgttacggctatgacgggcgacggtgtaaatgacgctccctccataaaatccgcggatatcggtatcggaatgggcatcacaggtacggacgttaccaaaaacgttgcggatatggtgcttgcagacgataacttcgcgactattgtgtccgctgtcgaggaaggcagaagaatttacgacaacatccgcaaggcgatacagttcctgctcggctcgaacatgagcgaagtcataactatatttgtcgcgactctcataggcttcaatatcctcgagccggtacatctcctttggattaacctcatcaccgatacgttccccgcactcgcgctcggcatggaaaaagcggaagcggacatcatgaagcgcaagcccagagacgcaaacgaaggcgttttctcaggcggactcggatttgacgtggcttatcagggaatacttatttcagctctcgttatcataagctacggcttcggtcacatgtttgagacaggcacgttcggtttcggcggatccgctcacggcactacaatggcgttcctcacactctccatggctgagatattccacagcttcaacctccgctcaagagagaagagtttatttaagataaaaggcatgaacaaaatgctcaacatcgccgcaattgtcagccttgctctcactaccgcggtgtgcgaaattcctgttcttgcttcggcgtttgattttacggcagtaggacttagagaatatgcgacggctgcgcttctcggattctgcgttattcccgtagtcgaggttgtgaagctcatcagacgtcaaaaaaataaataatttgtaaaactgcgagaaaaatgaaaaaaactgcgctctccctcttgaaaaacggaagagaatatagtaaaatatagtgtattgtaatttatatctatttaaatattgaaaggagtttatccccatacccgtcggggataaaaactactatggttgtagcaggcgatttcagaaacggtattacatttgatatggacggacaggttatgcaggtaatcgagttccagcacgttaaacccggtaagggcgctgcattcgttcgtacaaagctcagaaacgttatcacaggcgcggttgttgaaaagacgttctcccctacagataagtacaacgacgcgagaatcgaccgtaaggatatgcagtatctttacaacgatggcgacctctactacttcatggatctcgattcatacgaacaggttccgatcggcaaggatcttatcggcgacaacttcaagttcgttaaggaagaaatgatctgcaccattcgttcctatcaggacaagcccttctcggttgaacctccgatgttcgttgaactcgaagtaacagactgcgaacccggcgtaagaggcgataccgcaacaggtgcatccaagacagctacggttgaaacaggcgctaccatcagagtaccgctgttcatcaatacaggcgacaagatcaaaatcgacacacgtacatccgaatatcttgaaagagcataaggctttttcttgacacggtgatcaaaatcaatcgaaaggaaaggtacatgaaaatgaaggcaaaggaatacagctcctatatcaaaggtcttattgacggaacaaaccttgacaagactactccggagggaaaggttatcagcgctctcgcagaactttgcgaccagatggcggctgaaatagaaacactccgcgacgaacttgatgtagcaaacgaatacattgaagagcttgacgaagacctcggcgcggttgaagaagttgtttacgacgtagacgacgactgctgcgacgacgatgactgcgattgctgtgactgtgacgacgacgatgatgacgaagacggttgcggctgcggatgctgcggacatgacgacgaagatgacgacgaagaagaattctacgttgctatgtgcccgaactgcggcggaaaggtatatttcgatgattccgtaaatccggaagacgttatctgccccgcttgccagaaacccctcatcagcgacgaggatgaagacgaagaaaagtaattcgtaacaaaaaatcagcggagtttccgattcgatggagactccgctttttgttgctttctgagaatgcgccgaataatgaccttaaaccagcgcattataaaatttcttttatgcacatgggcgtcgggaaaggctctgttttgatgaaccatagctcgccgtcgtcctttatcttgaacaggcttagagaattgccgaaagtgttcgacgacaacgcatattttccgccgcagatgagcgcaaagtgacgcggatgatctccgactgacgaaacacgcgatacaagagacaattcttctcctacggtaaagtgacagatgaggttgtccgtgccgaattcgcggtttgctctgtttgtggcgtagaggtgacgtccgtcttccgagagaactatctccgcgccgtctcccctgcctgagctttgaagcatattgtaggtcttttcgtatgtcagcctgccgtcattccaagaaaaacttgcaattgtgcttccaagctccgttatcgcgtaaagcttcgttccgtcctttgagaacaccgcatggcgcacaccttgaccggggagaatcttcgcgcgggaaatctcgttcagctcacggtcgtagactatcaccgcgtcaagtccgaggtcgcacgcaagcacataccgcttatccggagaaaaaatgcattcgtgagcgtgagcagtcatctgccgtgccttcatcggacctgtctcgccgctctggataaaagcttttcctccgctttttgatacgcatccgtcgtcgtagttcgcaaaatatacgtcgcttccgtccttgcagaaatggcagacgttctctccctttgtgcggatgatatcgccgagccgcttgccgtcaagagagaattcaacataaccgtctccgttctgtttgtcacgataagccgcgcacagtctgtctccgtcaagctcaatccattgcacgttcggcagatctatcttgcttattctaataaaatcgagcgtatctgtcagagccatgcgatatatcccgccgtccgtcctgtcagatgcggagaaaaattcgcaaatgtatttcatgtagtcaccgtccttttcggacattttatcataatccggaaatattatcaagagaaaaatcaaaaaaagccttgacaaaagagaacgaccatgctataatataaaagctgtcagaaaacagatgccccattagctcagtaggtagagcacttgacttttaatcaaggtgtccggagttcgactctccgatggagcatatctcctgcatttacacgtgcgggagattttttttgctgttttgtcttcagtatgccgcggtaaataacataaaatatcgttgcaaaagacattgcgatatgatataattgtttaaagatactctgaatgaataaaaataaccttaaatcaaaggcttcttatatattcggagcatggctgaaaaatataaaaacagcctgaaaggataaaaaatgtactatatttcttttcccggactgggaatcgagccgtttcatataaacaggacggcgttttcggttttcggtcacggtatagcatggtacggtattctcatcacgttcggaatggtgcttgccgtactccttgcgatgcacctctgcaaaagagaaggaatttcatccgacgatatcgttgacctcgcgttcactgtgattgtcttcggcgttatcggagcgcgcgcttactacgtgattttctcatggaacgagataaactacgtcgcgactggcggaacggtgatacaaaacatactcggcacgatatataactgcatcgcggtgtgggaaggtggacttgcaatctacggcggcgtgctcgggggactgatatcagctttagtattttccaaaatcaagaagattaactaccttaagctcaccgatatccttgcgccgtgcgtgcttgtcggtcagattatcggacgctggggcaactttataaatgtagaagcatacggcggagaaacaactcttccgtggcgaatgggaatttcgtacatggtaaacggaagcgtaatgtctgagaagttcgttcacccgacattcctctacgaatcgctttggaacctgtgcgtgataacggtcatactcattctctacagaaaaaagaaatttgacggacagatgagcgcgacatatttcatcggctacggtatcggaagaatgctcatagaaggactccgcaccgacagcctcatgctcggcaatctcagagtttcgcagggactgagctttttgcttgtggtgctcggcgtgatgatgtatataatcctcggcgacagaacaagaaaaaagcgtgaggaagcgcgtgagtacgtttcggtttacgctgaaaaatcagatgaaaaagacgaaaaagacgagaaaggcggcacagaagatggcaaagataattgacggaaagaagatatccgcgtcggtcagagaggacataaagaaacgcgcggagaagttttacgagagaaccggaatccgccctggacttgccgtaataatcgtaggcgaagaccccgcgtctcaggtgtacgtccgcaacaagagaagagcttgcgaagaggcgggattttactccgaggtacacgagctgccgaccgagactacaatggacgagcttgtcgaaaggctccgtgagataatcagcaacaagatgattcacggaatcttagtacagctgccgctcccgaagcaccttgatgaaaagcggattctcgacatgattccgccgtacaaggatgttgacgcattccatccggtgaatgtcggcaaaatcatgattggcagctacgattttctcccatgcacacccgccggagttatgaaaatgctcgaatacgagggaatctccgttgacggaaaggaatgcgtagtcgtcggcagaagcaacatcgtcggcaaacccatggcaatgctcctgctccacgcaaacggcacggtgactgtatgccattcccacacgaagaacctcgcagacgtgacgagaagagcggatatcctcgtttcgtgcgtcggcaaagcgggattcatcacggcggatatggttaaggaaggcgcagtcgtgattgacgtcggtatgaaccgagacgaaaacggaaagctcgtgggagacgtagacttcgcgggagtttccgaggtcgcgtcagccataacacctgtaccgggcggagtcggagttatgacgattacgatgctgcttgagaatacgctcagggcggcggagatacagtacagacatttcgaaaactgaaattgtgcgagctgcataaatcgagcaagtaaaaaagtctgaaaaaacggcatatttttcttgtataaagtagaataatattcttgacgggaaaagtgttttgtggtacaatatttaatgccgcatggtgtcgggtcataaaaggacaggcaatgcttgttctacccgctcagcgagttcacaaaagaaagtgaggtgcttttcgataatgttcgcaataattgaaacaggcggaaagcagtacaaggtaaacgaaggagacgttatcttcgttgaaaagctcgaatgcgcagaaggcgaaaaggttgtttttgacaaggttctcgcagtaggcgcagacgacggttttaaggcaggcaagcccacagttgagggtgcgtccgtcacagctaacgtagttaagaacggcaagaacaagaagatctacgttatgacctacaagtcaaagaaaaacgaaaagaagaagatcggtcacagacagccttatactaaggttcagattgaaaagatcgcgttttgatttgcagccgtgaagcgttagcgggagaattcgagtgacaaaaattacgttcttaaagcgcggcggcatattctggggattcagagaaaccggacatacaggctttggcgaagaaggggacgatatcctctgctcggcactgtccgctatgaccatgctcatcatgaacacccttgaagtcgcatatgagtgttcgtttgactataaaatcgacgatgaaaccacggatattacggtgaaatgcaagtccgctcttcccgaatacgagaaggacgaaaaaaagcagtttgccgcgtcgggtttaatcctcggatatttctatcagctgaacgatctcgttgaagaatattatgaattccttgaagtcgataccgccgaagagtaacggcataaataataatggaggaaataacaatgatcagaatcggtttacagttcttcgctcataaaaagggtgttggttccacaaagaacggtcgtgacagccagtccaagagacttggtgttaagaaggctgacggctccacggtacttgccggcaacatcattcttcgccagagaggcacacatatccatcccggtgtaaacgttggtaagggttccgacgatacattattcgctcttacagctggtaaggtaaagttcgagaacatcgctaacggcagaagacaggtaagcgtttacgctgactaatcacgctgaattggatattttttgaaatctgttttttacttgtttcaaaaaagcggaaagatcatcttacagaaatgcagggtgatctttttttgcattttttatttttgattatcataatttgcaacacataatccgtcggcaaacgagcagattaatgaataagcgagaaaacaaaacaagagctgaaggatacaaaaatgcagagaaagataagaaaaatattcgcgtcggctgtggtgtatttagctgtggtcatgacgctgactttgtcggttttcggcgcagatatcagcgaggtctatgtcggaggaatgccgtttggcgtaaaattttattcggacggcattgtgatagtcggattcacagaaatcgagacagcggagggcatgaaaaatccggcatacgacgcgggacttcgggtgaacgacattataaccggaataaacggcagcgaggtcaagtcgtcgggagagctgctcaggctaatcgaacaggctgacggtgcggtcgaggtgacgtacatccgcggaaaggacgtaagaaaagcaaagctcgagccgtcgacaagcacatccgacggaaagaagaaaacgggaatgtggattcgcgacacaacggcgggcatcggtactgtgacgtatatcgttccaggtagcggagaattcgccggactgggacacggtatctgcgacatggagacgggagagcttctcaaaatggagcgaggaactgtggttgacgtgcagatatcgggcataacaaagggaaaagccggaactccgggcgagctgaagggattctttacctcagaaaagtcgggagtgctcactaaaaataccgtctgcggagtttacggctgtttcagcgaaataccgtacgagcttattcccgagccgcttatcgaggtaggaaaaacagacgatgttcacacgggagaagccgcgatttggtgtacgcttgatggcgtaactccgcgaaaatacaaaatcaacatcgacgaggtccaccgcacgggaaacaggagcttctcgctaaccgtcaccgaccgcgagctaatcgaaaagacgggcggaattgtgcagggaatgagcggcagtccgattttgcagaacggtaagctcataggtgccgtaactcatgtcctggtgagcgacccaacgaagggctacggcatcttcatcgagaatatgtttgacgcggcgggataaaatttaaagggggcgattcagctccttttattttgccgcggaactgttgtccctgtactggctcggcgtcattcccgttagttccttaaatgagaggttgaaggtgtttatcgctgaaaagccgctttccattgccacttttgatatgctgcatgacggattgtctgtgaggagcttttttgcgtattcgatgcggtacatatcgatgagctttgaaaaataaattccggtcagcgtgtggagagcgtgcgagaggtatttttcgttgtatccgaacttttcggaaagactgtgaagcgtgattttctctctgaaatgctccgctatgtaggaaataaccttttggtacagtgttccgtcgccccttttcgcgctctcaaagtctgatacttcgacaaccttcgcgcatatgaggttcagataagcggttgtgagcagtacattgcttttgtcgagcgtgtgcaggctctcgagaatggctgagagttctcccgcgtcaatggcagatacgataagccgctttccctttgccattctgaaatacgcggggatgaaatcatttgaaaaaactgcgcatatcagtctcgcgtccgtgcgttcgtactcgtgtatgtagttcggcggaatccagatgagctgtttttcaaccaaaactattctttttcggttgacgcagaccacacaggagcctctcgcgcagtacaaaagctcgctgtattcgtggatgtgctttgccatctcccaaccgtcgtgaatccggcatcgaaaatcgtatatcccgctgaagttttcgttttgatattccatatgcatcacctaaccttttggatatattttattatgtttttggttgaatgtcaagacgcgtgtgatataattgattcatataacacagcttaggagactgaaattatgaacaagcaatggagcaaagagaaaatatggagctggtacaacgcccgtccgtggattcgcggctgcaactacatgagtgcggactgcgccaaccgtatagaccagtggcaggagcttggatttgaggagaggttcaaaaccaccgagaaagagcttgagctgatggcggagacgggatttaattccatacgcgttattctcgaattccttgtgtgggacaaagagcacgacggattcatggaaagatttgagagatatctctcgctttgcgcaaagtacggcatatcctgcatggtaactctcgcgaacgactgcctgcgcccgaagagtcttgaagtgaccaaactcggtgagcagagctttgacataggctatcacggcggaagaaagctctcacagcacggaagtctcggcatgggatatcacgaagcgctcgacaaccccgaaaaagctccgcgatattttgagatggtgcgggagatagtaaagcgctataaaaacgacgacagaattgtaatctgggacgcgtacaacgaagtcggagccgcaggacgaaggaacgtttccatggcgaacctgaaaaagatattcgatataatccgtgagattgaccctgttcagccggtgacaagctgcgtgtgggactataatcctgacagacccgagagcttgtcggaggtggggagatactgccttgaaaactcggatatcatatcctaccactgctactcaggttacgaaaaccatataaagctgatagcaaagctgcgcgaatacggaagaccgatagtatgcacggaatggcttgcgcggtgcttcaacgataacgtgcaggagctgttcccgctgttcttccttgaaaaggtaggatgctacaactggggatttgtggcaggaaaataccagaccttcgagccatggaacagcgtctgggagaactacgaaaaaaatccgaatttcaaatgcgactttacgaagtggttccacgacctgtaccgccccagccacagaccgtacgacccgcacgagatagagattataaaaagattctgcgctttgtcggacaagtatttcgcggagaatgtgaaatagtggcaaaataaacctaaaaaaggcacctcaccattgcatgagacgccttttttgattatgcagttttgtcttttttctttatgtcgtatctgattatgccaacaacggacgatatttccgtgaaaagctcgtttattcctccgccgatggagccggtcagaatgttgtatacgagcaggagcggggatgagatgagtatcgttgttctcacgagcttgggctctgtgaatgagaatgacacggtgttgagcgccattgccgccatcacgaacagcgacattcagttttggtacgtgaatatgccgacaactatcatagccgccgcccagaatacagtccaccagttgctcgacgcccactttttgtccttgttgtagaaaactacgtctctcagaactccgacaatgtcaagcgcaagtcctgtgtacgctccgagcaggaaatactgcaatccgaatagtgccgttgtcgcaattgcgcgagcatgatatgcttatgtttgtttagctgaaacgacgacacggagcatatcatagccgcgatgccgatgatttgggtaagaattttcaaattaattaatcaaccttgatcttgaatacaaccggatattcgctttttaccgtgtttgttttgatgtggagacccttttcgtcgcgcttgaattccggcttttcgctgaaaccgagcacgtccacatcctttaatattccgtggaacaaggggagacggcttgcgtcagcttctctcaggctttctatgcagacttctccgttttcgggatatttcagcacagtcgcgtacagacagccgttgtttacggtgaatcttatgtcgcgcgaggtgtagtttttgtcgtttccgtcggcaaactgtccttctactacctcagtaggaccttctgcggcatatctccatacctcggagccgtagattgcttcgccgttgacggacagccacttgcctatctcaaggagaatgtgcctgtcttcgtcgggaattgttccgtcggctttaggccctatgttgagaaggagtctgccgtttttggagacgatatcaacaaggtcgcagattatttcacgcgggctcttgtagtcgttgttttcggtgtaacaccatgaatttttcgcaacggctgtgtcggtctgccagataaaaggtttagcgtcggcaaactgtcctctttcgatatcgacaacagcgcatccgaacatgaacgcgtcatgcttgtagttaataacgcctccgccccattcttccgcacggttgtagtagtatgctgcgaacttcttgagatacggcttgaccgcgctgtgctgaatccaccagtcaaagtatattattttcggctggaatctgtcaacaatttcacagcagcgcacgagccagtcttcgagatattcctttgtgggggtaggcttcgagaaaagatcatgatggttcggctcgggcatagcggggtagtagaagtcgccgtacttttcgtcgtccgttatgtcgctctcgaactcttttccgtgacccatgaagaaccagtgctccacgcggtgagacgaagctccgttaacaataccgtgacggcgtgcggattcggaaagctcgcctacgatatccttgtgcggtcccatttcgtatgcgttccaatgggaaacttcgcttttgtacatctggaaaccgtcgtggtgctcggctacgggaactatgtactgcgcacccgcctgcttgaataggtcgcaccattcgtccgcgctgaatttttctgctttgaacatcgggatgaagtccttgtatccgaaatccttgtgcgcgccgtaggtttctatgtgatgcttgtattcccatgaatcctttatatacatattccgagagtaccattcgcttccgtatgccggtaccgagtacaagccccagtgaatgaatatgccgaacttggagtccttgtaccactcgggaactctgtactgcgataaagattcccacgtgtccttgtactttccgttttcgataacagagttgattttttcaaggtattctttaatcatttttaatcatcctttgcaagtttatttaagcaacgccattttataaattaattatatcactggtgtttgtaaatagttaataaacagttaataatcattttaaccattcgtgaaaaatacttttgttgacctgtgagattttatgtgctataattgagaaaataactgcgattttggagcgaaaaatggatatagccgaaataacaaaaaagatgatagactgttccgacggaaatctgcacgatatatgccattttctgaaggtgtacgcatacgcaaagaccatcggtgaatgcgaaaagctcgacagccgcacacagttcacccttgagactgccgcgctgatgcacgatatagcctgtccgctgtgccgcgcaaaatacggcaatacaaacggaaaatatcaggaaaaagagggaatgatactcggcagagaatttttgaaggacacgggagttgacgaggacatagccgagcgcgtggtatatctcatcggacatcaccattcccccgccgaggttgacggaattgactaccaaatccttcttgaagcggactatcttgtgaacgcggacgagggcggagactctgcggcaacgataaagaacacaatggagcacattttcaagaccaaaaccggcacggagcttttaaagagcatttataaattgaactaataaaataacggagggaacaacatgagcgagaagacaatcatcaaaagaacattcacaaaccccgtatatcctcacggagctgacccgtgggtgattcgcgacggagacagctattactactgctattccgcgggaaacggagtaaacgtgaacaaaatcgagtctcccgacaaaattacaacggacggcggagtaaaagtatacaccgcaccgaaggacaccgaatattcccacgaatactgggcgccggagcttcacaaaatcggcggaagatggtacatttacgttgcggctgacgacggggacaactatcaccacagaatgtacgtcctcggctgcacgggagagaatccgacggacaaatacgaaatgctcggcaagataacggacaagaccgacaaatgggctatcgacggaaccgtgctgcaatacaacggcgagtgctacttcatatggtcaggctgggaaggcgacgaaaacgtagcgcagaacatttacatagcgcatatgtccgacccgcacacgatagactccgacagagttatgctttcctgccccgatatggagtgggagcagctcggaggaatgccgcacatcaacgaaggaccggcagcgcttgtcaagggtaagactgtacatatcatatactcagcaagcggaagctggagcgattattactgcctcggcaagctgacatactcgggagagggcgatattctcgacaaaaacagctggaagaagtcggacattcccgtattttcaaagaccgacaagaccttcggacctggacactgctcgttcacaacggacgcggaggacagaacatgggtagtataccacgcgaatactgtctccggctcgggatggagaggacgccatgtatggattcagccggttgagtgggtagaagatgatatagtcttcccgaaaaccgcctccgccggagaagagcttgaaatcgcggtttgggagaagtgaggaggataaggtaaaacaaaagccgcctgtggtttatgcagacggtttttgcttaatttacataacaatccttgacctgagcgcaactgaactccttttttctcggctttttcgcgacagttttctctacttctaactatatcataaatcccatcgtttttcaatatcattacctcatttctccctgcaaaccccgctaaaaagtggaaaaccggcgtatgcataatcgtgtttgcgacttggcaataattataccgtgagcaaacgcaaaggaagcatacgcaatgtacaataaggttgagatatgcggcgtaaatacgtcaagacttccagtgctatcgtcatctgagaaaaaggagcttttgaaaaggacaaaacaaggagacacggacgcgagagaaaaacttatcgacggcaatcttcgtctggtgctcagcattatacaacgtttcgcaggccgcggcggcagaagagaaaatctcgatgacctatttcaggtaggctgcataggacttataaaagctgtcgatggctttgatatggataaaatggtagagttttccacttatgccgtgcctatgataatcggagagatacgaaggtacctgagagataacaactcgatacgggtgagccgttctgtcagggatatggcataccgcgcactgtcggcaaaggaaaagctgtcggcggagagcggggaagaacctgccgtagaagccatagccgctgaaatcggtgagaacgtaaaggacgtaagccacgcgcttgaagccattgtcgagccggtctcactttacgatactgtctacagcgacggcggcgactcgatatgcgtcatggatcagataaaggatgagggtacgagcgacgaggtgtggcttgaggatatcgcgctgaaggaagcaatatcgaagctgagcgaaaaggagaggtccataatctcggcaaggtattacgccggaaaaacgcagatggagatagcgcaggaaataggaatatcacaggcgcaggtctcacgtctcgaaaaaggcgcatttgagcggattagaaagagcttttgaaattcggctgagctgtgcatatgtacggttcagccgttttttattttgataatagctaaatatgtagtttataccaatgaatctgcaggatattcaattgaaattatggaatgtgttgacatttcgatgggtatatgttataattgtaatatcatatatgaatgttgtcggtaaatttatgtcagcatagtcgttttcatatccgatagctaaaatattttctgttgattaggaagcctctgatttaaggttatttttgcgacaaaagcccttatattttagacttttatcgcaaaaattcgatttattcagagtatccttagatttttattaaaggagaaagtgcatatgaaaaaatcaacacgaatcttttctgctgttctggcaggacttttgctgatgtccgcagtctcatgctcgagcggtacggattcaaaggaaacatcaaaggaaacggcaggcggtcagacctctggtgaaacgactgcggaaacggaagaagaaaccaaaaaataccttgacgatattcccgacaacgtaaaatttgacggagacactgtcagcttcctcgcgtcattcacaagcagctccatagcattacttgacaatgacgaccccacagaggtagtcaacgacgcggtatataacagaagcctcatcataggcgaacgtctcggcgtgaatatcgagattgcaagaggcgctacgacaggctacggcgaattcaactcggttgtaacaaacgcggttgcggcaggcacggaggagtttgacgttctctgcggacatacgagattcaatatcaacctcgcttcacagggaatcctaaaaaatcttgacaatataaatttcattgatttatcgaaggaatactggagccaaggctacgacaacaatacgacaatatccactactgggcaacgggagacttgtcgattgaatacataggatacatttacgcaatgttcgtgaattcggcaatgtggaacgaccattactccgacaccgatatatattccgtagtaaaagaaggcaaatggactcttgacaagctcgcagagtatgccgagaacgtttatgttgacgtcaacggtaacggagaagtcgataacgatgacagcttcggcgtggttatgcagaaaggtcatgtgctgaacggtatggcattcgcgtctaatgtggtttacacttcgtatgacgagaacggcacgccttatatttccgtaaataacgaacacactattgacgttttcaataagctccactcactgttttacagcagcacaggcgcgagaatgcttgaaaacggagagtttgacggtcttaccgaggttatgttccccgcccgcagacttctcttctgcccgaaccagttccagtttgccggaaacgaaaagattcgcgagatggaagacaatttctacatcattcccatgccgaaatatgacgaaaatcaggaaaactaccgctccaaccagtacgacggagttccgatttacggtgtgccgattacggttaaggaatccaagctcgacactataggcgcgacacttgaggctatgtgctcactgtcaagtcagtccgttattccggtttactatgacaaggttttgaagaacaagtactcccgtgacgctcagacggctgagatgattgacataatccatgactccgttacatcggacttctgcttcgcgtggggcgacactatcggaagtatgtacaatatcttctacgacaacatccagaacgaaagcattgaatcgagattgaagagccttgaaaagccgtggggaatcacgatgaagagactccttgcaaagctcgacgaatacagcggcaactaaaatataataaaaagggaaggcaccacatcatacagtgctttcccttgttttattaggcttattcttcttcggagactttgtttaccttctcgtagtacgggtctatcataatttcctttatcttcgggtatacgccgtaaactccgattgctatgaaaagcgacggaagtatgatgaacgggaagataacggcgagaggaaagtacgcatatatgaggaagtactcaaacaacgcaagagccagcgttccgaggaataccataatgtttctcttgatgccgagaatggtgaacagaagcgcgtttttgaacatcttgaacagcggcaaatcgaacgtgatgagcatgagatatatgtagtgtctcatgaagaaatacagcattgccagacacaggcttgcataaaacattacgtttgtcacggtgtttatgttgtaattaaggttgaagaatacgatgtcgtatactataagtcccgatatcacaacatcaagtatgccgtagatgagtccctgcttaatgttgcggcggatggcgtagaagaagtcgtgcatcatgaacacaggctctccgcggaacatatttctcacaatgtacgtcactccgacccgcacaagtccgaacgtcacgatgacaagcgcgcctattccgatgagtatcttgtcggcagtcgtcaaaatcgtaacatttccctgacgcgagaatatcgtccagagagctgccgtagcggggcttttgtcaaacatcgtaactccgtagagaggagcgaacgcaacaaagctgggggatgtgagatgtatcgaaaggtatccgctcattgcgagaagcaggaataacaccggaaagtttccgagtatcatgataatgttgaccgacaaaagctgattgaactttcgtcctatgaaaacgaagaaatttttcagcgtaggctcgtcgcagatgggagtttcgtccttttccacacccttgccctctttgttgaagcgtgagaatatgttgaatttttctcgccgctcttttcgtttttcttcctgctcaagctcttctatttcgtcgagcgagagctttctttgagtgttgtctctgtcattccgattgaaatcagccattttataattcctttacaataaaatcaaaccagaagtacgttttccgcaattgccgagagaacaagcgcacatccggtcagcacaaacgagcaccggagaagctctgccgatactgccgacacaaacacacgctcgcccgacgctctgagtacgcattccgcctccgaatagagaacgcagaacgccgcaaaaataaacgtcacggcacattccgcgaacacaaacacacatcccgcgacccagtattcgctaagtccaacgatagctcccgatgaagccgcacagacgaaaataccgagcgaaagccccttccaaagcgccactgctataactgcgcccgacgtaaaatgagtgaatgcagatacggtcaaaaacatcatcgtgacaagcgtgggcagacggcatacaagaatagacggcaaatcggtgctcgcgtgaactgttgtaagcaacggaattgatgagcggaagaaatgcgagaatacaaaatatgacgcggcggacgagagggcaaaaatcccgatgcagataaagaacacggtgtatagcgtggggaacagcttccgcctcagaccgtcaagataaatttcggtttcgtacatgataaacctcccgtaatgttgtcctgagcgattatattcgggacaagcggaagatatcactgaacagtttatcacacgcagagtgccattgcaatacgaaaaatgtaaataaatctgaatacgggaaaatattaaacaaaaaatctcagataatcattgaaaaaatcgacggatgagtatataatatatgttaatacttctccgatagatgcagaagaaaattcgatacccgaaagactggcgaaaaaatgaaccgcgatgaaataacgagaatattccgcaatccgccttacattgagacgagaaggcttgtcctgcgcaaaatgcagaaaaacgacgctgcggatatgtacgaatacgcaagcaggagcgatgtcacaagatatcttctgtgggagccgcacgagagcgagagctacacacacaaatacctttcatatattcagtcgagataccgcgccggagacttttttgactgggcgataacgctcaaggacagcggcaagatgattggcacgtgcggatttaccaaaatcacggtggaatataactccgcggagataggatatgtgctgaacccatcatactggggctacggaatcgcgccggaagctgtcaccgcagtcatgagatacggcttcactgagctgagactgcacagaatcgaggcaagatatatgataggcaacgacagaagccgcagagtcatggataaaataggaatgcagtttgaaggaataagccgcgactccatgcacgtcaagggaaaatacgtctcgataggaacctgcgcgatactctgcggcgaatttgcttcgatttacggaatataaaaacagcgcccggaataattccaaaacgctgtcatataatttcaaatatcaaacgttgaagcggaagagaacgatgtctccgtcgcgcattacgtagtccttgccttcgctgcgtacaagacccttttcctttgcggcgttcattgaaccgcattccataagatcgtcgaacgatacaacctctgcgcggatgaagcctctctcaaagtcggagtgaatctttccggcagcctgcggagccttagtgccttttactatcgtccatgcgcgaacttccttaggtcctgccgtgagatagctgatgtagccgaggagggaatagcttgccttgatgagcttgtcgagaccgctttcggtgatgcccatgtcttcaaggaacgctttcttctcttccggttcaagctcggatatttcggcttcaattcctgcgcatacgggaattacttcagcaccctcagcttcggcaactttttttacgctgttgtacatttcgttgtcgggagaaacttcggcagcttcgtcttcgcttacgtttgctacataaatgatgggcttgagagtgagaaggttgaggtcgccgagcatttctttttcgtcttcggtcatttcaacctgacgagcggtcttgccttcgttcagcgtcttgagtatgcggttcagtaaatcaagctgagcctgaagcgttttgtcgcccttgagcagcttctgagtcttgtcgattctcttctcaacctgctcgatgtcggagtaaataagctccatgttgatggtttcaaggtcgcgcagagggtcaacacttccgtcaacgtgaatgatgtcgctgtcctcaaagcatctgagcacgtgaaccacagcgtcaacgtcgcggatgtgagagagaaacttgtttccgagcccctcgcccttagaagcaccgcgaacaagacctgcgatatccacaaattcaacggtagcgggagtgtaaagagtggggttgtacatctccgcgagcttgtcaagacggtagtcgggaacctgaactatgcctacgttcgggtcaatcgtgcagaacggatagttagcgctgggagctcctgcgcctgtgagtgcattgaaaagcgtgctttttcccacgttgggaagtcctataataccaagcttcattattatatattccgcaaatcaagcggctttcctttcctgtgtttatagtgagaattatgttttactcactaattatacacttttcgccgcggatattcaagtcaattgaggctgattttgaagaaatataattttttttataaatataagatggaattaataatgctatcactttgcgttcacactattttcatataattagtttaaaataacgtagtaataaaatatcaataagtacatcggaggtgaatatggtttctgaagcaatatacaggcatgaatataagtactatattaatgactgtgactgcgaaatgctctcaagacgcctcggtgttgtcatgaaaagagacccgcataccggtccggacgggacgtatctgatacgaagtctttattttgataactataacgaccgtgccttgcttgagaaaatcaacggagacaacccgcgttcaaaattccgcattcgtatctacaacggaagagcggatttcatttgtctggaaaaaaaggttaagcgggacgatctcactcaaaagctatccgcacgcattacaaaagaagagtacgataaaatcgtgaagggcgacatcgactggatgcttcacgacggaagaggtgtagtagccgagctgtatgcgcagatgaagggctactcgctcagaccgaaaactcttgtggaatatacgcgctatccgttcatttacgaggcgggaaacgtgagagtcactctcgataccgatatcagaacaggcataaattccatagacctttttgatcctaccccgcttgtccccacccccggctatgacgtcctcgaggtaaagtacgacagattcctcccggatatcataaaatacgtggtaaatccagtttgccgcgacagacagtcaatgtcaaaatacgagctttgccgtacatacggttaagaaactattttatcagaacttaattgaaaggaataacccccatgtcattcaaagatatctttaaaagcagcttcctcgagagaacaacttcattctcgattcccgacactctcatctccctcgcactcgcttttgccctcggtatgttcatctacttcgtttataagaagacctatcagggcgtagttttctcccgttcgttcggcgtatccctcgtagctctcacaatgatcggcacattcgttattcttgcggtaacgtccaatgtcgttctgtcgctcggtatggtcggcgcgctctccatcgtaagattccgtaccgccatcaaagaccctcttgatatagtatatctcttctgggcaatcgcagtcggtatcgttctcggcgcaggtatgtatcctctcgcggttatcggctcactcatcgtaggcgcaatcctcctcgtattcgtaaacgcaaagtcctccgactgcgaatacattgttgttgttgaatgcaaggacgacgctgccgaaaagaaggctgttgacctcatcaaggaaggcacaaagaagtgcaacctcaagtctaagaccgtaacacgcggctacatcgaaattacatacgaagtaagactttcttccgacacaagcgaatttgtaaataagctctccgcttccgaaggcgttgacaaggcagtgctcgtaagctacaacggagattacatggcataaaaatattgtttcttcgggaacaatttgcctctctctgtcgtctaagtaagtgaatttgagagaataattcatataattgtataaattcaagatcataaaagaaagaggggaatattatgggaacaaaattactggtaattgacgacgatcccaacatttgcgatctgttaaagttctattttgaaaatgaaggatatgaagtaaaaaccgcgaacgacggtatagaaggtctcagctatttcaaaatgtatgagccggatctcgttctgcttgacctcatgcttccgaaaaataaggacggcaaccaggtttgcagagagataagagctatttcgtccaagcctatcatcatgatcacggctaaggatgaggttctcgacaaggtagtcggacttgaactcggtgcggatgactttgttgttaaaccgttcgagatgaaggagctttccgcgagaatcaaggctgtcctcagacgttattccgcgcacgacaaccagaatgacgacgagacaatcaagtttgaaaacattgagataagccgtgaaaagtatgagcttaagctcaacggtaaggctgtcgacattccgccgaaggaacttgagcttctctacttcctcgcgctcaacttcaaccgcgtattcacaagagatgcgcttcttgataaggtatggggctttgactacctcggagactcccgtactgttgacgttcacgtaaagcgtctcagagaaaagctcgaaggcgtatccgataagtggagtctcaagactgtttggggcgtaggctacaagtttgaagtagtacagtaaccgagtgttgaatagtcggtaaaacgacataatcggggttgatgagcttttcgtcagcccttgatttttgccaacaacgcacagttcacagctaacgctttggcggcagaactgtgcggcgttacctttgtcgaattatgggagaagtcatgttcaaaagtgtttttgtcaaatatatctcgacgttcatgctgataaatataatcagtatctttttctcaacatccattataactacgcttgtgggtgtctatgatgagcaggataaaacgcgtactctgaccaatgtgacatacgccgcgacggattatatgataaacgactacacaaagagcggggaaatcagcttcaacgattacctcaacaactccgtgtacgatatcatgccggtgctaaaggctatggctaacgacagcgacattatcataatattcatcgccgacggagacggagttgtaaagctggtcggcggtactcagaacgataagtatttcggagacgaggacggcattgtcagcacagacaaaagctatgtctatcccgcgtcggttgtgagtgagcttgaggaaaaaagggcggtttcgcgcaatgacgaccttgacggattcttcagcgaaaaacaccgctcgtatattcaggctataaccacaaaggacggaaagatagtaggctctgttatgtcggtgtcgctttcatccgctacggacgtgcttctcgaagcgatgataaagacaatagttatgtctacgctgtggctcatgctcgctactcttgtcgcagtctactttatcacggagcgtctcgtatctcccattcgcgctatgagcaaggcatcaaaggagttcgccgcaggtcactttgacgcacgtgttgaagtcagcggaaacgacgaggtagcagagcttgcagacgcgttcaacaacatggcaggctcattacagcacagcgaagagacaagacgactgttcctcgcaaatgtttcgcacgacctgagaacgcctatgactaccatctccggcttcatcgagagtattttgagcggcgcaatcccacaggaaaaagtaccgcactatcttgaagtcatagcgtccgaggtaaaacgactcgccagacttgtgtccagtctccttgaccttacgaagattcaggcgggtgagagaaagttcaacaaaaccgcgtttgacatatgcgaaatggcgcgccagattatcatctcctccgagcagagacttgaagcgaagaagcttgacgttgactttgacaccgacaagttcaatgtttacgtttcggctgaccgcgactccatctatcaggtgctgtacaatatctgcgacaacgccataaaattctcgcgtgaaggcggaaaatacatcgtctcgataaaagaagcgggacaaaaggtgctcgtcagcgtctataacgaaggcgaaggcatatctcccgaagaccttccgtatgtgttcgacagattctataagggagacaagagccgcggacttgacaaaaccggcactggactcggactgtatatctcaaagactataatggaagctcagaacgaaaaaatcagcgtggagagcgaatacggcagctggtgcagatttaccttcacgctgcaaagaacgtccgcgcccaagcaaagcaatattgacagaaacggagacaacgcttaatgaagctaaactataccgcgacttgccttttcggacttgagggattcctcggggaagagattgaagctctcggctgtaaacgaactgacaacatggacggcagaatcacctttgagggggacgaaaataccgcggcggaagccagtgtgaacctgcgatatgcggagagactttaccttaacttaggctcgtttgaagcgctcacgtttaccgagcttttcgacggagcaaagtcaattccgtgggaagatgttatcggacgtgacgacgagttccccgtgagcggacattccataaagagcaagctgttctccgttcccgactgccagagaataataaaaaaagccgtatcggtcaggctcggtgaaaaatacggactggaaagactgcccgagacgggaaagagatacagaatcgagttcttcctgttcaaggataaggtcagcatgatgatagacctctccggcattccgcttcataagagaggatatcgcccggagacagtcgaagctcccatccgtgaaactcttgccgccgctatggtgaagatcagccgaccgagagaggacgtacttctgtgggatcccttctgcggctcgggaacaatagcgatagaagcggcaatgcagatgagaaatatcgcgccgggaataaaccgctcgttctccgccgaggaatatcccatcttcccgaaagaatcgtggaaaaatgcgcgcgagaaagcaaaggctgcaataaaaaccgactcaaagtttgaagcatacgctacggatatcgaccccaagtgcgtggagatagcttcagccgccgcaaaaagagctggagttgacgatatgctgaacattttcacaatggacgcgcttgacatcgacacactcggacgccgcggaactatcgtaacaaaccctccctacggcgacagacttcttaccgtggacgaggcgaacgacctttaccgcgcgatggggcaggcattctcacggctcgacaggtggcagatttacgtcataacccagtcggaggagttcccgaagctgtacggcagacgtgcggacaagataagaaagctctacaacggcatgataccgtgctactattatcagttcttcaaacagcagaataagtgagtgggaatgacaaacagctaagcagtggcgcaatccatcccactcacgagaatttaccttacggaaaattctccgacgtttggcttaaaaccgttgaatattttaaaatacctctgtcaataatcagcgtatatgctatgacagaggtgtttttatgcagattttcaatgaaaaggtcagcggcgacttcgagaacgacgtgaggctgatggacgacatactccgcccgaacaagagctttgatataatcagaaaaacgatgaagatatccgacgcgaatattgtgatgtactacatcgacggcttcatcaagggggaaacactgcaaaagctgctgacgtacatcgtctcggtgaaggatttcggcgataagtcggagggcagtgcgcagagattcgccgatatgcacgttcccgccgccgaggttgatgttaccgattcgatagacaacattgtgctgatggtcatgagcggatgcacggcgtttttctgcgacaggtttgataataacgctgtcataatcgacctgcgaacatatcccgccagaaacacggaagagccggaaaacgacaaggtaatgcgcggaagccgagacggatttgtggaaacgctcatctcgaacaccgccatgataagacgaaggatacgctcccccgagcttgttataaaatatctcaacgccggaaagagcacaagaaccgatatcgcactgtgctacatggacggacgagcggatatcggttatgtgaatgagctttccgcgaagatagagaatctacagacggattcgcttgtactcggacaccagagccttacggaaagtctgataaaaacgcggtggtacaatccatttccgaagattcgagctacagaacgacctgacgcggcggctgcgactttgcttgaagggggaattatcgttctgtgcgacaacagtccggaagccatgatattcccgacgtccatgttcgacttcttgcaggaaaccgacgatttctactttcctccgctcacaggaacgtacctccgccttctccgccactgcattttctggataacgatgatactgactcccctgtggtacctgcttctcgagcattcaaacgtgcttccgtcgtggctgctctttgtgataccgcaggacagcggagaaataccgattttcgttcagctcatcatgacggagcttgcgcttgacggactaaaactcgcttctctgaacacgccgaatgtgctgtccaattccctctcggtagtcggcggtcttcttctcggagattttgccgtaaccgtaggctggctatgccccgatgttatcctctatatgtcgtttgtcgccattgcaaacttcactcagtcgagctatgagttgggttacgcgttcaaatatatgcgtgtgcttaccttgtgcctgaccgcgctgtttgactgggtgggatttgtcctcggaatagtcgccgccgtgacgcttatagcaacaaacaagaacgtaaacggcaagcggagctacctctatcccctcatcccgtggaacggaaacgccatggcaagactgtttttcaggctgaaaaagcacgattgaacaaaaaataatacgcattttccttcaaaaagccgactctaaaacctatcgttgcagtcggttttttgttgcgtgaataaacaaaagaaaaatgttcgtcatgtataaaaccgtgattaaaatattgtgcaaaatcccacattgacatttacggcgcgaggatgtataattaattaggaattaaaccaatgctaaactatatataaactaaataataatcaggaggtagaacatgaatcttcaagttaacggaaaggctcccgaaccctacgagaaaatagagccgtataaaaaatcccctatgatgctcatcaacgagatatcgagaattatgggcgacaaaatacgcgagaaaggcgaagacaatcccatatctcagaagtcgggacgcgcgcttctcatcgagctttcaaagagagacggcagaactcagctcgacctcgttaaggcaacacacctcaaagcgccgacaatcagcgtagttcttcagaagctcgagcatgacggctatgtccgcagaactcccgaccagtatgacctcagagcgacgagagtttatctcaccgaaaaaggaagagagcttgacaacaagatgaaagccagaatccgtgccgaggaggaggaagccatgagcaacctcacaccgagcgaatatgacactctcttaaagctgcttgagaagctgaaaagcaatatgctctccgagaacgacaaagaggacaatctgttttaattgacggcttactaaaggagagtgatatttttgaagaagaaaataagttttctttcatatctgaaaaaatattggttcttcgcgataatctcaccgctgttcatgataggcgaagtactcatcgacctaatgcagccgaagctcatgtcgcggataatcaataccgtagttgagtcgggcgagcttgacgttgtaatgagctcgatattctcgactgcaatagaaatgatagtccttgttgctatcggcggatttatgggacttatgtgctgttataccgccagcagagcttcacaaggcttcggtaacgacgtgagagtggacgcgttcaataaggttatgtctctttcactccagcagacagacaaatttacaacaggctcactcgtaacaaggcttaccaacgacattacatctctccaggatcttgttcagatgatactgagaatgtttgtccgcgctcctatcagcttcttcggcggttttgtaatgtgcctgacgctcgatatttccttcggctatgtcgtagcaatatcactgccgttcattcttctcattgttgcagtcatgataaaaaaggcaattccgctgttctccgttgcccagaaaaagctcgacggcgttaactctgttgttcaggaaaacgtgaccggcgcgagagttgtcaaggcttacaccagagaagagcatgaaatcggcagattcgacacggcaaacagcgactacatggcggtaaactacaaggcgaccgttatcatgtccgctgtgttcccggtaatgagctttatcatgaacctttccgttatagcgataatttacataggcggatggcaggttgaagccgcgagacttaatgtaggagacgtcatggcggcagtgcagtacatcacacaggtgctcatgtccataatgatgatgtctatgatattccagcagatcgcacgaagcaaagcctgcgcatcccgtgtacgcgaggttcttgaggctgacagagttatcaccgacggcagcgttaaggaaggcagcgaaaagggaactgtaagatttgaaaacgtatccttcaagtatcccgacgcggcaggagagaacatcataaacaatgtctcgtttgacgtgaagcgcggagaaaccgttgcgataatcggcgctacaggctcaggtaaatcgtcaattgtcaacctaatcccgcgtttctacgacacagtcggcggtacggtatatgttgacggcgttgatgtgaagaaatgggatctgcacgcacttcgctcaaagataggctttgttctccagaagagcgagcttttctccggctccgttgaagacaacatcaagtggggcaaaaaaagcgcaagcgataacgacgtaagagaagccgctgttgttgctcaggctgacgagttcatctcaaagatggaagacggatatgagtcatacgtagctgaaaagggcgcgtctctttccggcggtcagaagcagagagtggctatatcgagagcggttctccgcaatcccgagatactcatattcgacgacagcacgtctgcacttgacctcggaacggaagcaaaactcagaaacgagcttaacaagaagttcaaagacacgaccgttatcatgatagcacagcgtattgccagtgtaatgcacgccgacagaatcgcagttatcgaaaacggcagaatcacagcgtttgacaatcatgaaaacctcatgaagacaagcgcggcttacagagatatttattcatctcagatgaagacgagcggaggtgagatagatggctgaaaacatgaagaaaaacatacccgagaatatgcctcctatgccggataagccgaaaaaagagaaaaaaggcgagcctacggcagacgaactccgcgatatgatgaagaaaaacggctcaaagggtcctggtggtccgggcggtccgagagctatgattcgcgagaagccgaagaacatcagagcaaccctcggcaagctgctcaaatacataggcaagaataagtattccgtcatactcatcatagtcacgacgattattacaacactcttaaatcttctcggtcctacgctccagggcaaggcgattgacgcgattaccataacggagcagagactcagcgtggacttcgacggacttgtcagaattctcgtgctcatggcagtcgtttacctcgcaagcaccgtcatacagatagcgcagggaatagcttcggctaaaatatctcaggacaccgtctataatatgcgtaaggacctgttccgtaagatatcgtacctcccaataagctatgttgacacgcacgcccacggtgacataatgagccgtatgacaaacgacgtcgacaacatctcgcagacactgtcctcgtcaatcacatcgcttatctccgcagtgcttacccttatcggcgcgttcgctatgcttgtgaagtacgactggagaatggctctcgtgtcgcttatcacaattccgctgactgttgtagtttccatggtgctctccaagctcatgagaaaatactttatcgccagacaggtgctcctcggtcagctcaacacacaggtcgaggaaatggtaacgggctacaaaacagttatggcatacggaaaagaagctgatgcttgccgtgactttgccgagataagtgaagagttccgtaagtgcagcatcaaggctaacgtatggggcggaatcatgggacccgcgatgaacattatcaac

SEQ ID NO: 2112 - DNA, 4925 bp, Unknown
  16S sequences of unknown bacteria
taggcggcaacattgtaaaggttgatattcctgaaagcggagcacttaaaaaggcatattgatttatattgggcagagctgaatttttcatctccgcccgtatttttggaacggaactataaaatggcaagatatatatcactttactccggctcttccggcaactgttctgtcgttgaaaaaaacggtaaatttatactcatagatgtaggcaaaagcgcaaaaattaccaataccgcattaaaagacgcagggttggatataaaaaatttacagggcgttttggtaagccacgaacacagcgaccacataaagggattgaaagtatttttaaaaaatattcatgtgcctttgtacacaaacccggcaacggcggattatcttgtaaagcgtgaacttgtaccggcacatacggatgtgcgctgtatgaattacagcggagaagatttgggggatttttttgtaaccggctttgacacacctcacgattccgcaggctgtatgggttttagggtacatacggagggcagccaaatggctattgccaccgaccttggacatataaccgaaaacattttacacaatctttcaaatacggatcttacggttatcgaggccaattacgacaacagaatgttggccgatgggccttatccttattatctgaaagagagaatagactccgattacggacatttgagcaacatacagtccggattggcaatatcaaaacttgtggaaaaaggtgcaaagcaaatacaactctgtcacctttcccagaccaacaacacccccacaacggcactgtcaagtattgccgcaacggcaaaaaatgtaggcattgtgtttgataaggatgtaaaagtaagggtaaattcaagaaattccgtcacacggccgactttcttttaggtgacaaattatgataaatgtaactttaataacaatgggcaaagtacaaaagggctttttgaccgacggttgcaacgagtacataaagcgtttgagagccatgtgcgattttaagcttgtggaaattgaggacgaagctttgccggagaaaaacttaaaccaaacccttatagacaaggctttggaaaaggaaagcggaaaaataatttccgccataccgaaacaaagctatgtcatagccatgtgtatagagggaaggcaacttgccagcgaggactttgcaaagctgtttaaccaaaaggcggtagaggggtattcaagtatatgccttataatcggctcaagccatgggctttcggaaaaagttaaagcccgtcgggatttgcgtatgtctttttcaaagatgactttcccacatcagcttttcaggcttatggctttggaacaaatttaccgtgttttttccataaatgcaggtactaagtatcacaaataatttaatacattttacggtgtggattgtaaacacaccgttttttattttgaaaatttttgtaaatttgtaaaaatatgccgctttttatataaaaattgtcggtttacacaagtgtattttgatattttcgtacatattccgacttgaaaaaattttctcaaatggtaatatattagtatggaggtgttcggatgaaatatttagatgaccggcgtaccgatttgccgatatatctgtttaaaaaaggtgaattatttgaggcatatacatttttcggcagtcataaggtaagcaaaaataaatgggttttcacagtctgggcgccgggggctgcggcggtttcccttgtgggagattttaacggttggcaggcgggacaaaaccctatgcacaacataaaaaacagcggcatttggcaaacggttgtaacggctgatatgcagtttcaatcatataaatacgccataaccgacacaatgggcaaaaccgtaaataaaagcgacccctatgcctttcactttgaaacaaggccgggtaatgcctctaaggcttatcgggcacctgcacacaggtggaaagataaaaagtggcagacacaggacaaagagcctatatacaactgcccgatgaatatatatgaagtgcatctttccggctttatgcgccacccggacggcagcgtttacacataccgtgaaagcgccgaggctatttcaaaatatgttaagaaaatgggatatacccatgtggaaattatgccgatttccgaatatccttttgacggttcatgggggtatcaggtagggggatattacgcccctacaagcaggtacggcaccccggaagattttaaatattttgtggactgtatgcaccaaaacggaataggcgtaataatggattgggtgcctgcccatttcccgaaagacgaattcggactttaccattttgacggcacggcctgctacgaaaatcaaaacccacaaatggcggaacacaaagaatggggtacaatggtttttgatttcggcaagggtgaggtacagagctttttgatttcaaacgctttgtactggctgaaagagtaccacattgacggcttgcgtgttgacgcagtggcaagtatgttgtaccttgactacaacaggcagccggggcagtggactcctaacaaaaacggagggaatgaaaatttagaggccgtggcctttttacaaaagctgaatacggaagtttttgcaagatttccaaacgccttaatgatagcggaagaatctaccgcatggccattggtaacggcacctgcggacaagggcggtttgggttttaacttcaagtggaatatgggctggatgaatgacattctggactatatgaaaaccgatccttacttccgtgcaggggtacacaataagataacattttcgtttatgtacgctttcagcgagaacttcattttacctataagccatgacgaggttgtgcatatgaaaggctcgttgctgaataaaatgcctggggacgaggaacaaaaatttgcgggtttccgttcttttatagggtatatgacagctcatccgggcaaaaagctgttgtttatgggtcaggatttggcacagtattcggagtttagcgaggagagggagattgattggttcctccttgaaaagccactccacgcaaaagccaaccaaatggttaaggatataaacaagttctacctgtcaaacagtccgctgtggcaggaggattgctcttggcagggctttgagtggatttccgccgacgacaacacacagaatgtgatagtctttttgagaaaagacagagagggaaagtccattttgtgcgtgtccaatttttccggcagcagttataagggctatgaattcggcgtgccgaagcccggttactacaaagaggtatttaataccgacaatgtaaagtacggcggtaagggcggcggcaacccaagggcggtgcacagcaaaaaaggggctatgcacggcagagaaaaccatataaaaataaatattccggctatgacaacgctgtttttcacagtaccggatgatataaaacaggcagagcctaaaagtaaaaaaaggagaggaacattatgaaagagtgtatagctatgcttttggcaggcggtcagggttcaaggctttatgccctcacaaggcaaacggcaaaaccggcggtctattttggaggaaagtacagaattatagatttccccctttcaaactgtgtaaacagcggtattgacaccgttggggttttaacccagtatcaacctttggaactgaacgagtatttgggcaacggtcagccttgggatttggacagaattcacggcggtgtacatgttttgcccccatatcaaaaagccaccggcagtgattggtacaagggcaccgcaaatgcaatttatcaaaacataaactttatcgaaagatatgccccgcagtatgttttgattttgtccggcgaccacatctacaaaatgaattatgaaaagatgcttgcacggcacaaggcgaaaaaggcggacgccaccattgcggttttacaggttccgaaagaggaggcaagccgttttggcattatgacctgcaacgacgacggaagaatagtcaagtttaccgaaaagccgaaagagccggattcggatttggcatcaatgggtatatacatattcacatgggataaattgaaaaaatatctcatagaggacgaggccgataagtccagcgaaaatgacttcggcaaaaatatcatacctaagatgttaaaagacgagcaaaagctctatgcttataattttgagggatattggaaagatgtaggcacgattgacagtttgtgggattcaaaccttgacctgcttgacccgaatgttccccttgatgtttgggatgagtcttggagaatttattcccgtacccacaatgttccgccacagcatataggacagacagctgaaatagagaattctatgatcagcgaaggttgtgacatagacggctttgtggatttctcggttctttttcaaagcgtaacggttgaggaaggggcaaatgtcagatattccgttgtaatgccgggttcggtaattaaaaagggcgcagatgttcggtatgcgataataggcgaaaactgcgttgttgaagagggagcaaaggtaggacaacgccctgaaaaaatggaagatatagaaaaatggggcattgcggttttgggcaataatgttacggtgcataaaggtgcaaccgttgaggcaaaagcaatgatttattccgatgtaaaggctggtgaataatatgacaagcggaaataaggttttgggtattatattcccaaatatgcatgacgaggctgtaaaggaacttaccgagctgcgcaccagcgcaagtattcctttcggcggcaggtacagacttatagattttaccctttcggaatttgtagccgcaggggtaaacaatgtgtgccttgtggttaaaagaaacta

SEQ ID NO: 2113 - DNA, 32759 bp, Unknown
  16S sequences of unknown bacteria
ttttcctacattagggggctttttgtctattgtccggttttactggtccagttcaaaatgcggaaatggcttttttctttgtctgtgttaagattactcgtcgctgcttcgcagccaggccgggcgctggcggaggacaaagcctgccacgatgcccaaagagaggaacatggtcaccagagaagaaccgccatagctgaagaaggggagggtcagaccgatcaccggcatgacgcccacacacataccgatgttgatgagaatctgaatggtgaacatactggcaatgccggcgcagaccaaaaggctgaagcggttgtcacactggctggcgttataaaacagacgaagcaccagggtgcccagcagtacaatgaccacacagcagcccacaaagccgaactcctcaccgatcaccgaaaagatggagtcggtgtatttggcgggcaggatgttgtactgggtctgccgtccctgcatatagccggagccgagaaattgcccggcccccagggccaggatgctttggtcggtctggtaatagatgctggggtcgatggccggatcgaaaagcaccagaatacggttgcgttgatagtcccccaagaactgccacacaaggggagagaccgccacggcgctcgccgtgatgccgccgatccatttccagctcaggccagaggaaaacatcataatggcgaagatgaacacataggccaccgccatgcccaggtccttggaggggatgtaaaccgcggccaccgtcagaaggaagtggagggtcagctgggctaccgctttcaccgaattgatccggtctttcagccggtcgatgtggcaggccagggtgcagatgaagataattttgccgaattccgccggttggatgccaatgccgccgaaacggatccagctgcggttgccggtgtcaccggcggtgcccagcacaaagagggacagctggaagagaatgttgaagacaaagaagaacttccagaaccgggcgatgttctccagatcgatgagggaggccgccacaaaacaaaagacccccagcaccaaagcggcgctttgcacaatgacatatttattggagtgatagctgagggtggcgctgtatatggccaccagtcccagcagggaagaaataatcgccagattcaaaagcagcagatcggtgtggcgcagatagcttttgatggctttgaatactttgaccatgggacacaacctttcctgtgttcctattattttatcatctggcggcggattattcaattcttcccggagaagaaaagacaccttgtccggcagatttataaaaagtttacaccttgggccggagaaggctaaatgagaaaagaaactatttttaacaatttcactttccatgcaggcacaccaatggtataatcataaataagtaccaaaataccgaacggacagcgcttcccaaagcatggctcagggggcgcggatgggagtgaaagatatgcagacccttgttagagatcaggtgcatttcgccttttcgccggacaatgttcccgtttatcgtgcccacagcggggataccgtcctgtttcagtgtcaggactgctatgccggccagctgacagaagacggccagcagatggaaagcatgaacatggcccacaacaatccggccaccggccctctctatattgaggaagccgttcctggggatgtgctgcgggtggagatcctctccattcagatcgcaaaagaaggctccatgtgcgcccgggagggagcggggatctacggggtcaccggctgccattgccgccgtttcccggtggaaggggaggaaatggtttttgacaagggcatccgggtgcccctgcgtcccatgatcggcgtcatcggtgtggccccggcggagggcagcgtgcccaccaccgttcccggtgagcatggtggcaatctggatatccgggacatgaacgaaggggccgttttgtatctgccggtgaatgtgccgggggcccttttgtccatgggcgacctccatggcgtccagggggatggggagacggtgatctgcgctttggaagtgccgggagaagtaacggtacgggtcactgtgctgaaagaccggggagatatccccacgcccttccttgtgacaaaagaccggtatctcaccaccgccgccgatccttccctggatgtgtgcagcgtgaaggcggcccggaaaatgcagagattcctccaggaccacgccggactttctccggaacaggcgggaatgcttttgtccctggcgggaaatctgcgcatcagccaggtggtcaacccggccaagggctgcatcatggagctgccccgtggactggccaaggagagttttacactatgatagaggaattgccattgatcccgatcgaaacaaaagagacccattctccggaagaaacagaaagcctgggggcctatgtgggggaaacctatccggacactcaggtgatcgcccttttgggtgagctgggggcgggaaagaccgcctttgtccggggcctggcccggcagcggcagacggtggatcaggtttccagccccacctatgccattgtcaatgaataccggggaaagcgtcccatttatcattttgatatgtaccggatcacagacagcgacagtctgtatgacatcggctgggaggattatctttcctccggcggcttgtgcgtggtggagtggagcgaaaacattctggacgccctgcccgatgggaccttgtttgtccgcatcgaaaagactggagaacaaagccgccgtatcactttgctgaaaaaggagggggaaagatgctgatcttggctctggataccacatcccgggtggcttcggctgctttgtgccgggatggggagatcatcggttatggggaaaaggattcccagatgaaccacagccgtaccattttgccggtggtgcagcatttgctggaacaaaacggcctggccctttcgggggtggatgtgtttgccgccaccgtgggccccggctcgtttaccggggtgcgcatcggtgtggccgccatcaaaggctatgccatggctttgaataaaccctgcgccgccgtgtccacactggagtcggccgcctgggccgccaaggacaaaaaagggattctctgcgccggggtacaggcccggcaggatgaattcttttatgctttttttgaaaacgacggggagatccgccggaaaagtgccgatcaggtgggaaaggcccaggagatcctgaggcagatggaggaatgtaccggacccctttggatcaccggggacggcggcgggtttttgatggaatacgcagaaaaagccggattgtcgcctcttctggcagaaggatgccggcagaatgccgccgccacggcccttcgggcctttcagatggcggagaggggagagctgaccgattgtcaccacctgactcccagctatctgcggctttcccaggccgagcggatgaaactgcaaaacaagtaaaaattcagataaaagaaaggaacgatcagtatgaaaatcgctatgggatcggatcacgcaggctttgctttgaaagagcaggtcaagcagcatttgaaggaaatgggctgcgaagtagaggatttgggcacttatgacgaaaagtcctgccactatcccatctatgctcagaaagtggccatggaagtggtcagcggccgggctggtcagggcattctgatctgcggcaccggagccggtatggccatcgccgcaaacaagatcaagggcatccgggcggtaacagtgtccgattgcttcactgcacgggccgtgcggatgcacaatgacgccaatgtgctgtgcatgggcgcccgggtcatcggttcgggcctggcctgcctgattgcccagctgtttgtggagaccgagtttgaaggcggacgccatcagacccggctggatatgatcgccgacatcgaaaacggcaaataaatttccgttttccatcatagggccggaaaacggccggaggaatcatggaacacaacaatttacatctgctggaccatccgctggtccagcacaagatggcttttttgcgggacaagaacaccggtgtcaaggagttccgcacattgatcggggaagtgtccactctgctctgtctggaagccacccgggatctgcctttgcgcccggcgcaggtggaaactcccatagggaaggccgatgtgcagacgctggccgggcggaagctggccatcgtccccattctgcgggcggggctgggcatggtggacggcattttgcagctggttcccgcagccaaaaccgggcacatcggcctggagcgggatcacgataccctgaaaccccaggagtattactgcaagctgccttcggatatctctcagcgggatgtgctgctgctggaccccatgctggccaccggcggcagtgcttcggcggccatccagctgctgaaagagaagggagtacggcgcctgagctttgtgtgcgtggtggccgctccggaaggggtggagcgcatcacacgggagcatcccgagattcccatttactgcgccgccttggatcaggggctcaatgagaatggttacatcgtccccggtctgggagatgcgggagaccggatcttcggcaccgaataaagggcacaaaaaagggaggagacctcaggtctcctcctggaaatgggaaaatctgttaccgtctgccgtgtcccgaagaatagcggctgcgggcacgccttctgcggcgggcgcggcgccgtttggtggacacaaagaccagaagtagaatcagcaggatcagtaccaccagaatgatgcggaacaacggacttttgaagaattcctgcacctggaagagggcatagagcacatcggaacgctcgatgtcctccgaggccaccagatcgatggtgccatactcggtatcgccgatgaacaccttggccgtgcccagcttttctccctttttgatgggagcatcggcggtggacaccgcgtccacttcgtaggtcacctggctcaggtcggtgtcattgtgaagcaaaagttcgctgtcggcagaagccaccagcttggtgtgttccttgccggcggcaaagcgcacaggcacttcctgaatgggagtatcggctgaggtgatggtttggagggagaaattcttcttggcgtaatccagcagcttgatggtctcggtgtagcagccgatgtcgccggtctccgggtccttttcaccgcccagcaccacagtgatgtaatccagctcgccgctctgagcgccgccgatgaggcagtagccggcgggagtggtggtaccggtcttgatgccataggcccctttgtagaagtaccggccatccttcagacgggagatcaggtggttggtggtggtgatggtggtctcattttcgtgcatattggtgggctggagcttatactgggtcttgcccacaatctcccgcagttcgggaattttcatggcggcctgggcgatgatgcccagatcccgggcggaagtgtagtggttttcgtcatggagaccgctggggtttgcaaagtgggtgttctggcatcccagctcctcagccttctcattcatcagctcggcaaaagcgctgttggatgagctgatgtgttcggccagagcattggcggcgtcgttgcccgaggcgatgagaagatagtggagcatatccataaactccatctgctctcctgctttgaggaagacgctgctgccctgttccgccagaccgtccaccgcctgctgggacaccgagatcatatcgccgggggaacagtgttcccaggccaccagggcggtcatcagtttggtggtgctggccgggtagagcttgtcgtctgcgtgatattcataaaggacttggccggtggtggtttccaccaggaaagccgctttggcattgatggtaaggtccggttcttctgtcaccggtgcggcttgggccgacaccgcgaagatcatgataagcgcgaggaaaagcgctgtcagctgttttggtttcatatccatcctcctgcacaatcaaaatatccgctccccgatttttggggatacgaatgctattgtatcaaaagagcggctgcaatgcaacgatcagggtggatttttaagaaaatggagagaactacataccagagtgagcaactatgaaaaagagggcgttggatcttctgatggccgcctgtctccttgtttgcctgggatttctgggcggaagaatgagcgtgatgctggaaggccccaccttgtctctgtcccagggagcgcagcttgtgcgtttgccggagctggcgctggaaacataccaggtggaggaaaatgatgagacgcccggggaactccgggtcaacatcaatgaggccggggaagaggagctttgccagcttccccagatcgggccggccagagccaagaatatcctggaataccgggagaaacacgggccgtttgcatccatcgaagaaattcgggcagtcagcggcattggcgatgggatctttcagcagatcagggagcatatcaccgtggactgaaggtctgcggagacaattttgacggaggggaacatatgcgagtattagtggtagacgacgaaaaattgctggtcaaaggcatcaaattcaatttggaaaacgacggatatcaggtggataccgcctatgatggggcgcaggctctgtccatggtcaaggaacagaagtatgacatcatcattttggacctgatgctgcccgaggtcaacgggctggaggtctgccggaagatccgggaaaactccaatgtgccggtgattatgctcaccgccaaaagcgaaggggtggataagctcatcggctttgaatacggggccgatgactatgtgaccaagccctttgacattctggagctgaaagcccgcatccgggccattctccgccgggccggcagccagccggctgccgatctccaggacgatcagatcaaagtgggggatcttctcatcgacaccgcccagcgttcggtgttcaaaaacggccgcgccaccgatctcacagccaaagagtttgaccttctggtgatgctggcccggaacccgggccgggtgttcagccgggaaggattgctcagcgtggtgtggggcgaagattaccccggagacatccgcacggtggatgtgcatgtccgccgcctgagagaaaaattggaaacagatgacgccaatcccgaatacattctgaccaagtggggggtcggttactatttcaagcccaacagcagcgctcaagctgattaaaacccttcgcttccgcatcgctttttccatgctgatcacggtggtcacattgcttttggtgctgaatttttatccggcccaggcggtgcgcaagctgattatcagttccaaggaaaccgaacttttggagcgggccagaaccttttcggccactttggaggagttcaccaccctgacccaggagaatatcctggtatcggtgcaggtgctggatctggatgaggaacagcgcattctggtcaccgatggcttcggcagcgtgatttatgacaattccaaagtcagctccctggcggggacttatgcccttctgcccgatatcgtagccgcactggaaggctgcgatatgttccgctgccgttatggggaaacggccttcatttccgatgcggcctccccggtgatgaaaggggacaaggccatcggcgccgtttatatctatgactatgacaccgagcaggcggccttcctcaacagcacccgcagcaacattttccgtatttccctggtgctggccgtggtaggagcggcggctctgggcttcctcatggtctatttcggaaaaagagtgggacagctggtgcggggcattcagtccatgagcgccggcaattacgattcccgcatccatcttcagggccaggacgagctgtctcaggtggccgatgaattcaacgagctggccgaccgcctgcaaaaaaccgaagagctgcgccgggaatttgtctccaacgcatcccatgagctcaagacgccactggcttccatcaagctgctgtccgattccattttgcagaccaaggacatccccagagagtcggtgaacgagttcctcaccgatatcaacgaggaaatcgatcgtctgacccggatcaccgaacggcttttgcagctgaccaagctggattatgtgtcctccaatcagatgcagccctgtgacttaaacggccttgtgaaaaagatcaccgatctgctgaaagaaaacgccgcccatgctcaggtggagctggaaaaccagttggaagaggatctgtgggtgttgtttgaccgggacggcctttatcaggtggtgttcaatttggtggaaaacgccatcaaatacaaccgaaaaggcggaaaagtggtgctgaaaggctggaaagaaacgggggaagaggaccgggtgtgcctgacggtgcaggataccggcatcggcatcccggaagaagagctgcctcatattttcgaacggttttaccgggtggacaaagcccgcagccgggagaagggcggcactggcctgggcctggccattgtggccgactggctgaaaaatgccggaggcgatatccaggtggaaagcacattgggcgagggaaccacattccgggtcacgctgctggcggggccttgtgaggaggtgacgccatgaagcgaaccatgaagcggacagtgtttctgcttttgtgtctgctgatgctgtgtgccgccgcagtggccagctgccatcagcagaaaaaagaagcaggggaaggggagcttcagctccggatctattgcctgcgcatggatggagagaaaaagcagccccggggcctggccgccgaggaagttaccatgcctcagggggagaatatccaggaaacagtggaggatattctgctcaaaatcaagcaggtgagcggcggaggaaaatctgcggccattcccgccggggtgacggtgaacgaagtggccttttatggcaacagcgtcatcgtcagtctgtcttccacctttgatgaattgccggaggtggaaaaaagcctggcggccgctgccattgccttgaccctgacccagctggattccatcgactatgtgaaggtctcctgcgccaccgacagctataacgcttccaacgacttttacctcaacggggacaatgtgattttggacgaaagctccatccagttcaacacctttgacatcacattgtatctggtgaacacccagaccgatcagctggaaaaagtggtgcgcaccctgaaaaccgaagaggatcaggtgtatctcaacggtgtgttcagtgaactggtgcgccagccggaggaggaaaacctccagtcgcccgttccccagggaatgatgctgcggcggctgtcttcggaaaacggcgtgtgtgaactggattttctggagatcggcgccgaaaaggtgaaggagctggacgagttgtccgttcaggccatcgtcaagacgatgtgtgctcaggacggcgttcggggcgtattgctgcgcatcgatggaaaacccttgtccgaatatggtctggaagggtatgacgatgtgctgacttgcgaaaaataaagacacaaacaaaatgccatgggctttcatagcccatggcatttttgcatcttttcctatgttaccgcatttcccggatctgattgatgggggtgatggtttcggaaatggggcggatttcgcagttgttctggcggaaatacgagaccagggaggacagggcctgaacgctggaagggttgctcatcaaggagagcaccacattgcccgaggtgttttccaacagggaaacacaggaggaatagatggcggaagcggagccccagagccgggtgtcaccgctggggtcccacagacggtaaccggcctggatcaaagcgtcccgctcttcctgggagagattctggctgcctcccggtaccatcaaagcccggctgtgggttttggtcaccgcctggatcacatcctgggtgtcctgagcctggcggagaagttcttcggtggattggaaggtggagccgtccccatagagattgttgccgatcacatggccgctggccgcggcccgcagcagataatcactgttttgtccctggctccggggggtgacaaagaaggcagcggtgtaattgttgctgtccagaatgtccagaatctcagcggtgtattcgttcatatccccctggatggccagataaaccactttggcgttgggggtttccggcgtatccggctcgccgctggtactgggaatctccggttcacctggatctgtgggcgtgtcggggtccaccggcgtaggcggtgtcggggtgtccgggtctggatcggtgccctggttgtaggtggcctggtactggtcgtagatgctgcgcatcaccgaaaaacctttgctcaccagatcttcatcggatatgccgctgtcgtcggtgttgatgcggatcaccggccccagcaatgtgctggacagataggaataccggaagccgaaggcgtcgcacaccacacgggccggcacataataggtgccgctatggcgcacggcattggcgggatacacattgccctgctcgtcccgggtgatggcgttggccatgtcgaaggtgagaatgtggttgatgttatagagaaccagctggttgttgacgctgtcatatttgcccatcaggccggggttgggcgcggcggtgaatgtggtatagggaacatagggcaggccgccgatgatggtgggcatggtggaaggggtcaggttccgcaggaaggtgtcgttgatggcggtgaaaatgacgctgggcgcggcccgggtgggcagcggggaaatacaggcgcagaaaaacagcagggaaagcaccaaagcgcaaaaccgttttttcaccgggaaccctccttttttatttctcagcccatttctattcattatatcggaattcttttcggggtgcaaggagggaacgctggaaaaagcagcgcatagactgaagggaggaggtgtgcctttttatgaaaaatcccagtttgatgatatttcgctcggtgacctacgcccagcgggccggaagggtgctggagaaacagggaatcaccacttatatgctgcgcagtcaggccattctgggcggcggttcctgtagctatgcgctaaaggtggagccgaaacagttggaacgctctttggagattttgcgccaatgtcagatcccggtgaacggggtttatgtgctggatcagtgggggcattaccaaaaggcccaataaaacaggaggggaatcggatgatttatttggacagcggcgccaccactttgcagaaaccaaagcaggtgttccgggcggtgcagaaggccatggaatcttgtgccaacccgggacgaagcggtcacaaaccagcccgggaggccgagcgggcggtctattcctgccgggaagaggcagcggaactctttggtttggatcggccggagcgggtggttttcacccagaatgccacccatagtctgaacctggccatcaaaagcctgctccatgaagggggccacgccgtcatcaccggttatgaacacaacagcgtggtgcggcctctggaggccatgaaagggcagggggtctcttataccgccgtgtcctcctgcctgtttgacccggaggacatggcccggcagatggaacgggccatcacggaggagacccggtgcatgatcgtgtgccatgcgtccaatgtgtttggctccatcgctcctttggatgaactggaccggatctgcctgcggcatgggctgcccatgatcgtggacgcttcccagtcggcaggtactttgcccctttcggtgaaaaagtaccccagtgcggcctttttctgtatgccggggcacaaaggcctctatggccctcaggggacaggactgctgatttgctgtgaagatagtcctctttacaccattatggaaggcgggacggggagccggtcgctggaggtgacccagccggattttctgccggacgccttggaaagcggtaccctcaatgtgccggggatcgccgggctttgggaagggctgaaatttataaagcagcagggagagaaggaaattctccggtgggagcaggagctgatcggtaccttggtgcagcgtattcagggccatccctctctgcgggtgttcgccggaggcgaaaaccagggcggggtgctgtcggtggtttttcccattccctcggaggaagcggcggaaaagctggccggccaggggatttgcgtccgggccgggctccactgtgcacccctggcccaccgcaccgcaggaaccctgcccgacggcactgtgcgcctgagcgtttcggctttcaacacaaagcgggagatgctccgggccgccgatgccatggccaaaatgttaacgaattaaaaatgtttcccattttttcttttttgatattgaaaagaagagcgcttattgatagtataataagtaaattatacattgaaaataggtgtttccatggaatttgtcgataatctgacccattttatccgattgcttaccgtggcggacctggtggatatcctgctgatctctgtggtggtctacaaggccctcaagctcatccgtcacaccaatgcggaaaaactggtcaaaggcattgttttattgcttttggccacgctggtctccggcgtcttcaaactgaaagtcatccagtttttgctggatcagctgatgcggatgggccccattgcggtggtggtcatcttccaacccgaactgcggaaaatgctggagcagttcgggcggagcaagctgccctttttgcaccggcccggtgccatgggggatgaaaagactttgcagatcgccattatgcgcatcatggaggccgtctcttccatggcctggtccaaaaccggcgtgctgctggtgttcgagcggggagataacctggaccatatcgtcaaaacaggctctaccatcgacgccgaagtcaacgcggaacttctgaaaaacatcttttataacaaagcgcccctgcacgacggcgccgtcatcatcagccagggccggatcaaggcggcgggctgcctgctgcccctttcggccaatctgaacatcagcaaagagctggggacccgccaccgggctgccgtgggcatgagcgaaaactccgatgccctgtgcgtggtggtttccgaggaaaccggctccatctccctggccgagggcggcatgctcaaacggcatctggcggtggagaccctggagcggctgctcatcaacggcctgatgcccgccgatgaggaaaagacctcttcgggcaacctgtttgcaaagctcagggggaagaaaaaatgatggaatggattcgaaaacacgatattctcacccgggtgctttcggtgctggtggccatgatgctttggctctatgtggtggaaaacaacgatgaggacaccaccaagacctatcgggacatcggcatccagatccagggtctggatactttgcgggaaaacggcatgacgatcatcaatggcgccgataccacggtggatgtgacggtgattggcaaatgggatgccctgctcaatgtgcggcaggataaattcctgatcacagtggatgtgtccaacatcacagctcccggtgtatatgagcttcagtacaccgtggccaccaatgtggacggggcccgggtggcggacaaaaacccccgtctgattaccctgaccatcgaccggatcatcaataagagcgttccggtggatctggaggtcaccggctcggtgcccgatgggtatctgctggatgacaactatgtggtttctcccacggcggtggaggtccaggggccggaaagccagctgcagagcatcgaaacggcctatgctaccgtggatgtcagcgatctgaagcagacctctaccatgaaggtttcctacactctgctggatgctcagggccagtcggtggacatgagccgcatcacagtggaagaggcggcggtgagcgtcaccatccaggtgcacaaagcgggcgtggtgcccttggtgctggatgtgaccggtattcctggtctgccggacagcgccgtcacctataccattgacccggccaatgtggagatcaagggaacaccggagacattggccaccatcaacagcatcaatctgggcagcgtcagcctggccgctttgctggcccagggtcagactgaggtgactttgcccatcatccttcccaatggcgtcacatcggagaatgctccggcggaagccacggtcacctttgacttcagccatctggaggagaagaccctccagatcccggtggagcagttcaccgctgtggaggggtatgaatttgtgacccagtccctggaagtgcggctgctgggtgtggagcaggccgtgagtgcactgaccacccaggatgtgacagtcaccttcgatcctgcggagttgggtgagctggccgaaggcgaacaggccacagttacggcagtggtcacctgcggtgccgatgatgtggtggtgctgggcaaatatgagctgacggtgacgccggctgtagtggaagtggtaccagaagaatgagtttgattgtttcaggcatccgcctgccctttgagcaggcggatgcatccgcgctggagcaggcgcgccggcagtgcggtctgggcaaaaaccaggtgaccgccagccggatctataaaaaatccctggatctgcgccatgggaaattgaccaaggtcttttctgttttgctggatacccccctggaagagcgggtcttgcagcaaaagggagaagggcctatccggaaaaaagcggcgcctttgcagctttctcccgggggagaaaagaagatggcccatccgccggtggtggtaggactggggcctgccgggctgtttgctgctttgattctggctgagcagggctaccggcctttggtgctggagcagggcgcgcccctcccggagcgggatcgggtgataaaagctttccagggcggcggccctttgcatgaaaagatcaatatccagtttggcgaaggcggggcgggggcttattccgacggaaagctcaccacccgtatccatgatcctcggtgcgaactggtgctggagcagctgttgcgccatggcgcgccgccggagaccgctctggccgccaagccccacatcggcaccgatcttctcaaaggagtggtcacctccatccgccagcgcatccagcagctgggaggacaggtggagtttcactgtactgtcaccggttttcgccgggaaggggacaggctgaaggctattgttaccgacaaaggggagatcccctgtgaggtggcggtgctggccgtgggccacagcgcccggcctttgttccgcactttggcggatgagggatttgccctgatgcggaaagccttttccgtgggggtgcgtgcagagcatcttcaggagaccatcgaccggggccgctatggggcctatgccggaaaagcagaactgcccccggcggaatacaacctgtcctggcggcagggagaacgggcctgttattccttttgtatgtgcccgggaggacaggtggtggcggcggccagcgagcaagggggcgttgtcaccaacggcatgagttatcacgcccgggatgggcgcaatgccaacgccgctctggcggtgtcggtgctgccggaggaccttcccggaagcgatcctttggaaggggttcggttccagcggcagctggagcaaaaagccttccagatagcaggaaacaattttgcagccccagtgcagacctacggagatctgcgggaaggccgggtgtccagccggttcggacgggtacagcccacctatgaccgggggacggaatttgccgatctgcggcaggtgctgcccccctttgtgtgggagatgctgctgggggccatgcctcggtttggccgtcaggtgcccgggtttgacggagaggacaccctgtttaccggagtggagaccagaacatcctcgccggtacgcattctgcggggagaggatctgtttgctccgggttgccaggggctcattccctgcggggaaggggctggctacgccggcgggatcatgagcgccgccgtggacggcatccgggcggcggagcggattttggaagaataccgtcctttggaggagtgagaatatggaacagacaggaagagtggtgggcattttgccgggtggccgggctcaggtggagatccagcgccgggccgcctgcgcctccgactgtgagaaatgcggcggctgttcccatccggagcagaccatgctggtggaggctcccaacggctgcggcgccaaggtgggggaaaaagtggtgatcgaagcccatacggccagcatcttgtccattgcggccctggtatatctcatgccggtgcttctgatgatcgcctgctattttgtgccggtgcccggaggggaaggagtgcggattttgtgctccctggcgggactggccatcggcaccgccctttgtatgctttattcccggcggatgaagaaaaatcgccgggtgctgtttgagatccgtcctcttcaccggggctgattgccaaaacaggcgggatgtgctataatcaatgagttaccttggaaacaagggggaatagaaaatgatcaagagcatgaccggctacggccggcaaaaaggagagaacgaacggcgggaagtccaggtggagatcaaatcggtaaatcaccggtatctggacctgaatgtgaaggtgcctcgcatctattctttcctggaagaacccatcaaaacggcggtgagtgctgccgtggcccggggtaaagtggatatttatctatccatcgccgccaaggaaggcggggatgtgaaggtatcgcccaacctggctctggccggggaatatctgcgggctttatggcaggtgcgggacacctactctctgaaagacgatatctcggtgatggaattggcccatatgcccgatcttctcaccgtggcccgggaagagccggacgctgaagaagtgaaagcccaggtgctggaagttctggggcgggctttggaagagtacaacgccatgcggcgcaccgagggcgagcgcctttgtgaggatattgcccgccggggtcaggagatcggcaaaatggtggatcaggtggaacagcgttccccgcaatcggtggaggagtaccgccagaagatcgcccagcggatgaccgagatcctgggcgacagcgacattgccgaacagcgcatcctggccgaagcggccctttttgccgacaaggtgtcggtgaccgaggaagtggtgcgtctgcgcagccatctttcccagctccaaaagatggtgcagggagacgctccggtgggccggaagctggatttcctggtgcaggaactgaaccgggaggccaataccatcggttccaaggccaacgactacgagctggcccagatcgtcatcgagatcaaagcagagatcgaaaagatccgggaacagatccagaacctggagtgagcagctatgaaactgatcaacatcggctttggaaatatggtctccgccagccgtctggtggccatcgtcagcccggaatcggcgcccatcaagcgggtcatccaaaatgccaaagagaagaatatgctcatcgacgccacctacggccggcgcacccgggcggtgcttatcaccgattccgagcatgtgattttgtcgcccttgcagccggagaccgtggccaaccgcttgggcaatctggactatgacgaggatgaaggggaagaggaagatgagtaaaggcaatctgtttatcgtcaccggcccttccggtgccggaaaaggcaccgtgctgggacggcttttgcccaccatggagcagctgcaatattccgtttcggccacaacccgcgctccccgggaaggggaagaggacggggtcaactattatttcctgaatcggaatgattttctcaatatggtggaccggggcgagtttctggaatatgccgagtatgtgggcaatttctatggcacccccgcaggcccggtggacgaatgtctggaaaagggtgtggatgtgatactggagatcgaggtccagggtgcgctgacagtgaaaagcaagcggcccgaggccaaactggtctttatcatccctcccacttttgccgacctggagctgcggctgcgctcccggggcagtgaaagcgatgaagtcatcgcaaaacggctggaaaaggccaaggaagaatattccatggcgaaccactatgattatatcgtgtgcaatggggaagtggagcaggcagtggaagagctgcgctccatcatcaaagcggcccggtgcaccgtggatcgccgaatcaatttgctgaggtgaatgagttatgatgctggaacctaccatgagcgatctgctcaagacgatttccaaccggtatttgctggtgaacattgccgcaaagcgggcccgggacattgccgacgccgctgagatggcggaggagcctctggaggacaagccggtgaagctggccctttatgatatcatcaatcatcggatccgtccggtgctccatcctgtggaggagaccggggccggaaacgacgaggccaaagccatgttgtctgctctggagcagtcggagcaggaagagcaggagacggggctggacatggaaacggaaaacgaggaagagtaaggatttgcagatgaggggttgtcttggcgcggccgggaaaaggcggggaatgtttccgcctgtctccctgcgccggggcggccccttttgccggtgagggatggtatgtatctgattgcaaaggtggcggtggccggggcggtcatctccatcgacaaagcctatgattatctggtgccgccctctctggaggaagaagcccaaaggggaaggcgggtcaccgctccctttggccggggcaatcagctgaccgacggctttattctggaaacagagcaaagggaggaaaagccccggggcgtcaaggccctggcccacatcttcggcccggaagcggcgctggatgaggaggggctgtccctggcgggaaccttgcgccgccggtatttctgcaccttttttgaagcggccaatctgatgatgcctccaggcatctggtcccgccggacctattaccggctggctcccggactgacggtggaagaggcctgcgcccggtgggaaaatgactgggacgcccaggctgtctgccagaccctgggagacaagggagaggccgtggcggaagaggtattgaaaaaaagcctgtcggccacggcgctgaaaagggtgtgcaaagcccttttgcaggatcataccatggaaaagacggtgcgctttgacggcggcccccgggatcagaccatccgcattctgcgtctggccatgcctctttcccaggcggtggctgcactgcgccggggcaagggctatgagaagcgggtggaggccctggagtgcatcgcaggctttcagggcataccggaaaaagaggtgtgctatctcaccggcattccccagagcgctttgcggcgcatggaacaaaatggccttttgtcctgtcagatggaagagactttccgccgggtgacggtctcccaaggagaggaagcaacccctttgtgtttggagccggagcagcaaaaggtctgcgagggcatccaggccatgggcttgcagcagcctggggccgcgttgctccagggagtcaccggcagcggcaagacccaggtgtatatcaagctgatccagtgggcactggagcaggggcgcaccgccatggtgctggtgccggaaatctccctgacccctcagctgcttcgccggttctgtgcttatttcaaagaggatgtggcggtgttccacagcggcctgacaccaggacagcgctatgacgaatacaaacgggtgaaaaccggcaaggcccgggtggttctgggcacccgcagcgccgtgttcgcccctctggatcacatcggcctgattattctggacgaagaacaggaatggacctataaatccgatgtgacgccccggtaccacgcccgggaagtggccaaataccggtgcgttcaccacaaagccctgcttctgctgggcagcgccaccccggccatggaaagccggtttctggcggaagaggggaaataccggtttttccgcctggatcaccggtaccggaatacccctttgccccgggtgatcgtggacgatctgcggcagcagctgcgggaaggggagccggatatcatcggaagggctttgcagcaggaactggagcacaatctccagaaaggagagcaaagcgtcttttttctcaatcgccggggcaatagccgcctggtcacctgcgtcagctgtggctatatcccccagtgcgaaaactgctcggtggccctgatctatcattccaaaaacggccggctcatgtgccatcactgcggctattcccagcccatgccggaaaaatgcccccagtgcggggaagagcatctgcggctggtgggcttcggcacccagaaggtgcagcaggagctggaaagcaaatttcccggcatccagatcattcgcatggacgccgacaccacggtgcagcgcacttcacacgaaaaattgctagacgcctttggccggggagaagcccaggtgctgctggggacccagatgatcgccaaagggctggattttgacaatgtgaccctggtaggggtgctggacgccgatctgtctttgtacagcggagactaccgggcgggagaacgcaccttttccctgctcacccaggtcattggccgggcgggaaggcgggagcgggaaggccgggcggtgatccagacctatacgccgaagaatccggtgattttagcggcggccgcccaggattacgacagtttttatgactatgagatcaatgtgcgtcaggcgctgctggcgccgcccttcgcccatgtgatctcctttcttctcagcggggaaaatcaggagcggacccttcgttcggctcagcgcctggccgccacattggaagggtgcttttgggggccttatgccgccttgcgtgctccggtgctggggcctgcaccgccggccattcaggtgctgggccgaaagtaccgttatcaggtgtccttccggggaaaggatgacgccgtgacccgacgcctggtgatggatcttctccgagccttttatggggattcagccaatcggggtattaccctggtggccgacatcgatccctattccttataaatcgaaaacatccattttaatcacgaaggagttttgaaaatggcaattcgtaccattgtcactgagggggacagctgcctgacgaaggtgtgccgtcctgtcaccgatttcaacgaccgtctccatatgctgctggacgatatgcgggacaccctggaaaaggccgagggagccggtctggccgcacctcaggtgggtattctccgccgggccgctttgatcatggacggccaggggggctatatcgagctgatcaacccggtgatcacctgggaagagggaagccaggatggccccgagggctgcctcagcgttcctggccgctacggtatggtggagcggccccaaaaggtcaccgttcgcttccaggacagaaacggcaaggatcaggagattcatctggaggacttcctggcccgggccgcctgccacgagatcgaccatctggatggtttgctgtacacccgcctggtgacaaaatatctgaaccctgaggattttgaatgatgcgtattgtttatatgggaacgccggaatttgccgtggcccccttggaagggctgctggaaatgggggaaactgtggtgggggtctttacccagcaggacaaaccccagggccggggcatgaaaatggcgccgccgccggtgaaaaaggcggcgctggagcatgatcttccggtgtttcagcctcagagcttcaaaacggaggaagcattccagcagctgaaagacctggagcccgatctggtggtggtgacggcctatgggcagatcttgcccaagcgggtgctggagctgccccggtacggctgtgtcaatgttcacgcttctctgctccctgattaccggggggccagccccattcagcaggtgattttgcggggagagaccaaaaccggcgtgaccatcatgcagatggaccggggattggataccggggatattttgctcatgcaggagattcccatcgagccccgggaaacggcggacagcctccacgacaaactggctgtgctgggcaaagagactttgtgcctctttatggaaaagctgaaaaaaggggagatcactccggagcctcagcccaaagaatgccggttttatgcgccgctgatcaaaaagcaggacgggcagatccattttaccgaaagtgctgtgacaatcgaccggatggcccggggcctgacgccctggccgggaattttcaccactttccaggggaagactatcaaattgttcggaattcatgtgaaagaggggtctggcggtgagccgggagccatcctggattgctcgccggaaggactgacggtggcctgtcccgatggacaggtggtcatcgcccagcttcaggcccccgggggaaagagaatggcctgtgttgactatttcagagggcatccgtataataaggacgaccgtttcgaatagcagaaaggacgatcttcatgttttttgattattactatctggtcctggtcatgcctgccattttgttcgctttgtgggcccaggcccaggtgagcggaacatttgcaaagttttccaaagtgcgtaccatgcggggccttactggtgcccaggcggcagaagccgttttgcgggccgggggcgtttacgatgtgcgcattgagcgcatttccggcaacctcaccgaccacttcgatccccgggccaaggtgattcgcctgtccgattcggtgtatgacagccccagtgtggcggccgtgggcgttgcggcccacgaagcgggccacgccgtacagcacgctcaggattatttccccatcaaggtgcgttcggccatcatcccggtgacccagatcggctcttctctggctttgcctttgatcatcatcggcctgctgctttccagcctgaatctggtttatctgggcatcgcctttttcggtctgtccaccgtgttccaggcagtgactctgccggtggagtttgacgcttcccgccgggccatcgccacgctgggagaagagggacttttgtctccggaagagctgcctggggccaaaaagaccctgcgggccgctgctctcacctatgtggcagcgctggccgtctccctggcccaactgcttcggctgctgctggtctttggcggccgccgggacgactgatggccgtttcggcccgctccgccgctttggaagggctgaaagcctggcggctgcgggggacctggcccgatcagtttgtgaaaaaagagctgcccgccctgggcctttctccaaaggacaagggcctttcggtgcagctgttatatggcaccatccagaatttgcagcgcattgatttttatattggctgttattcctcggtgaaactgcgcaagattatgcctcaggtgctggactgcctgcggctgggggtctatcagctggtgttcctccagaagatccccgtcagcgccgcggtgaacgagtcggtgaacctggccaagaaggccgggggcgcacgggcgggcggctttgccaacgccattttgcggaaggtggcttcccagcgggaaaacttgccggaagtgaccggggaggacgccccgtcccgcatggcggtctattactcccatcctctgtggtttgtccggcggatggttgctcttttgggagaagaggagacctggaagcttctggaagccgacaatatgccgccgcctgtgaccgcccgggtcaaccggcttcgtctgacgggagaagaactgatcgcccgattggcggaggaaggggtcacggcccggcttcatccctggttgcccgactgcatcgtttttgaaacagggggcgatctgacgagcacccactgttttgcagaggggctgtttaccatccaggacgccgccagtcagcttccgccctgggcgctggacatccggccgggggagaatgtggtggatgtgtgcgccgcccccggcggtaaaaccctcatcgccgggcagatgcagcaggggcaggggaggctcattgccatggatcttcaccccttcaaatgccgccagctggaggagaccggaaaacgcatggggctttctcagctctctgtgcgctcctgggattccaccacggccgcttccgatcttctggcccaggcggataaagtgatctgcgatgtgccctgttcaggcctgggtattttgcggaaaaaggccgatatccgcttcaaaaaaaaggaagagctttcggatctgccccagatccaggggaagatcctgaaggccgccgcctcttattgccgccctggcggaaagctggtctattccacctgcaccattctgccggaggaaaaccagcaggtggtggaggcctttttgaagcagaacaaggcgttttccctttgtcctctggtgctgcccggggacatgggagcggaagagggataccgcaccttctatccccacaaagatggcaccgacgggttctttatcgcctgtctgcgccggaatcaggagtcctgatatggagaaagtttgcatcaaatccatgctgcccgggcagttgcaggaatacatggtttccctgggagagccttcctaccgggggaagcaggtctttcgctggctgacccagggggtcacttcctttgacgaaatgagcgacctgtccaagtctctgcgggaaaagctgaaggagaaggcttttatcacaaagccggagattgtccggaagcaggtttccgcccgggacggcacggtgaaatacttattcggccttgcagacggcaactgcgtggaaacggtggtcatgcgttaccagcatggcaatagcgtctgcctttccacccaggccgggtgtcatatgggctgcgccttctgcgcttcctttgaaaaaggagagacccgggatctgaccccggcggagatactggatcaggtgctgtttgcccaaaaggacagcggactgaaaatttccaacatcgtgctcatgggcaccggggagccgctggacaactacgacaatgtggtgcagtttctccgtctggtcagctgtccggaggggcttaatatcggcatgcgccacatttccctttccacctgtgggctggtgcctcggatccgggagctctctcagctggatttccagctgacgctgtccatctcccttcatgcgcccaacaacaagatccgcagcaccatcatgccggtgaacaacaaatacccggtggaggaactgatccgggcctgccgggattacttcgccgccaccgggcggcgcatctcctttgaatatgctatgattgccggggtcaatgacagcgacgggtgcgccagagagctggccgcccttttacgggggctgatgtgccacatcaacctgatccccctcaatcatgtggagggaagccctctggccccctccagccgggagaccatccggcgttttcaggagatcttgcagaagaagggtttcaatgtgacggtgcgccgcagtctgggcggggatattgacgcatcctgcggccagctccggcgcaaggccatggcggaaaagaggaatcaaaacaaatgaaattttggggaaattccgatacgggaatggtgcgcagcgaaaatcaggatacttacctgatggcctctttgccccggggagccgagcttttgctggtgtgtgacggcatgggcggcgctcagggaggaaaagtggccagcaccattgcctgccgcgcctttgaagaagaagcacgccgcctcctccagaaggaagagggggaacagcctccgctttccgatgtggtcaccggggcggcccaggcggccaaccgggcggtgtacgaaagcgcccggcaggatgcccatctcatgggaatgggcaccacgctggtgtgcttgctcaccgacggcaaacaggcggtggtgggcaatatcggcgacagccgggcctatctcatcgatggggacggtctgcgtcaggtgactagcgaccattctcttgtggctgagatggtacggcggggagagctgtctcccggcgaggcccggcaccatcccaacaaaaatgtgatcacccgggctttgggtgtggagcagtcggtgagctgtgatgtgttccccctgacaccggggaaaggccagtttgtgctgctttgttccgacggcttgaccaatgaggtcagcgaaccggagatctattatgaagtgttccagtcccaggagccggaaaaggcctgcgacaccctgatcgacatcgccaaggatcggggcggacgggacaatatcactgttttgctggcatcattctaggaggagtgtacggtggataaatatatcggcaaaatgctcgataaccgctatgagattctggaggttatcgggcgcggcggcatggccgttgtatacaaggcaaagtgccacagactcaaccggtttgtggcggtgaagatcctcaaggaggagttggcccaggacgaagagttccgccggcgcttccgggatgaatcccaggcggtagctatgctgtcccatcccaacatcgtatcggtgtacgatgtgtcccgcacagggggtgtggagtacatcgtcatggagctgatcgacggcatcaccctgaaggattacatggagcggaaaagccctctgggatggaaggaaacggttttctttgccctccagatcgcaaaggcgctggagcacgcccatggccggggcatcattcatagggatatcaagccccagaacatcatggtgctgcgggacggcacggtgaaggtggccgatttcggcatcgcccgccaggccgccagcaacaatacttacaatatgcgggaggccattggttcggtttattatgtgtctcccgagcaggcccggggcggccacatcgacaaccgctcggatatttactccctgggcgttgtcatgtatgaaatgctcaccgggcgtctgccctttgagggagacacccctctggcggtggctttgcagcacatcaattcggtgcccctgccgcccagagatcatgtgcccgacattcccaagacactggaagacattgtgatgaaggccatggcgcctcagccggccgaccgctaccgcagcgccacggacatgatccgggatatggagaatttccgggatgatccccattacaagatcgatgtggccgcagttcacccggtgagtgctgcccgatcccgggatccggaagagacccaggtgattcagtattcttcggaactccaggctgcggctcagcgcaagaatgcccagcgtctgaaaacggcagcggccccggtggaagaggatgacgaggaggaagaagaggaagagcggggcaaacgacggatttccagctctctgatcttcaccattctggccattgctatttttgccattggcgcaggattctttatctttgccgtcatcaacccctttggcagcgataaaaagaccgagaccgaaaccactttgaaagcccccagcctggtgggcaaggtctatcaggatgtgattgccgatccggagatcacagagcagggaatcatcatcaaagaaaagacccggatttatgacaaagatgccaaagaaggggagatcctcagccaggaccccgaagccggggaagctctgagcgaggacaaagtgatttatgtagaggtgtgcaagggcgcaccggctatggaaatggtagatgtggtggggcagacttcccgccaggccgaattggatatcaagaatgccgccaccaaagcgggcatcaccatcactgtgcagacccaggaggagtactccgacgatgacgccgaagataccgtcatccgcacggcgcccgaaaagggagaagagctgagcgacggggatgtggtgaccctgtatgtgagcatggggccggaaattcctcagaaaaagacgcctaatttcctccagtggaacatcaacgatgtgacccgcagcgaggtggagaaatacggtctgactatgggctccaccaccgaagtggagagcagccagccggcgggaaccattgtgggccagtcccccgagccgggcgacatggtggatgaaaacacaccgctggatttcgaagtgagcaaagggccccagcagaaggaagtgaccatcactcaggtgatcactctggtgcccagtgaagacgatcccacagcccccatccgtgtggtggtggaagtggacggcgaagtggcttatgaaaaggaacacgatccttccgaaggcacagtgagcgtgcggctcaaggcactggaaggggatcacgaggtacacattatggaaaatggccagaccatttcccgggaaacggtgaccttccaatgagcaatcaagtggaaggggtgatcctcaaggggatcggcggcttttactatgtccacaccggccgacggcagatcgagtgcaaggccggagggcggcttcgcctcaaccgccgggaaaaaccggcggtgggcgaccgggtgatggtggaagagcggggggaagaagggctgattacccagatcctgccccggaaaaacttcctccagcgtccgcccattgccaacatcgatcagttgttcattgtggccagccaggccagcccggtgacagacccttacctcatcgataaggtgagcgtcatcgctctgcgccaggggattcagcctattctggtgctgaacaagcaggatgtggacccgagccgggattttcgcgcgatttatgaaaaagccggttttcccgtgctctccaccagcgccgagaccggcgaaggggtagagcagctgcggcagatgctgcggggaaaagtgtcggccttcaccggcaactcgggcatcggcaaatccagcctgctcaaccgcctggaagagggcgtgctgatggagaccggctccatcagccgcatcagccggggtcggcacaccacccgccgggtggagctgttcttcgtggccgaagggtatctggccgatacccccggcttttcctcctttgatatctcccggatggagcatatccccaaggaggaactggagcagtatttccccgagtttgaaccctttctgggccagtgccgtttttccggctgcgcccattgcaaagagccggactgtgccgtggaccaaggggcccgggaaggggccattgctccctcccggctggaaagctaccggaagctctatgaggagatggcccaatggaaagagtgggaaaacaaatgaactgggcctttgtcattgccgcttctcccgaagaggagatcggctatatccgatcggcctatgacgctttgccgtctcccctggtgctttgcgccgatgggggactgcaaaaggcggaaaaactgggtatcccctgtgatatcctcatcggtgatatggattccggcgggggagacggggcaaaagatgtggtgcgccttcctatggaaaaggatttcaccgacacccagagctgcctggaggaagcggtacggcggggatgcagccatgtgctcatcaccggcgccaccggcgggcgactggatcatttgctctgtaaccttcatttgctggaggccctggagaaaaaaggggtgcatgggctgattgcagaccgggataacctggtgcagcttctggaaagcggcccggtgcaggtaccgccttgttaccggtacttttccattcttcccatcgatgagcagctgcggggagtcaccattgagggagctaagtatcttctccaggatgctgtggtccagcgggacgactctctcactgtgagcaatgaagctccttcgggggaagtgaccatccaggtgaaagaaggccgggccttcctgatcttttcccgatagcggtttgccgcctgataccatactgatttctgtaagggcagcgcctgatggcgctgcccttttgttatgaaaaaatcaagatcccatcacaaaaagatgccggggccaatatactggtagtacagagtattggagtgttgcacatgagaccttgctgtaacagacggggatgcctgccctgcctggctgcgctggtggccggcattttgttggcgatgcttctgccgccctggctgtgctttgtcatcatcatggccgtccttgtctgcctgtgcctgctttgacgctggattgggaggtgtgttgggtgaagatcatggtggtgaaggccccgaaaatgttccgcggcctgctgcggaaggtgttcggcatcggcggcgaagaatgaagcaaaaaagggggccgtttcggaaaaaattccgaagcggcccttttgtcatatctttcgggacgagggcgtatagatgcaatgatcaaaattcgggaaagaagggttacaatggaactgatcaaaagccgcgccctccaatatgcaacggtatcccgcgcgtccaccagccacgaagagtccctggatgccatcgtgccggatacattccccgatatagagaccatctgctgtgctctgggttcgctggagatccgggaaaagctggtgcagaccgatcgggtgatggtgtcggggaacatccgggggaccttggtctataaaggggagcagggcgggccgctgtgcgcattggactgcaccattccctttgccgccttggtggaggccagagggtgtaaggggcaggatctggtgtttgtcaaaggctccctccaccggctggaggggcggatgctcaacccccggaaattcactttgcgggcccagttcggactggagacccaggtgtgcgcccccaaagagtatgaggtgtgccagggaatccggggcggggaagaagaggggatgcaggctttgacccagactttctcctttgagtccgccctctccatgaaggaaaaaggattttccctccacgaagatgtgcgccagaaaagcccggaaggatcgacgggagacaaagtgctgcgcacctttggcaaactggtcaccgaggacatccgggtaatctcgggaaaggtaatgctccgaggcagcgcccagggggaggccctgctgctgcgccagagcaccggggccatggaaaaggagagcttttccattccctattcccagatcgtggagctggaaggggcggaggaaggggataccgctcaggtggaatacagtgtgaagaactgcgcctgcaatttgtcctccgacgaggaaggccccttcctttcctgggatatcgccgccgatgtgatggtgtccattcaccggccggtgcagtatgaagtgctgatggatgctttttccaccaaagggggatgcaccttgcagcaggagccgctggatctgcctctggcccggtgcgagagagaggcttccgccgaaatgcgggccactctttcgcctcccgagcaggccgacgcactgctggattggtcggccagcgtgaaaagctgcggggccattggcaaagaaggggtggctcacggagaagtgtgcgtcaatctgctgtgcatgacaggggatggccagcccatgcagtatgaccaggtggtttcctgggagggacattttccgcccatggaaggggaggactgcctgtgccagtgtgatatttccggtctgagcctgaagtgggccgacggtgcatgccagctcacggggccggtagccttccatctcaccggccagagcggaaagccggtgcgtcaggtggtggattgccagatggacgaaaacgctccggcgccggcacgccccaaggcttccctcattcttcgccgggccgagggcggggaaaccgtgtggcttctggccaaaagcttccgcacatccccgggggatattatggcggcaaaccatctggaaacgggcggcgctctggaaaagggccagctggtgatgatcccctttcagcgctgagagacaaacatccgcagggaggaatagcagtggaaaagagcagcatttatgaggatatcgcccttcgcaccgaaggggatatctatatcggcgtggtggggccggtgcgcacaggcaagtccaccttcatcaaaagcttcatggagaccatggttctgccccgcatcgacaatgtgtatctgcgggaacgggccaaagacgagctgccccaaagcggcagcggccgcaccattatgacggcggagcccaagttcgtccccgaggacgccgtggacatcgccctggacgaaaacacccatttcaatgtgcggatgatcgactgtgtggggtatatgatcgacggggccctgggccaactggaaggagacgctccccggatggtttccaccccctggttcgatcacgaagtctccctgcgggaagcggcggagaccggcacccggaaggtcatcaccgaacactccaccatcggcattgtggtcaccaccgacgggaccatttccgatctgccccgggaggaatacatccaggcggaagagcgggtggtggaagagctgaaggagctg

SEQ ID NO: 2114 - DNA, 17109 bp, Unknown
  16S sequences of unknown bacteria
gtcataccaaggctttttcgccatgagtgcccgctgtggcaacaaaatggcaacattttaagattatccaagaataaagagctatctgatttctgttagagaagtcagatagctcttttttgttttctgtattttttatgttgcctaccttgcaaaaatacttcccgcgatggggcatatgaatgcctttctcaaagcttgtgcgctttcatggaggtgaaatcttttctgcccccaaaaccgatacagcggtgagcggccaaaagagaagcggaaaatctcccggttctttacttttagggggaattatggtataatccgaagggaaaactgccctcaaggaaaggaacgcgaccatgaaacagaaccggaaagtccccaagcctccccgcgatctgcgtgcggtgatccacaaaaagcccactgtttttgcggtgtatctcatcctgcgtattgtcgtcttattgacccttgtttcctccattatccgcggggagtacgaaaacgcctttgtgtgcctgctggtgctgtttttatttatgctgccgctttttatccagcagaactttggcatagagctgcccagcacgctggagatcatcatcctgctgtttatcttcgcttcggagatcctgggggaactggggtgcttctttattacctaccccaactgggattctattctgcacaccaccaccggctttttatgcgcggccacaggctttgcgcttattgatattctgaaccgcaacagcaagatcaagtttgagctttcgccggtgtatgtttcgctggtggctttctgcttttccatgaccatcggtgtgctgtgggagttctttgagttcggcatggaccggctgttcctaatggatatgcagaaggataccattatccacagcatcacctccgtgatgctggaccccaccaatatgaacatcccggtgaccattggggatatcactagtgtggcggtaaacgggcaggagctgggctttggcgggtacctggatatcgggctgtacgataccatggaggacctgtttgtcaatttcatcggggcgctggtctttagctttatcggatatttttacatcaagcgccgcggggagggcaagatcgccaaggcgtttatccccaccattaccgagacaaaacaggaggaagggcctgctgaagtaccggctacgcccacgacggaagaataaaggaaggcttactgctgctttgcctggaaaagggcggcatcatattcgccgcgggtctcatagttcgcggggtcgatgccgtaggcggagccatcctcgcaggaaaggcgccaggcatagcaattgccccttagcccgcagtggaagggcagcaccgaggtctgacgggtgggcgcatcgaaggcccccagcgagcccagctggccgcccatctgcatgatctcatcaagggtattcagccggcccattcccgcggcgatgccggccgcggcataggggtccacccggtaggagtgtttggacgcgctctccctttggcgcagcagggcagaaaagacatccaaggcgagcgctgcgcccagatcgatcaggtccgagacgatggggcagtaggagctgctctgtttactgcttttatgttttgccataatgattcctcctttgccggcgcgagggccggatgctggctttttctcttgtacagccctatcttagcatcttgtgtgtcccataatccggacttagaaaggcatatctccccccatacagggaaagcccgcgccgatgataccacatcggcacgggcttttatcattgggctatttatatcggtgcggggcaggggggcgtcactccaacaggccgctttcacgcagcagcagttccacatcggtgccctttaccttcttcagcaggatcttgaccgcttcccgctcgccgaaggagagtggcaattcgctgatgggcttcttatcgacggcatagtagcaggcacgcagcagctcacgcacatcgtacttgctgccccatacctccggcacgccgcggtcgatatccagcagggtgtaaaccgattccataccggtacgcatggagtactcggtggtgaagatggtatcgcggggtgtttcggcaaactggcctacgaaggcgaagttcacggcgccatccggtaccaccttggggcggtcgctttccttgcggggctggaagaaggcattgatatagggcatatagcaggtagtggtattgcaggcattcgtagccagctcctcaatgcggtcctccgggatgccgatgtggtacagccactcacggcagatctcctcgccggtgcactcgcgcatgggctttttaacaaagttgccctcgcgatcggtatgcaggccgtagacccacaccagcacggtgttcttatcctgactcttgaactgcggctggcggttgatggtccaggaaaggtaccagtgatctacactgtccttcacggtgacaataccgccggtggtcaccttgccggcacggggatcgcgcttgcagatgttcataatatggcggatgatctcctcatcggcggtggctacggtggcgctcatccagttggtggcctccacatcgctgcagaaggcatcggggttgccgtattcgccgtgctgcgcctgccgtgcgatggccttccacatatcccacgattcgccgcagccgttatggatgccggagagatcgggggcgtgggtctggtcgccgtagcaggaggtatcggtgcagcagccattggtgatgaaaacaagatcatcctcgatgagatcaatggtctgctccttgccgtccttcacatagacgatctgacgggcgaccttcttatcgccttcggtctcgatgacaacattgcggacatccatgccgtattcgatgcggacgccgtgggattccagatacttcaccagcggcaggatcatgctctcgtactgattatacttggtaaagcgcagggcgctgaagtcgggcagcccatcgatgtggtggacatagcggcacaggtagcgcttcatttccagggcgctggaccacttttggaaggcgaacatggtctgccagtagagccagaagttggtgctccaaaagctttccggcaggacttcggagatctttttatcctccaggtccttttccggggtaatgaacagcttggaaagggccatggcgctttccttatccagcgcgaacttcttatcggtgtgggcgtcctcgccgcggtttacggtggcgcggcacagggagtagttggggtcgtgcttattgagccaatagtattcatccagtacggatacaccgggggtttcgatggagggcacatcgcggaaggtatcccacatcacctcaaagtggttatccatttcacggccgccgcgcatataaaagcccttggtgacatccttgcggccatcgcagctgccgccggccaggtccagcttttccagcaggtggatgcgctcgcctttcatctggccatcgcgcaccaggtaaaatgcggcggtaagaccggccaggccggtgccgatgatataggcggatttgttatcgacgccctggggcttttcggggtgagcaaagctttcgtaggttcctgcagaataatacataaagaagcctcctgtaagattggtttcgggagcggcgctccctttgatggctttattctatcccgccgggccgcgaaataaaatagacagaaaaacccccgtgacaaaaacttcgtcacggggaaagagctgaataagtttttatcaaacgggcttgtttgtcaaggattcgagggccggtcggtgcggaagcgctccagcgcggcgctgatgctgccctggatgaccagagccagcttattcaccagcagctccggctcggcccgcatatcgtccttgatccaatccagcatgagccccacaaaggaataggagtggacctgcgcgatgaactgcttatcctcctcccgcaccgtcattccggcggagcgctccgcaatgacacccatgatgagctgatcggtgagggggaccaggtatttttccacctgttcccggctgacgcaccgatagacattcatcacaaagaccttattttcccgcaccgcgtggaagatttgaataaagccctgctgccaggtatcgtaggtctttttgttggccagtgccttggcagcgtcctccatgcaggcccattccaccaggtcgtagatatccttgaagtgatagtagaaggtcatgcggctgatgccgcagtcctcggtgatatcagtgacagtgattttggaaagcggtttttcccgcagcaggtttttcagcgattgctccagcgcgcgtttggtgatctgggacatggggcatctccttccggctctatttttccctattatagcatgcggcggccctaccgttccagcggctttttgtaaacaaaccgaaccatggaggaaaaacggggcaggcgggggcttttgtggtatagtaatggtataataatgcttgcaaggaggatatgccatgagctgctttattacccattacgcctccccgctgggacgcctgctgctggctgccgatgaggagggtctgaccggtctgtggctggaaggacagaagtactttgcggccggactgccgcagcaaagggaggagcagcgcacgccggctctggaagaggcctgccgctggctggatacctactttaccggccgggagccggattttactccgccgctgcatcctgtgggctcggattttcagcgggcggtgtggcagcttctgctgcagatcccctatgggcagaccaccacctatggcgcgctggccggggaactggcgcggcagcgcggcctgacacatttttcggcgcaggcggtgggcggcgccgtggggcataaccgtgtttccattatcatcccctgccaccgggtagtgggcagcggcggcagccttaccggctacgccggcgggctggagaataagatcaagctgctggagctggagagtgccgatcttggcggtctgtaccggccaaccaaaggaacggcgctgtaaagcctgttctccggcttgacgctggcgacggcgcgcattatactggtagaagattttgcaggacgacccgacaggagggatgtacgatgaaacaatatcatatcgtggatctctttgccggggtgggcgggctgagctacggtttttcccagctgccgggttttcgcatcctggcggccaatgagatagaaaaggacattgcagcggcctattccctcaatcaccccggggtaaagatgttgaattgtgatatcgctgacctaaccaaagaacggctggctggggccctgggtgggcagcaggtggatattgtggtaggcggcccaccctgtcaatcctattccacgctgggtaagcgccggatggatgaccgggcgaatctctttttacagtataagcgtatcctgcagattttgcagccgcaggcatttatctttgagaatgtgaccggcatcctcagcatggatcacggccgcctgttccagcgggtggaaagcgagttccgggcgctgggctacgatgtgcgccacgatatcctcaatgctgtcgattttggtgtgccgcagcagcgggaacgggtgatcctggtggggatgaagggagaaaataactacatctttccggttccaacccacggcccggggaaaaagccctatgtaacgctaaaggatgctataggagaccttccccaactaaaaagcggggagagtgccagccactacgccggggtcgcggagaacgaatttctgcggtttgtacgggcaggtgccgggcagctggtaacggaacacgctgcccccaaaaacggcgcgcacctcatccgcattatgcagactttgcaggatggtcaatccaaggatgacctgccggaggagatccgccccaaaagcggctacggcaatacctatgccaagctgtggtgggagcgtccctccaccaccatcacccgaaattttgcctgtccctcctcctcccgctgcattcacccgcgggattcccgcgccatgtccatccgggagggtgcccggttgcaaagcttcccggatgattaccggttctatggctccgatggtatgaagcggctggagatcggcaatgcggtgccgccgctgctctcggtggccattgtccaggagatgcaaagcgccctgaaaagaaaggaacagatgccggaaaggagtgaccccatgcggttgaccgaccaacagattgaagaaacctatcggctgattgaacagcaccaccaggaatttctggtatcccagggggtaaggctgccccggctgcggcaggccgggcagtacaccaaatatgcgctgacgctggtatatctagcgcagggttacccccatacccgcaccgtcagcaaaaaggaactcaccgagtttattcggcagtactacccggatgtgaatgatgtgcagcaggctaggtacctgggtgcccagcagggctggtgcatcctttccggggagcgcaatgacttggcttcggaggggatgaagtccggggaataccgcctgcaaacgctggaggagtgctatccgggctttacggcggagcgtcgggaggaacaaatggatgctgactactgggaagcgctgaaggcaaagtatgattaccgctgtgcctgctgcggctcccgggagggcgaaccacaccgttactggaaaaatacccttaccaagctgcaaaaggggcacaaggacccccgccggccgttgggccccggcaatatcattccccaatgcagcaaatgcaaccaacccgaccgcaattgctgggtctacgatgataagggccgggtggtgggccttgccaatgccattgtagtggagcgctgccccgccgatcttcaaaaggagatctacatacggctgtaccggcaatttggcggcaaagaccccaaggacctgtgatctttttacgacaaaggaaagccagcccccgcggttggcttctttttatagggaaacaagggcaaccttgttataaatttgacgaataccgcgaaatttggtatactatctccatcctaatcaaaggcaaggggaccgggaatatgaaacttttaccctgcgcggtgcgcggcgtgctggctggtttgatgatctctatcggcggctatgtgtacctgggctgcgaaaaccgtgtagtgggggcggtgttcttcactgtggggctcatcaccatcaccctgtttgggttcgatctgtataccggaaaaattggctactggctgggccaaagtcggcaggaacgctggcagacgctgctttctctgccttgtaatgccgtgggctgcctgatagcgggcctggctcgcagaccggccggtgccgtgctggccctgtgtgaggcccgcctgaccaaagcgcctcttatcctgctggtggatggtatcttctgcggcatccttatctttatctgcgtcgagatctacaagacccggggaacggtgctgggcatccttatttgcatccccaccttcattctctgcggattcgagcactccatcgctgatattttctacttctgcaatgcccgtatcttcagcggccaggctgtgctggtggtagtgctggtggcgctgggcaatgccctcggggcacttatcattccggcggcccggctggtgtaccagcccaaagaggaacaaccccattgggaataaaatcgctgcgcggtccatcgggccgcgcggcttttttttacaaaagatcgcatctccttatcgatatcctgttggatgccgtatgtgtgcggaggctcctgccgcagagccccaggcccagcgtgctcaggcgttcttcgccccttggcagcctacagtattccatcatttcttctcaaactcctttgctgcatctttcaggtattggcggatgggcagatgctgggggcaggcgggctcacttttgccgcccaggtacacccgcgcggtatcaaagcaattgaatcccgccgccaagtattcgtccaccatctggctaaactgtgccaggtccacctcctcgccctgcatgggcagccgcatacagccaaagccaaagttcttttttacttccgcaaagctcataataggcgctctccttccattttgttgctattttcattatgaaccctaaagttcactttaggttaggagctttttcacagaaaaaccgtcccccggctgtttcacagtttggctcccctgtcccaaattttctcatccgccgacttttgccgatgggctccgagccgccccggcgctacaatgaagaggaaataaagggctttgccctgtactaccgggaaaggaacgggaactgactatgacactgatggaaaaagccgcccatgcggcagaacgcaaggccttcgagaaggtgctggaaaacttcatccaaaagggaaaaacagcggatgccgcctccgccgcgcaggacctggtggatatggccgaaaagatccagggcagcgtgtggaagaaggaatccttcgaggtgctgcatatgattgcgggccagccggagggcaagtgggcgcactatgtccagcgaattctggacgaaaccgacccctatatcctcaaaaccttcctcaccaacgcggtgtatgagggtggcttccgcggctaccagcaggcacagaagaatgctgaaaagtatggctgcaatatcccctggctcatccttatggaccccacctccgcctgcaatatgcactgcaccggctgctgggcggcagaatacggccaccggcaaagcctgacctttgaggagatggatcgagtcctcaccgaggccaaggagctgggtacccatgcctgcctctttaccggcggcgagccgctcatccgcaaaaaggatatcattcgcctgtgcgaaaagcaccgggatatggcattccacgcctttaccaacggcaccctcatcgatgatgatttctgcagggagctgctgcgggtcggcaatttctttgtgtccgtctccatcgagggctttgaggaagccaatgacggccgccgcggcgagggccacttccagaaggcgctggccgccatggagctgatgcaccgctacaagatccccttcggcgtttccatttgctacactgccaagaattataagaccgtcaccagcgatgaattcctcgatctgctcatcagtaagggctgcatcttcgcctggtacttccactacatgccggtcggcatgggcgcctccaccgatctgctgctgacccccgagcagcgcacctacatgaaaaaccgtgtgcgggagatccgcggcgtgaccggcggcaaggagctctactgcatcgatttccagaatgacggtgaatttgccggcggctgtgtggccggcgggcgcatttactgccacatcaatgcggccggtgatgtggagccctgcgtctttatccattattctggcgccaatatccgggaaaagagctttctggagtgcctgcagcagccgctattcctggaataccgcaagggccagcccttcaatggcaaccacctgcggccctgccccatgctggaaaatcccgatctcctgccggagatggtgaagcgcagcggcgcccgctccaccgatctggaggcgccggaaagtgccgagcacctgtgcgaaaagtgcaaggcctacgccgcctgctggcagcccaccgccgaacagctgtgggacgaagagcaccggcagtaaccaacaaagaagaaccgtaaaagttttcggtcaagcctttttcaaaaggcttgcagtttccaaagacagtgtctttggccgcttaccgcagcaagcgaaatcctttagaccgaagggcgctccctgcgatagccgtgccgacttgcgtcctcggaaggaggaaaagtgtgaaagggaaccatcagggttccctttcgcgtttaataagtgctgattttgcacatagggcaaaatcagcggcggcagggcatagccctgccgcgttctataaggagagggctcacccttacttgttgtcttgtccagactatcctttcgccgagcagacgaaaatattccattatcctcctagtttccgtcagatacgcccctcaccgtccaaagggcgcggcctgccgcagtgccgccacaaactgcgccagcgcggggttttgggcgtcccgccgccacgccgctatcacttcctcctgctcgccctgtccggtcagcgggataaaaaccaggttttccgccggagcatgctttcgcgccgagtaatccggcagaatggataccccttcttccgccgccaccatcatcaggatgctctcactatcggaggagcagaacaggatattaggccggtagcctgcctccttatacaggttcataaaaaacgcgtcgccgtaggaatccagcgtttccgccggggacatgtaaatgatcggctccccccgcagctcccggcgggtcagccgcacccgctgcgccagcggatgcccggcatacagcgccgccaccagccccacctcctcggccagcagccagtccacccgttcatcctgcttcaggttggtgctgtcccaggtcaggatcagatcaaactgattccccaaaagtcccgctgccagctggtcggtggtgcagcggtaaaaggtgatcagcaaattggcgtgccgctggtggaattcccgcaggaaatcggtaaatccgctttgctcatagccctttaggtacccaatgcgcaggctgccggaaagcccggtggaagctccgtgcgcccggtcaatggcctgatccatccgctccaggatcgccttcgcttcggtcagaaacgccttgcccgccggcgttagggaaaccggccgggtactccggtcaaacaggggacaccccagcatctcctccagcagccgtatctgctgcgtcaccgctgtctgggagataaaaaactggtcggctgccttggtaaagctccggctctccgccgccgccacaaagtatctcagttggtttcggttcatcggtttcctccctttctcctttccggtccctacaatccgctgcatcataactttttcttatattataatgccaaactgctccttgtcaatgctcctctcccgtcctataataagaatactttttataaggtcgaaatgaggagtattgtatgcaaagagaaaatttccgttcccgcttagggttcctgttggtcagtgccggctgcgccatcggcatcggcaatgtctggcgcttcccctatatcaccggccagtacggcggcggatactttgtgctgttttatctcatctgcctggtcatcatgggcatcccggttatgaccatggagctggccgtgggccgcgccagccgtaaaagcgccgtacaggcctaccagaccctcgaaaagccgggccagaagtggcacatccacggctggttctgcatgctgggctgctgcctgcttatgatgtactacaccaccgtcaccggttggatggtggattacttttataaattcctccggggcgattttgtcgccggcatgggcaccgaggagatcggcggcgtctttagccagatgctctcctcccccggagaaatgaccatctttatggtcatcgtggtcgttctgggctttttggtttgcagctttggcgtgcagaaaggcctcgagcgcatcaccaaggtcatgatgatcgccctgctggccctcattgttgtgctggcggtgcacagcctgctgctgcccggcgccgccgagggcatgaaattctacctgctcccctccgccgaaagcatccgtaccaacggcctggggaatatcatcaccgccgccatgaatcaggccttctttaccctcagtctcggcatcgccgccatggagatctttggaagctacatgagccgggagcacaccctcgccggcgaggccacccgcatctgcgccctggatacctttgtggccattatggccggcgtcattatcttcccggcctgcttctcctacggcgtccagccggatgccggcccctccctcatcttccagacgctccccagcgttttcgtcaatatggagggcggccgcctgtggggtacgctgttcttcctgttcatgaccttcgccagcttctccacggtgctggccgtgtttgagaatctcctggccttcgcggtggataccttcggcatcagccgcaaaaaggcttcccttatcggctgcattgccatgctggtgctcagcatgccctgcatcctcggcttcaatgtctggggtgatctgcacctcatcggtgcccgcggcgtgcaggatagcgaggacttccttgtcagcaacctgttgctgcccatcggcgcagtcgtctatctgctgttctgcgtcagccgctggggctggggcttcgaaaattacctcgcggaagccaataccggaaaaggccccaagctcccccgctggctgcgtccctatttccgctatgttctccccctgctcatcatcgtcattctggtgcagggccttctgtaatcagtcaaaaatcaagagccgtccccacggggcggctcttttgtgcggtcaggcattattcttctttttggtattccaggatatcgccggcatcgcagtccagtgcctcacagatggccgccagggtggaaaagcgaatggccgtcaccttgttgttcttgatcttggaaaggttgacattggagatgccaacgcgttcggccagctcattcagcgatattttgcgttccaccatcatgcggtccagccgtaatattattttccccataggcaaagtcccctttacaccagtccttctacatcctgctccagcgctgcgccgtgggcaaagctctgcgtcaggcacagcacgataattcccatcgaaaagccgtagagattcacactggtctccacggcgtccaacccctgcaccagccgggaaacggcactcatcaccagcccgatcaccggcacgacaatgcaaaaaataccgatctcccgcagcatacggatgttatccggctggaacggcgtgctttcctgcgatttttttaggatgagatgcacattccggaataccatcgccatcagcgaaagaatgaacaccgcactgatcccaaacagcagcacggcccgcggctccaccgccccggcggcgttggtcaccgtcatttcatagccgtaggtgttcagctccggcctatactgcggcaggatgcgttccagcagtccggaaagccacggcccggcagccacgctgcagatggccagtgcggccatgctggcggtgcccacccagtgcagcagctccagtatcttggttaaaaccagcgctattttttgaatactcttcatgtatgtccctcaatagtggtttctgcctaacggtttgacatgcatagaatagcatcatatttaacgattgtcaatatatttttaatgtttaacgataaattttatccattatccggttcatccgcttcttccttcgcgaagaccatcacactcacggtgtagcacccgtcgcccggctgtgtctccatctcgccgccgtatttcttcaccacccggttgatgatcccccggccgttgccgcgggtcatcttgccctggttcacggcggtgccctcggcgcccttaccgcagctgttgcggcacaggatggaaagcgccccatccgccgtctgcatggttagtcctacctgcttcggctcagctgccccggccgccgctatggcgttatccagcagattgctcaccaacgccaccaggtcgtagtcatcaaagcccgccgtccccgccgtcagctttatgtcaaagttcgcctcaatacccgccttttcacagtcggcggccttattcaccagcagcgcgttcagtatggcgttgcggcagtagtgcaggttgatgagcttcggcgcggccacctcctcggcatattgcttcaggtcggtgccctccggggccccggcggtcaggctgcgtatcaccgccacatggttattgatgtcatgctgcatctcccgtatctgcttctgctgctcctccagcagggtatagtagctctgctgcatccgggtggcctccagctgggcccgcagcgtggcgttctcgttcatccggcggatcatcacaaacagcgccagatcgcccaaaacgcccagcaccagcgccgctactccgtaggggtcgtaaacggcggttttcgcttcatcggcatacagcaccattgtaataatgaacaaaatgaactgtgaagcggggataaggatatacgccatgatatccaagcgcgcattgcggcgctgcacatatcttaccagccgaataacaagccagcagaatccccagacgatcagctcagtcgccgcaatagaggaattgaaataccacacgccccgcacattatccaaaaggtaatagtacatatagtcggggatcagccatatagacagagcctccgaaactgccattcccagtatttcaatgattttttccaaaaagaacagcagaagcagcatggcaacgctgccatcgaatacggtaaacagatagatgagctgaattacaaaatacaatgccaccaacgggtagaaaatgtgaaatgcattgcagccggggatctcccgcacatagctgatgatgaccagcccgacatacatcagcagcgtcgcgcgggtcaggtttttccggttttggtatttcggcttgtaggggataaacgcgtggataaaccacacaaatataaatgtgatcagattattgatgatgccatacaccatgtttccaaagaaatgcgatgtaaaaaactgaatgatcgctgtcatgcttctctctcctcaattccgttctctctcacagctcgatatggtggtatttacggaactgctcccgcacggcagggtagtagccgtggctgatgggcaccaccgtcccgtccttcatcaggaagctctcccgccgaaacaccgccgcatggtccaggctcaccgcaaagctgttgtggcaccgcagaaaggccgggctctccagccgttccagcagctcctccagtcccagggcggtggtcacgcactgcccgtccgccaggtacagcttggtcacccgcagccgccgctccaggtgggagatctcccgtttttccagtaccagctggccgcccttctgcggcagcaccagttggccgttttcggcctcggccagtgcggtcatcgccttttgcagcgccagcggcaggtgcttctccatcgtcggccggtacacatagtaggtgtgccgggtggcataggcgtcgggggcatagtccaggtatcccgtcaggtagatgatctggcaggtgggcagcagccggttcagcgcttctcccaccgctatgccgttcatctctcccagctcaatatccagcaccgccagctggtagcagcagttctcctcccgcaccgcgcgcagcagtgcttccccgctttcaaatggcgcaatcagcgcctcctcagcaaaatattcccgcagccgggcggcggtcacttcccgcagctctctctcatcatcgcatatcgctatttttatcatcccgtcgcctccactcttttgtcaaattatatcacacctgtgcgaattttggaagcaaatatgacagtatcttacctatttatgcacgctgtcccaaagggcctttcccctgcaccccttctgtgttacaataaccttgataaggggtaagggagcggagaagaacgactgggcagatgtcacccctccgttcccatgccggcaccgctttcgggcagcggggccgccgcagccaaatttagagaaaacatagaagatcgaaatcggcagagcctcatttttggggttctgccgctttcgttttttgcgttttggccaaacttttctcccgcagcttggtcatttcggcgaagaaaagaacagccctatttcgtcctcaaaaaaatttcccgccgtcttcgatgcccttttgccgtttttctgttgtaaaaacgcaacaacccaccccgattttttctttttatagggggaccccgcacaaattgtcggaaaaaattttggaattctgctaaaacccgtgtgttgcgcaaatgcatcactgttgcgattacgcaacacaaattatttgcaaaaatgcaacaaaacagtataataaagccagcaagcccacttatttctacaaaaggggaggaactctcatgaactggctcgataccatcacctacatcctgtacggctgcggcgtccttatcatcctgctgtttgccgtcaatctcatcctcgccaaaaagcgcggggaggactccaaatgggtgcgccgggcgctgtatgtggtggccttcatcgccgccgtcctcggcgccatccgggccaaggccgtctattccgaaacggttttcttcgccgatctgctcgtgatcttctgccttatcgttgctttcgtccgctcagaaaaaccccagcagcccccggaggacgacgaccagcagtaattttcgcccgctccaaccaaaagcctcccctttgtaaggggtaacgaagcggcggcgcgccaaccaaaagcctcccttgtgtaaagggaggtggcacggcgcagccgtgacggaggggttgccgatacaagtcatggtttagttttatctcgcctatcggcgttgccccacccccaaggctcccctgtgtaaggggagctggtacggcgtagccgtgactgaggggttgatgacacaaattatgccaaagtttcctttcgcctgtcggcgtcgcggagccttttgcaaaggcataaactgtacgcctacccggcgggggcctacttttctatgaagaaaagtaacaaaaagtcactcggggaggaccccgagaccccctacgcgtcggtacgccccgtataatcggggcccccgcaaggtcgcaagaccttgtggggaaaggaggatgcaccgcagcggggagggctgcccggagcaaagcgcagggtcagcccgacttaagcgaaggttgcgtccgacgcgacgacgcttataaggtgtttattttaattcggtttctgctgcatccaaatcaaa

SEQ ID NO: 2115 - DNA, 32759 bp, Unknown
  16S sequences of unknown bacteria
gacgtatttctttaattcgtacgacggtattatattttgctgaacctgcacgtttacttaccgtgtcctattcctttattgcggcgccgcattgatcgtgccgcttaagaagcattttccgattcaccgatatgctgtctgatggcttgttcgtgttcggcacagtatgcgtaggcggcttccataaaatcggttatgccgttatcatgatagagtttgtctattgttttcaggatagggtttttgtctatcatcatatcctgaaaatacgaatacacacagcccccgttttctctcggaaaatacggattgacggagctcagtctccggtcgctcatcaaagcctccacgaccatttcgctcagcatccattttaacgaaggcatttcgtattcttcgtaactgtcgccgaaatgaccgttccaaacataaaaccagaaatagtggatgatctcatgaagcgacataccgagtgcgcctttttcgctgctcttgcagaacacgtcaaagcgccgttctttcaagaatctggggcagatcggattcagtgtgatgtttcccgtcagatcattataaagtgaacgggcgtcaagttcaaacgcatcggacagcgcgtcctcgatctgacttctgtattttgaaaaatactcgttataacaaacaacctttccgtccaattcatcttttgtgcttcggtatatatccgagaacacttcgaaaagatactctttccttccggcaagatcccgtccggtgatttcattcttatctatctgaggataaaaatacagcagcggctccgaccaaaaagatgactgctcctccgtttgaaacagcatgatactctctattgaatattcacagcccggatttttatatgtgacattcattttttcaccccgtaaattccgtatgcgcgtatgctccgttttctcggcataacgtaaagaccgagcacggcgccgtttacattcgcgcatatcggttttaatacataatattcattcagccgcgcttttgccgtttttcggcaagcggctgcatcggcggtttctccgccgaattccccgaaaagaaaggcaaaacaaatgagcagaaaaatcgtagtcggtatcgacataggaggaagcacgacaaagatcggcggctttgacattacctccggcaggggagagcttatggcgcccctttttgtacatgccaccgatccgatcacatcaatatacggagccttcggcaaattcaccgattcgaacgggctcgagctttcggatatcgaaaaggtaatgataaccggggtcggttcttcccacgtttcgcgcccgctgtattccctgccctgcgagacggtgccggaattccgctgcatcggtctcggcggcttatatctttcggggcttgaccgcgcgataaccgtcagcatgggcaccggaaccgcgcttgttctctccgagcgcgggcgcgaaccggagcacctcggcggtaccggcgtcggcggcggcacgctgatcgggctttcgaagaaactgctcgacatggacaccgtcacgcacataaccgagcttgccgaggacggcgatctttcaagggtcgatctccggataaacgatatctcctcatcgccggcgggaagactcaccgaaaccatgaccgcatcgaatttcggaaacatatccgaccttgcgacgaaatcggacatcgccctcggaataataaatcttgttttcgaaacgatcggaatggtaagcatatttgccgcacggaatcattcgatacgggatatagttctcaccggaaacatgaccggcgtaaagcaggcgaaagccatattcagcggactgaattcgctgttcgatatgaatttcatcattcccgaaatgagccgcttcggcacggtaataggagcggcgctgtccgggatcgacagtacatattttgaatgatttccgtactgattttaagggactgtgcacaatgcgcagtccctttttatcagagaattcttataaccgagagaacctttccgagcttgcccgatgaaagcatattgcgcatatctctttcccttatctccccggtcacgatctccgcagttccctcgggggactcatcggaaaacgtgcattcgccgaagagcgcttcggaagcgtcggagagcgcctcacggtccgtggactccgtgcgcacatagtatctgaaggaaaggtcttcgaacgcggcggtgtcatccctgtccgcctttgtccagcggcgcggatattctgcggcaaaagcgcccgtcattatcgcgcacacatcggagatcatcgcgcccgccgtcggatatcttccggcgccgcgtccgtagaacattacgtctccggtggtctcgccctccacccatactccgttgtagacgtcgtttatatttgcaagaggagccgactgaccgacgataaacgggcagacgtacgacgcgatctttccgtccttttcgcggaagcatccgagaagcttcacagctccgcccattctgcgcgcggcgtttatgtcgtcaggggtgaggcgggtcatcgtctcggtatacacgctgtcctcggaaagcattttacccgtggctatcgcggtaaggatcattatcttcctctgagcgtcgaagccgtctacgtcggcggagggattcgcctcggcgtatccgagatcctgcgcctcgcgcagagccgaagcaaaatcggctccgtccttctccattttggtgagaatatagtttgtcgttccgttcagtattcccgtgaccgccttgatcctgtcggacgcaagcgaggttttcatcgagcggagcaccgggattccgccgccgaccgccgcctcgtaaagatacgcggcatcgtttttctccgccgcctcgagaagctcaacgccgtgctttgcgacaagctccttgtttgaggtcacgacgctctttcccgcattgagtgcggcaagtgaaaactcaagcgccggatgtacgccgcccatcgcctcgcatacgatgctgacgctctcatcttcgatgatacgatctatatcgtgaacgacacggtcgccgtaaggcgaatccggaaaatcacgaagatcgagaatatatttaagatttacggggcctccggcaagcgcctctatgcgctctctgttctcgtcaagaacgcaggcaattccgccgccgactacaccgaatcccaacactgctatatttgtcatgttatcctccgaaataaatacataatccgatggattaattttatcacagggaaagggtaaaatcaaggggaaaagacgcgcatatgaattttttcgccgtgcggagctcgcatttcggtttgttttgcattatccgcttgattgacggagatttttatattataataagatgccgcagaattttacgatgcggatcatttcaacggaggttcgttttatgttcatactcggatgccatctttccctgtcggggggatacgccgcaatggggcagacagccgtttcgatcggcgcaaacacttttcagtatttcacgaaaaatccgcgcgggggcgcatcgaagcccgccgatcccgaagatgtccgcgcgctgtgcgcctttatgaaagagaacggcatcctctttccgctcgctcacgcgccgtacatctacaatcccgcgaccgcggatgagcggatacgcgaatacaccctctcaatgatgaaatccgagcttgaatttctcgagtcgatccccggctctctctacaactttcacccgggcgctcacgtcaaggcgggcagcgaggtcggatgccgtctgaccgcggaatgtctgaatacgctcctcacggaggatatggcaacaacggttctcatagagacgatgagcggcaagggaacggaaatcggcgttacgtttgaggagatacgctcgatcatagacatggtaaacgaaaacatccgcgatcatgtcggggtatgccttgacacctgccacataagcgacggcggatacgacattgccggcgatcccgatcgggtgctgacggagtttgaccgcgtgatagggcttgacaggctcaaggcggtccatctcaacgattcgaaaaatccggtcggcgcccacaaggaccgccacgaaaagatcggcgaaggcacgtttacgatagagggcataacgcggatcataacccacccggcgctcgccgctcttcccttctatctcgaaacgccgaacgatattgaaggatacgcacgcgagatcgcgcttctgcgcgagatacgcggggaataaagaaaaacggaggcagtacgcacatcgcgctgcctccgatctttattttcagttgcacttctccgagaccttgccgcagcggaagcacacctcattttcgagctcccgtcccgcgaaaaagtcgcggatattttcggtagtcgtccttgcgatggagtcaagggcttcctcggtgaagaatccctgatgagacgttatcaccacattcggatgcgaaacgagaagcgacagcacgtcgtcgccgatgacggtgcccgatctgtcctcgtagaaaacctccgcctcttcctcgtacacatcaagtcccgcgcccctcaccttctcggaattcagcgccgaaagcagtgcctccgaatctatcagcgcgccgcgcgaggtgttgacgataaatacgccgtccttcatttttccgaatgcggcggcatcgagaagatgatgcgtctccggggtcagcggacagtgaagagatatcacgtcggacacggaaagaagctcgtcgatcgatctgtaatctatatccgagccttcggcgggaaagagatcatacgctaccgttttcatgccgaagccgcggcatatgtcgataaacgcgcgcccgatctttccggtgccgatgatcccggcgcactttccgtaaaggtcaagtccggtcagcccgataaggctgaaattgaagtctctcgttctgtaatatgcgcgcgggatcttccggttgacggcaagcagaagcgccgccgcgtgctcggcgaccgcatgaggcgaatatgcgggaacacgcacgacggttatcttcccgtccgccgccctgaaatcgacgttcgaatatccggcggaacgcattgcgatcaggcgcacgccgttcttgcagagcgtatttacaacgctctccgttatgtcgtcgttcacgaaagcgcatactgcgtcgaagcccgcgctgagctccgccgagcgaggcagaagcttcgtctcaaaataggtgatgtcgaggtcgtcccccgcgtatttgtcaaaccattctttgtcgtaaggctttgtatcaaaaaaagctatcttgtacatttttcgtccctccgaatatatttttccgaaaaaattcaccgatatacgcaaaagcgcctcggcacgtgagaataaagtaatcccgcaaagcaccggaccgaagtcacataccctgcgggacataattttaatacagaactgcgcgaacacgcagagcgcggatttttcgctgctctttatcagtctgcgcggagcgcgagggaacgtcccatgagaacgcccatgacggatgccatcatgagtccgcgcgtccatccggaggaatcgccgaggcagtaaagtcccttcacgttcgtattgaagtcctcgtccattttgacgcggttgctgtagaatttgagttcgggtgagtagagcagcgtctccgtcgatgcgaatccgggcacgacatgatcgaccgcctggataaagttgattatgtttatcattgcgcggtaaggcatcgccgctgtgatgtccccggcaacggcgtccttcagcgtcggtctcacgttggagaaagcaagctccttcggccaggttctctttccgtcgaggatatcgccgtaacgctgaacaagtatatgtccggcaccgagcatattcgtaagttcaccgaccttctgcgcataggcgatcggctgattgaacggatggctgaagttgtgcgagcacagaatcgcaagattcgtattgtcggatttgagctccttgtaggaatgtccgtttacgaccgcgaggtcgttgtcgtaattctcctgacttacaaatccgccgggattctggcagaaagtacgaaccttgtttttaaacggcttgggatatccgacgagcttcgattcgtaaagcactttgtttatctgctctatgacctcgtttcttacttcgacgcgcacaccgacatcgaccgttccgggctgatgtgcgatattgtgctcggcgcacattttttcaagccattccgcgccgcggcgtcccgtcgcaacgacggtatcctttgcgcgtatctcgatctcgccgtgaccgtcgttcacataaactccgaggcatcggtcgccgtcgaggattatgttgcggcactcatatccgaacattatctcgactcctgcggcgataaggtattcctcgatcgcaagatagagatcgtgcgccttctcggtgcctatatggcggatcgggcaatcgacaagcttgagccccgcctggattgcacgtttgcgaatatcctttacggactcggaattctccagaccctcgacgtgctcgtcggctccgaattcaagatatatcctgtcggtatatcctatggtatcctgaaccttttccgcaccgatgagagtcggaagttctcctccgacctcatagctcagcgaaagctttccgtcggagaaagcacccgcgccggaaaatccggtggtgatatggcagtagggcttgcagttcatgcagtgacccgtctgcgatttcggacagcggcgcttctcgacgctctgccccttctcgacgataacgattttctttttcgatccctttttcagcatttcgagcgccgtgaatattccggcgggacccgctcccacgataaccacatctgtgttcatttttgtttatccctgcctccgccggacgcggaggcttcctttcttccgaacgttgaggcagcgaggctcccgtaacacgcgctgcgatccaaagcagcgatacaaaacacgctgcttttattcttcttcgtcgataacctttatgccgagctcctcgagagacttttcgtctgtcttcgccgggcattttgagagaagctcggatgcgttctgcaccttcgggaaggcgatgacatcgcgtatgtcctcaagtccgaggagaagcgctacaagtctgtccaggccgaacgcaagtccgccgtgcggaggaacgccgtagcggaacgcttcaagaaggaagccgaatttttcggcagcctcctcttcacctatgccgagaaccttgaacatatgcttctgcatctcggtggtatggattctgatagagcctccgccgagctcggttccgttgagcacgatatcgtaagctctcgcgcggaccgaaccgggatcgctgtcgatacgggagtaatcctcctccatgggcatggtgaagggatgatgcatcgcataatatcttccgtcctcctcgctgtactcgaacagcgggaattcggttatccacaggaagttgaacttcgtcttgtcgataagtcccatgcggcgggcgacctcgcatcgaagtgcaccgagagaatcgaacacgaccttgttctttgcggcgacgatgaggagaaggtctccctcgccggtgcccgtgatatcggtgatcgccttcagctcatcctcggtgaggaatttagcgaaggaggacgataccgcgtcggcggcatgcttgtaccatgcaagtccgcgcgcgccgtatgtcttgacatattcgacgagcgaatcgatctccttgcgtgagaaggatgcgccgccgggcacgttgattgcgcgcacgcttccgccctcggcgaccgcattcttgaacacggcgaacgaagaatcgcgcacggcatccgttatgtttataagctcaagggcaaatcttgtatcgggcttgtcggagccgtagcgctccatagcctcgtgccacgtcatgcgtgcgaacggtatctcaagcggcatatgcatgaactcgtcgaaaattcgcttgatgaagccctcgtttaccgcgatgatatcctcctcatcggcaaacgacatctcaaggtcgatctgcgtgaactccggctgacggtcggcgcgcagatcctcgtcgcggaagcagcgcgctatctggaaatagcggtcaaatcccgaatacatgagaagctgcttataaagctgaggagactgcggaagagcgtagaactttccgtggtggaggcggctcgggacaagatagtctctcgcgccctcgggcgtgggctttataaggcagggggtctcgatatcgataaagccgtgatccgcaaaatagttgcgcgctatgttggttatcatgctgcgcttgatgatattctgctgcatatcgggacggcggagatcgagatatctgtgcgccagacgaagctcgctctttacgtcgctgttctcaacgatcgcaaaaggcggggtctctgcggaggaaagcaccttgaaggcatctaccgcgatctcgatctctcccgtgggaaggttcggattgaccgcgccttcaccgcggcggcgcaccgttccgcgcgctgctataacgtattccgcgcgcacgccgaatgcggcattgaagatttcctcggagcaggaatcgtcgaaggcaagctgaacgattccggtgcggtcgcgaagatctatgaagatcaggcttccgagatcgcgctgacgctgagcccagccgagcaccgagaccctttctccgatattcgccgcactcagctcgagcgcgtaatgagttctcttgtcctctttggtaaagcttgtatgcataaaagtcaccgtgccttttctaaggcatcctttctcttacaaatcagttttgcgtatcaatgcggctaagcgcggatcggtctgccgggaccgagaaccgaaagcagatcgcagagatcgtccgtcaccgtatcggctcccgccgccttcagctcatttctcggaaacgatgttgtcaccgcgaccgcgtacattcccgccgccttggcggcacgaatgcccgagagcgaatcctcgcacaccgcgcatttttcgggaggcactcccgcatcggcggcagtcttcaaaaaaatatcgggagcgggcttgagatttacaacatccgccccggtaacgaccgcggcaaaatcggaaattctttttcctatgcacccgaggttgcattcgacctttatccggtcggcggcggatgcgaccgcgcaggcaaagcggcggcgctcaagctcgcaaagaagcggaaccgtccacggcataacgtgaacgagctctcccgcgttctcgcagaagaggcggtacgcttcctccttcatcctttcgtcatacggcacgccgtacatctccgaaacgccgccgacatatgcgcggtctcccattccgcgaaaccgcgtgaaatcatcgggcgaggaatgtattccccattcttcaagcgctctgaccgtcatctgtgccatggcgtcctcggaatcgacgagaacgccgtccatatcaaatatgataagctcaaacattgcagccgaagtgagacgcgacatcgccgagggcgatctcggtctgtgtgctgtccgacatgtttttaagctgtgcgcgtccgctctcaagctcgctgtcgccgagtatgagcgtataccgcgcgccgatcttgtcggcgtatttcatctgcgccttgaggctccgtccgacaatgtcgcactcggcgcagattccgttctttctgagatcggaaacgatctcgatcgccctgagctgcgcgccgtcgcccatggaggcgatataaagctcgggcacgttttcttcgaagtcaagcgcgccgctctgctccattgcgagtatgaggcggcttattcccatcgcaaatcccacggcgggcatatccggaccgccgagctcctttacgaggccgtcgtatcgtccgccgccgcatatcgtgctctgtgcgccgatgtcctcggcgatgaattcgaacaccgtccgcgtatagtaatcaagcccgcggacgatgtgcggatcaatcctgtactcggtgccggagctcttcaggcacttttcaagcttgtccatgtgcgcgcggcaatcatcgcaaaggttatcgaccgttctcggcgcgccctcagcaacgcggcggcagctttcgttcttgcagtcgagaatgcggagcggattcgcttcgagacgtgtgcggcaggtatcgcaaagctcggactcgtttgcgcggagatatgcgacgagcttctccctgtatttcggtcggcactcggggcagccgatcgaatttatatgaagcgcggtattctttatgccgagcttctttataaacgtatccgccatggatatgaccgtgaaatccgccgccgcgtccggtgcgccgaacatctcggttccgaactgatagaattcgcggctgcgtcccgcctgcggcttctcgtagcggaagcagtttattatgtagaacaggcgaagcggcatcgtatccgagcacttgccgttctcgatgacggcgcggacaactcccgccgttccctcgggacggagcgcgaatcttctgccctctctgtcctcaaaggcatacatctccttctgtacgacgtcggtcgtctcgccgacgccgcgggaaaacagcccgagctcctcgaatgtcggcgttcttatttccgtatagccgaaattcccggctaccgccctcgccgtatcctctatttttctccacgccgagatttccggcgcagtaatatccgcggttcctctcggtctgcgtattttctccatagacgcgatcttacctttcttctgaggaaaacgcatatccgcggcattttctccgcagaatgcgttttcccgttattctccgatattacagtatatcaaaccgaacgtattaaatcaagtatgtcacgaaattatcctccttttttattttatttttccctccttcattgatttttccctctctcatcgtgtataatgttatacagtacgacgaaaggaggctcgattttgaagcggaaaaagacggaagtgatatcgcttcgccgcatatcagctgcggtaaaaatgttctccgaaaagatctacagcgatcacataacgctgtatgccgcgcagtcctcgtttttcacgatgatcgcaaccatcccgtttctcatgcttctcatcacgctcatacgcatagtctttcccgacgcgatcgactcggtattcatcgagcttgaaaggatactgccggagaaattctcgcctcttttctcaaccgtatacaccgagatatcctcgaaaaacacggcgtcggtgctctcgttttccgcaataacgatgttctggagctcgtcccgcggagttgccgcggttacgcgcggggtcgccggggtctacggaacacgcgaccacgtcggattcttctcggagcttgtgcgctcgctgttctacaccgtcgcattcatggcactgataattgcaactctcgtcgtccttgtatttggagccaccgtgcgctccatcgccgaaagcagctttcccgccgcgcttcacatattcgatctcatcatacgtctgcggatgtttatattcctcgcgctgctcacgctgttcttctctctcgtgtattccgcagtctccggaaacggtcgaaaaaacgcttcggcaaatgacgaagcccccgtcggataccgacgtcagatacccggcgcgttcatcgcggcgtcgggctggatgctgtattcgtatttctattctctgtatatcgtctactttccgaacgcatcgtacatttacggaagcttggcggcggtcattctcttcatgctctgggtatacttctgtatgataatcttcctcgtcggagcggagataaacaagatcggcttcgtaatgataaagaatcggaaagcgcgcctttcggaggaagaaaagaagcaaatatcagaagaaagcgaaagccggagagaaaacgaagaagcgtaaagatcacaaaaatatcggggctgcccgcatcgggcagccccttttcgtcagttcttcttttctttgacggcgatccatatctcgcaggtataatcggaattttgaacgtccgccgaaggatagacctcaagctccacgccgctcccgtattcgtaagcggtattctgcgggaagaattcggtgcagatcctgcggtagatctctctgaaagcgtcgggcattctgccgcggcacacgaacaccgcataggtatgcgcgggaatctcaacgatatcgaagccgttttcggcgacttctgtgccgttgtactccgcgcctatgccgtaaggaaatccgttgtccgccatctcccccgaaaagcatattccgagaattccgtaaaatctgtcaaagtcggcgtacccgcaaatcttttcgacggtgccgtcctcgttgcattctctccagaatccggaaatgtcgtccgtcgcaatatctccctgcggcttctcaacacgctttctcctgcagatcaccttgaatgcatccgctttttcaattctgtaatccataatgtttccgccctccaatataagctttacggaaagccgggaaaaggatttgacgcttccgccgcgtctcgcctcgctcgggctgatgccgtggaatcgggtaaacgctctcgagaagctctcgggagtatcgtatccgctccgaagcgcaatgtcgatgatcctgtcgtcggtgcggtacagctcgtccgccgcgaccgacagacggcgcatccgtatataatctccgagcgtgtatccgcacaccatggcgaacatacgctgaaaattaaacggcgacgatgcggcctcgcgcgcgaccgcgccgtagtccgccgtttcgtcaagatgcgcttcaacatagtctatcgcccgctgaattcccgtcatccaatccatcttccctctccttccgtatgacatgattatatcagagcggtcgccttgtttcatgacatcccgtgcggacatatgtcatgaattaaaacttttccgtcgtgaatttcggcatgccgatcagaaaaggtcggagaatgtttccccgacctttttcgattactcttcgccgaacgtaacgatctttttgaagatttccttctgataagcatatgcttttccgtcgttccctccgataagcgacgacggattcacctcgctgcggaacgcgatcagaataccgtccggaagcttgtcaagcccgctgaaatacttggcaaacgcggtcgaggaaaagacgaaggaatactcgtcatacgccccctccggagcatgaccgagaatattctcaagcggttcgagcgctcccgcctcctttgcctccgcataaagctcgggagtcagaagaagaagcgtacacttgccgttcgctatcatcgtcgcgtaagcgtcgtgagtcttttcgttctcataggcattgtagtacagatccttttttacatactcctccgcaaggtccttcggaacataggtgaagcactgtatcgagatttcaagatcgcgttcccccgagacctgctttatcgcatcgcacatacttgagtagacggtcttgcccccgtcctcggaaatatttatgtttccgggacccgcgtacatcgcgtacagatcgtaatccgtcctccccgccatctgaacgatgcagaccgtgattatcacggcaaacgcaagtatgataagcgtctgtattttataatggtaccagaagttttcaagctttttcttcatatcgttctccgttgttctgcggcacggatacggcagcgcttacgggctgcgccgtccgtgctccggcatatgcggtatccgaaaaaagccgaacgcccttccgctgaccggagggcgttccgatgcgccgagtgataatcggtcgtttttcggttatttcttgagtgcaatcgcggcttttgcgttctcagcgatcgactgtgcgtcaagtccgaagtatgtgataagctccttcgcggtgccgctctttccgaaggtatcctttattccggtgcggataacgggcacggggcaggtgcgcgcaagagtctcgcagaccgcggctccgagaccgccgatcacggaatgttcctcggcggtaacgatcgcgccgcatctctgagcctctgcgataaccattgcctcgtcgatcggctttatggtcgccatattgacgacggatgcgcagattccctcggaagcaaggatctcacgggcgccgagcgcctgttcgaccatgattcccgcacatattatggaaacgtcgtttccttccgccatctttgttccgcgtccgatcttgaaatcgtaatcgtttccgtaaagcaccggaaccgccattctgccgaagcgcagataaacgggaccttcgtgctctattgccgcctcgaccgcctttgccgcctcggtagcgtccgcgggattgataaccaccattccggggatcgttctcatgagagcgatgtcctcgttgcactgatgggtcgcgccgtcctcgccgacggtcgcgccggcgtgagttgcgccgagcttgacgttgatgtgaggatatccgacggagtttctcacctgttcaaacgaacgtcccgcaaggaacattgcgaacgagcttgcaaacgggatcttgcccgaaagcgcaagacccgccgccacgccgatcatgttattctcggcgattccgcagtcgataaagcgatcggggtacgccttcttgaacattcccgtcttggttgccgccgcgagatcggcgtcgagaacaacgagattttcgtatttcgcacccatttcgacgagcgctttgccgtaagcctctcttgtcgctatcttctcagccattacctgttacctcccagctctgccatcgcctgctcatactgttcgtcgttcggagcggctccgtgccaattcacattattctccatgaaggaaacgcccttgcccttgacgctctttgcgattatcgcggtgggcttgccggcgctgctctttgcagcctcgaacgccgcttcaagagaatcgaagtcgtgcgcgtccgcgtgaacgacgttccagccgaacgcttcaaacttcttatcgtgcggagtggggttcatgacctcggtaacgggtccgtcgatctggagtccgttccagtcgataatgaaacagagattgtcgagcttgtagtgggctgcgaacattgcagcctcccaaacctcgccctcctcgctctcgccgtcgccgacaagcgcgtaaacgcggctgccgtctccgttcatcttggagccgagcgccattccgcaggcagcggagacgccctgtccgagcgatcccgtagacatttcgactccgggggtatgcttcatgtccggatgtccctgaagatagctgccgagctttctgaaggtcttgagatcctctctcgggaagtatcctgcaagggagagcgtcgaataaagcgcaggggatgcgtgacccttcgaaagcacgaatctgtcccttccgggcatatcgggctttgagctgtcgatattcatctctttgaaataaaggtatgcgagtatgtccgctgcggaaagcgatccgcccggatgtccgctcgatgcggaatgaaccgcttcgattataccgatgcggatctcgcgggccttctccgcgagaaactccctcgtattactgtccatggtatttaccgcgtctttgtcgggcaaagacttcctttctttcggaatccgaaggagcggacgtttgcacccgtcctccggtatagccgttttctgttatttccgttatacgccggtgtttacattactaattttaatatatccggcgtccgttgtcaaatcggattttgtgaacgcacgggagtattaacatttttcagtaccgcattccgggcgtgatttgttgatcggcacttattgtcaacccgaatttttcgaataagatgtccatattcacgtcggaatgccgtttttgtacatcatttgttaaagtttgagcttactgcaaaagcgcggcgagcgcctgctctatgccgtttttcttctcgatatagcgggcgagcttctcacgctcagcgtcaacgacggcagcgggagcgcgcgaggtaaagctctcgttcgaaagctttccttcaaggcgcgcgatctcgccgtttaccttgtcgagttcggtgccgagtcgctttttttccgcttcaaaatcaatgatgtcggcaagcggcatgtaaatggcggcgctgtcggtgatgatccgcactgcggtatcgtcgctgtacgaatcgcaaagctcgacggactgagcggatgcaagacgctcaaagaacggatataccgcctcgccgaacgcttcgggataattcgtaacgatcgtcaccttcgcctttcttgacgggggcacgttcatctctgcacggcgggcgcggatcacgcggatcgcgtcgatgacgcgctccatggcgccctcttcctccgggaacgacggtatatcgtccgcctccgtgaagcggcggagcattatcgtttcatccgcatcgggaaggttcgtgtatatctcctcggtaatgaacggcatgaacgggtgaagcatggtgaggatctcgcggagcacataggcaagcacgttctgcgtattttcggagcgctttgaattctcggcgttcatcgacggctttgcaagctcgatgtaccaatcgcagtagacatcccaaacgaaatcgtaaagtatggagagcgcgattccgatctcgaatctgtcgaggttctggcttaccgccgccgcggtctttttcagctttgtgagaatccatttgtcctcgatcgcaagatcaccctcatcgggaagcgcgatcttgtctatcgtgagattcatcatgacgaagcgtgcggcgttccaaagcttgtttgcgaagttgcgcgccgcctcgatcttttcatcggagaagcgcatatcgtttccggggctgttgccggtggcaagcgcgtagcgaagtgcgtccgcgccgtatttcgagattatctcgaggggatcgattccgttgccgagagatttcgacatcttgcgtccctgtgcatcgcgcacaagtccgtggatgagcacggtatcgaacgggatcttgccggtatattcaagtccggagaagatcattctcgaaacccagaaagtgattatatcgtatccggtgacaagcgtcgaggtcgggtagaagcggcgcagatcgtcggtatcgtcgggccagcccattgtggagaagggccacagcgccgaggagaaccatgtgtcgagggtgtcgggatcctgagtgagcgaagtgccgccgcacttcgggcagcgctcgggagcttcctttgcgaccaccgtttctccgcagtccgcgcagtagtacgcggggatgcggtgtccccaccaaagctgacgcgagatgcaccaatcgcggatattctccatccagtggaaatagtttttctcgaatctctcggggacgaactttatcctgccgtcgcgcactgcgtcgatcgcgggacgcgcaagcggctccattttgacgaaccactgaagcgaagccttcggctcgacagtggttccgcagcggtagcaggtgccgacattgtgaacatgatcctcgacggagataaggcagccctgctcctcgagatcggcgacgatcttctttctcgcctcatatctgtccattcccgcgtaagccggatagtcgtcggtgatcttcgcgtcgtcggtgagcatatcgagaacctcgagcccgtgacgcttgccgacctcgaagtcgttggggtcgtgagcgggagtgatcttcacgcagcccgttccgaaatcgcgctcgacatactcgtcggcgacaacggggattcttctgccgacaagcgggaggatgagcatttttccgacgatgttcttataacgctcgtcgtccgggtgaaccgcaaccgccgtatcgccgagaagggtttcggggcgtgtcgttgcgatctcgacatatccgcttccgtcctcgaacggatagcggatatgccaaaaatgtccgggctgctcctcatattcgacctcggcatcggagatcgacgtcaggcatttcgggcaccaatttattattctctttccgcggtaaatgagtcccttttcgtaaaggcggacgaaaacctcgcgcaccgcttcggagcatccttcgtccatcgtaaagcgctctctcgaccaatcgcaggaggaaccgagcttcttgagctgctccactatgcgtccgccgtacgtgcgcttccacgcccacgcgcgctcaaggaatccgtcgcgtccgatatcgtccttggtgatgccttctctgcgcatcgcctcgacaatcttcgcctcggttgcgatggacgcatgatccgttccgggaacccaaagggtcgaaaatcccttcatcctcttatagcggacaagcacatcctgaagagtgttgtcgagcgcgtgtcccatatggagctgtccggtaatattcggcggcggtataacgatagaatacgtcggtgcgtttctgtcgtcggacggtttgaaatatccgcgttccgaccatgttttgtagagcctgtcctcaaacgaggacgggtcatacgtcttcggaagttctttcatagtatctccattcctccgcattttcgcggcgtcaaaaattattctcggttgcgtccgggcatgcttcgggaccgcgcgtcaggcggactgccgaaaaaataaaaaacgccccgacaactcagggcgccaaaagcgcggtaccacccgaattcgccagaaggcgcactcaaatcccttaacgcgggaaacgcagagccctacttgaattcaggctccggactccgggatgacttcgcatacttcgccgctgcggcgctttcacctttccgccgctctctgggagccgtccgcatgctactctttcccatcttcgtttttatgtattttaccatacaactccctgcttgtcaagaagtgcgccgtctttttcaccgcttcatttttccgtttttgaaaaaatctcgttcttctcgttgacttagagtaaatgcggtagtataatgaatgaaatgcaatcggcaaaacttacactgcacggcaaataggagacctttatgagctttaaaaccgaactgcactgccattcaagagatataagcccctgctcgcaccaggatgtcgacgggattgtcgaaaaatacaccggcagcggatatgcttcacttgtcctcgccaatcacgcgggagagtatattttcgacgaagtcataccggacggaacttggaaatccaaggtggattactatttcgatgcagcggaaaagctgcgcgatgcggcgggagaccggctcacgataatcgacggaatggagcttcgcttcaacgaaagcataaacgattatctcgtattcggagtgacacgcgagaaattctacgatatccccgatgttttctcatactctcccggacgtttccacgattacgcgaaggaaaatgacatgctcttcattcaggcgcacccgatgcgcttcggaatgacgctgacctcacccgactgcctcgacggttacgaaatcttcaacggacatcaggggcagcgctcccacaacgatattgccaaggcatgggcggagcatttcaaccgccacagtcttattctgacctcgggctccgacagccatgagctcgggctgccgacctcgggcggcatcgtaaccgacgaaaagatctgctcgtccgatgagcttctttccgttctccgctccggcagttattctctcatacgcaccccgctcggcgacgcggaatactgatctccgcctttcaggcagaaggaggacaccatggacggcatacgcgaaaatttcatatcctcggcggctaagctcggaatcggcgatgcgctttcgggtgccgacgcgatagtctgcgcgctctccggaggtgcggattcatgtgcccttctccttctgctgaaggagtgttatgcaaatgcagaaatacgtgcttttcatgtgaatcacatgatacgcggagaggaagcggaccgtgatgaagaacactgtcgagccttatgcggcaggctcggcgtgccttttgcggtaaagaaaaccgacgttccggcgatggctgaaaagctttctctcgggcttgaggaagcggcgaggacggcacggtattcggcatttgacgaataccgaaattctctgctcgcggaaggaaagaaggacgttcttttcgccacggctcacaatgcggatgacaatctcgaaacgctgatattcaatctgatacgcggaagcggcgcccacggactttcgggaatcgccccgaggagaggatacatcgtccggccgatgctcccgctctcttcggaggaaatccgcgatttcatgagaagccgcggcgaaagctttgtcacggattcgaccaatgcagatacatcctacacaagaaataagatccgcacgcaggtgataccgatactgcgcaccgtgtctcccgcatgcgaacgcgcggcatactccgcgtctcttctcgtccgccgcgacgacgaatatcttttctccgaagcgcagaaggcggcggggggcaggacatcgactcccgtttccgatatcgccgcgcttcccgatcccgtgctttcccgcgcggtgatgctcatgtattcggaggcgcgcggcgagcgcaccgatctgagatcgtcacaggtcgaagaatgcatgcgactcatccgcgaaggaaagcgctccgaagtctcgcttccggcgggggtctcgatgtacatatcggacggaaatattgccttcgctcccaccgaaaaaaaagaaacggcaccgttctgtgaaaagcttgttttttcgggcggatgcgatttcgtcgattttcccgaacagggattcgcgatcgcactttccgacccgtatcttccctgtccgatttctcctcccggcaaaaatatttacaaaatatctatacatacatcaattaactttgataaaattaatgaagctattttcatcagaaaccgccttcccggagacaaaatagtgtccgggaaaatgacgaaaaaggtaaaaaaactccttaatgcggcgcacgccgcagacagagacagcatccccgttttctgcgatgcggacggcatattttacatacccgggatcgccgtgcgcgacggaatgaaggaggggagcggaaaatccgtgcgcatttcctattggaaatagcgttttatacgaaaataatgctcagcggaagtgtaaaacacgcatccgaatcataaaataaaagaaaggtaccgtaaaatgcacaagacacttatggacagggacatagaaagggtactcctttcggacagcgaaatacaaacgatcgtcaagaggatcgccgcggagattgaccgcgactatgccgcagaggattcaaagcttctgcttctctgcattctgaaaggcagcgtcgtatttacgggagacctcatgaaagcgctttccatacccgccgagatcgatttcatgaaggtctcgtcatacggagccggtacaaagtcgtccggccgcgtcaatatcattctcgatctcaacagaagcgatctcgccgactgcgatatccttgttgtggaggacatcatagacagcggacgcactcttgcatatcttgcggaatatctgcggataaacggtgcaaaatccgtaaagacctgcaccatgctcgacaagccttcgcgccgcgaggtggatttcactccggactacatcggagcggaaattccggatgaatttgtagtcggttacggtctcgattacaatgaaagataccgttctctcccctatgtcggagttctgagaccggagatatacgaaaaataaaacttactgtataacaacaccattggaggaatgaatgaagagcaatcttaagatagtccttatctacgtcgtgctgataggtgtgataatacttgcaactgcgtcgctttggaacactatcccgagtgaggagattctgtacagcgacatccgcgcatatttcgtaaaagagcaggtcaagtcattcgtcatcaaggacgcaactctcacgatggaaatacgtcagacggacgaaagcggaaatctgacggacaaaacgaaggaagtcaaatatgagctcggcgacatttcgcttgctctgttcgtaaacaacatgggcgatcttatcgacgagcagctggacagcggagtcatcgagaaatgcgattatccgaagccctatgagcctccggtatggctcaggtatctgccctatgtgctcgtcctcgtcggatttgttgcgatctggttctttgttatgaagcaggcgtccggaggcggcgcgggaaagcccggctcattcggcaaggcacgcgcaaaggcaaacgtaccggacaaggacaaggtttatttcaaggatgtggcgggagccgatgaagaaaaagccgagcttgaagagatcgtcgaattcctgcgagatccctcgttctttacgaagctcggcgcaaagattccgcacggtgtactcctcatgggccctcccggaacgggtaaaactcttcttgcgaaggcggtcgcgggcgaggcgggtgtaccgttctactccatatccggttcggatttcgttgaaatgtatgtcggtgtcggtgcatccagagtgcgtgacctcttcgagacggcgcgcaagaatcccgcgtcgataatattcatcgacgagatcgacgcagtgggacgtcaccgcggcgcaggtctcggcggcggacacgatgagcgtgaacaaaccctcaaccagcttctcgtcgaaatggacggcttcggaacaaatgagggcgtcatcgtcatggcggcgacaaaccgtcccgacattctcgatcccgcacttctccgtccgggacgctttgaccgtcagatcaccgtaaactatcccgatctcaaggggcgtgaagaaatactgaaggtacacgcaaaaaacaagccctttgaagcagatgtcgatctctcccgcatagcacagacaacggtcggcttcaccggtgcagatcttgcaaacctgctcaacgaagccgcactgcttgcggcgcgcaagggcaaaacccttatcggaaacaacgatattgaagaggcgtcgataaaggtcatcgtcggcatgccgaagaaaaacaaccgcatcaaacccgaggaaaaacgaaagaccgcttatcacgaagcgggtcacgcgatacttgcgcatgttcttccctcgcttgatccggtgcgtcagatctcgatcatcccgagcggacgcgcactcggatataccctcaatcctccgacggaagacaaatacagcgtataccgcgaaggaatgaaagaggagatctgtgagctgctcggcggacgtgtcgccgagaagatcgtctttgacgatatctcgggcggcgcatcaaacgacattcagcgtgcaacgcagatcgcgcgcaacatggtaatgaagtacggcatgagcgacaagctcggtccgatactctacggttcggagcattcgagcgacgaggtgtttctcggacgcgacttcaattctgacaaaaactattcagaggagaccgccgctctcatcgacaaagagatcaagcggatcatcaccgaggagtatgagcgcgccgaaaggatcctccgcgagcacagagaaaagatggacttcattgcggaatatctcgtaaagaacgaggtcatggacgaccgtcagttcatcgaagttatggacggcgatcccacgatcgagcaacttgaggagatggtcgcggagcgcaagagaataagcgatgcagaaaatgcggcgcgcgccgagcgcatacgcgaaaaggaaagattgcgcgaggaagagcgtaagcgcaaggaagaagcgcaggcgcgccgaaacggatcaaacggtcccgttccgccgaatccgtggatataccccgaaccgccgaccgacatgaaccgcggaagcggaaacggcacgggtgcaggcggcgccgacggtacgggcaaaggcagcggaggagaaggaaacaacagcggaagcaattcctcaaacggcggcgaaaactgatcctgccgcaatttatcaacaaataaaaaaggctgtctttaagcgaaatccgaaggttcggatacccgaaaaaggcagcctttttgttttccgaaaatcgctcatttgcagaaaggttcgtgcggagcgcgaaagccccgctttacggtcatcggggctcgttccgtcggcgcaccgaatcgtgatactgcggcaacaaagcataaggcaaagaaatgccgcggcagtttgattttcacgcggcacggaacacggcggaagatcggcaaaagatgtcggcataagcacatcaaataaaaacgaaggagcccgatgcctgcatcacacagaccgaggctctttcgacggttttatattttcgattccgtaaagccgtgagcgctcacggtgacgtatctcttttttcacccgaccttatgacgagtgcttgctgcggtaatcgtcgatcgccgcgcgtatcgcctcttcggcgagcacggagcagtggatcttgtgctccggaagtcctccgagctcatctacgacctgcttattcgtaacgcccattgcgtagtcgaggggtttacccttgataagctccgttgcaagcgagcttgcggctatcgccgaagcacagccgaaggtattgaacttcacgtcggtaatgattccgtccttaacctttatatacatcttcattatatcgccgcatttggcattgccgacttcgccgacgccgtccgcatcatcgatttttcccacatttctcggatgagtgaaatggtcgagtactttttcagaatattccatggtatctttcctttccttttatctttcaaaatgagcgagctcaccgcgctcgagcttatcccaaacgggggacatcgatctgagaagcgaaacggtctccgcggtcgctgcggaaatatagtccatctcctccgcggtattgtcggcggagatcgtcaggcggagcgatccgtgtgctatctcgtgaggcagaccgcacgcaaggagcacatgactcgggtcaagcgatcccgaggtgcacgccgatcccgaggatgccgcgatgcccttgaagtcgaggtgaaggagaagactttcaccttcgattccctcgaagcagaagcttacgttgccgggcaggcgcttttcgcgctctccgttgaggaagctgtacgggattttcgaaagtcccgcgataagtctttctcgcagtgcggtcatggtgcgcccgcgctcctccattccggataccgcatcttcgagagccgccgccattccggcaatcgcgggaaggttttccgttcccgcgcggcgtcccttctcctgcgcgccgcctgagatcagtgtatacggacggattccgcggcgaacatacagcacgccgatgccgcgcggtccgtggaatttgtgcgccgacatcgaaagcatatcgatcttatcgcggtggacgtttatcgggagctgtcccgccgcctgaacggcatcggtgtggaaaagcaccttatgctctgcggctatgcccgcgatctcctgaatcggttcgatcgtgccgatctcgttattcgcatacataacgcttattccggcgcaatcgtcgtttataagcgcttcgatatccttcggttcgacgcttccgctgcggtcggtctcgcaaagcactgtatcgaatccgccgcgtttgagcctgtccatcgtatggagtatcgcatggtgctcgaccgtcgtcgaaataacgcggttcttcgattttttctttccttcggcacctatcgtaaacagcgcctgattgtcgctttcgcttcctcctgaggtaaagtatatttctccgggatccgcgccgataagctcggcgatcttctcacgcgatgcggtgagaagtcttgccgcttccactccgaacgtgtgaaggctcgacggatttccgtatatttcaaatgccgaaagcattgcctctttcgccttgtccgatattttcgttgttgccgcgcagtcggcgtaaatctttttcatggcttttgtacctcgcactttacgcgatcctttctcataattttccgcaggatttttatttcctatcttttcgctatgattatatcaggtgaattccgatttgtcaagtaggaatttaaaaattcccgcaaaaaagccgcataacgtatccgttcggaaaatacgttatgcggcttcaccttatgctgtttttcattatatcctcaagcgtgacgctgtctacatattccgcgatggcgcggtcaagccccgcccagaacggatacagcgtgcagttcccgtgcttttcgcaggcgttttcatcctctgtgcacatcgtcggagacagattcccctcggcggcgcggagtatttcgcctgcggtataatcgcgcgcttctctcacaagagcgtatccgcccgacgctccgcgcgagcttttaagaaatcccgctctgttcagggacgatattatccgctcgagatacttaagcgatattccctgacgctcggaaatatcgcgcagcggaacaaacgcgatctcgcggtgagcggcaaggtcgagcattaccctgagcgcgtaccgcccttttgtggatatcctcactttttcctccgaagctaaagtgtatcgtttactctgaaatacgaatcgctcaggtatctgagcacatcgcgtcttgtcacgatcccgacaaatttgtttctgtcatcgacgacgggcgcaaagttacgttccattatatccatgacgatctgcgccatgccggcgtctatgcgaagaggcggcagagcgtcgtgttttaaaatctccgagattctcacatcctcctgcgcacgcatggaaaaatcgtcccgatcgaccatgctccaaagaaaatccccttcggagagcgtaccgacatactcgccttcggaattcagcacgggaatcgccgtatatccgtgatatctcatcttttcgagaccctgtctgagcgtacagtcctcctcaagaaaggatgtcatgctcttcggaacaatcagcttcattatattcataaatatgaccgccgcctttgaatttcaaaggcatccttttcattaattgagcgatacagcgaactttttcgcggacacggcgaaagccgtgatgcaaggtgcggcatattgccggacagattccctgccggattgaagaacgtgcggagaaagtacgtctctcccgttcgtcacgcgccgcggaaattcacctgcacggatgagcccgccgaacctgcgcgatctccgccgaagcggtgataccgaggtcggctgccgtttcgctttaccgatataatgatacaccgcgagttttacggcgtaaatacgattctgttaattgtgcggtctcaaatgtaaacttttcccgatgctatctcgccgaaacctgcttcgtttcaagcgcgttcggatcaactaccgtagcgtacatatttatggcatcaaagatcggcgcccaaacattgccgccgtgcgcggaaacaaatatatagccaggcgttttcgatttgagatcgtcctctttctccgtatccttatcgtatttcacggcataggaggcaaggcaggttcccgcctcggtggtatatccggtctttccgccgagaatgaacattccgggagcctcgtttccgtacattcggctctgcatcgtcgaataaagagttattccgtcgggatgctgcggcgttttttccgttgtatatttatatgtggaaagtacggtccgcatgaaatcgtccctgagtgcgtactcaagtatgagcgcaatttcgtggcaggtactgtactgattctcgtcgtgaagtcccgtcggattcataaaatgcgtgtttttcagtccgagctcagccaccttttcattcatcatatctgcgaaagccgcttcacttcccgccgtataaagggcaagggcgaccgcgcagtccgcgcccgacggaagtatgagcccgtacatcagatcgcgcagcgtcacctgctcgccgttcagaaatcccgcaacggaggcgttctcgaggaacagcggatcggttatcgcggtcgtcatttcgaaggtatcgtcgaggttttcagcgtgctcggcggcgacgatcagagtcatcattttggtcatcgaggcgggatacattttctcgtcaccctttttcgatgcgagaaccgtattgttttcaagatcaatgagaattgcgtaatccgaggaaatatcgttcttgccgattgtcctgctgtcgggtgtgtacgaagcgtacatgtccgattcggtatcctcgatattgccgccgacgccgcccgatgcgctcctgtcaagggtctgcccggaaacgctgtttccgctgccgccgaccgaggtacactttgtcacggcaagtgccgccgcaaggattattatgaaaacgacaatcggaacgacaagccttccgagtgtgccgcctttgtttttttcttcgtgttttgcgtgttctccgctctgcggtgaggttggttgattctgccgatccatcgaatatctccgttttcagtatctgtgttcatctattaagtaattatatcacattttaccgcagaatgcaatacggatacggcgcgaacggatttttcgatcaaattgtacaaagcccggcgacccccgaagaaagggcccgtctgcggaattgattttcaaaatacgccgcagattttcaactttttccttgactgtcactcaaacgtatgatatcatttaatcatcaaaattcttcagatacgggagaaaaacatggtagaagaaaaaaacaagcttaccgcgggcgccgatgagcgaaccccgtcacatccgcagtatttctcatgggtaaacagcacgaacgaaggctccaccgaggctcagaccctcataaatctcgactatttccgttatctctacgatacatacggaatgcgtctcgagatctacgcatgggatgccggaaacctcgacggaagcgcaggcacatatcagcttctcggaaaatccgaaaagctcaagaagcagtatccgaacggctacggtccgatcgcagaggccgctgcaaagatcggaacccgcctcggagtatggtgcggtcccgacggattcggcgacaccgaggaaagcgcaaaggcgcgcaccgagcagatggtatcgctctgccgcgatttccactttgctcagttcaagatcgacggtgtatgcggacagctcgccgaggagcatcagcccctgttcgtcgagatgatgaaggaatgccgcaagtattctcccgatctcgtactgctcaaccaccgcctctggctcggaatcggaatgccctatgcgaccacattcctctggcagggtgccgaaacatatgtcgacgtacacatgggcaacctcatcaccgcgccgcatcaccgcgcattctttgcaagccgcggcaacgtaccgcagcttctccgcctcacggaggatcacggcgtgtgcatatcctcctgcatcgattacttcgaggacgatcttattttccaggcgttcggacgctgcctgatcctcgcccccgaaatctatgcaaacccgtggctcatgcgcgacgacgaggagccgatcctcgcacgcatatacaacctgcactaccgcttccgcgacattctcgtaaacggcatgcttcttcccggcggcacatatccgccgaactccgtttcccgcggaacgccttcgcgccgcttcctcgttgtcggaaacgacgagtgggaaacatggcacatgtacctccgtctcgacgccgagatcggcctccagccctgcgagaaggtcactgtatgctctcatcatccatatgagaaatacatcggtgaattcaactacggcgaagtcattgaggttgagatcgagcccttccgcgccgctctatttgaagtatgcgacagccgcgaagcagatgtcatgctcacgaactgcgaatacgaggttctccatgaggacaaggcgggaaagatcgaccgcataaaggtcgtatcctccgaaggaaacatcaaatacaccgacggacgtgatttcagcggagttgacggagaattcgacaacacgctccgtgctcccgaaaagctcgcctcgatcggcgacggtgaattcgacgagaaggtatcggacagcgccgcgaagatgctcgaggtcgcaatgttcgttcaggatcacgattcgctcgaagcacgctcgctcaagcgttccggcgaaaccgcgattcccgaggtcaaggcagcgcgcgacgctttcttcggtcagaaaacgtacatgctccgcggacccgaaagccgctttgcattcgacggcaatgacgacaccttcttcgacggcatatcaaagaccttcttcggcggacttcgccgcgacggcggatgcctccgcgtcgatttcggcgaggtgttcgatgcggacttcatcgagcttgagtacttcgacatcgacgagtcgatggcttacgaggtcaagaagcaggttctgcccggcaagtgcgatttctccgtcgatctcgagaattggcacgagagcaccgttgaggatgtcaccacgctccgtcatgagacgaccgacgttctcatccacaacgtacacaacatcgtacagcgcgacggacgccgccgcgtcgtaagatatgccctcggcggtaacgtgcgctacttccgtatgcctcagccgatcgaccgcatctaccgcatttctctcaccaaggacggcaagcgtctcgagcttaccgcgccgagggcaaacaacctcatgcccgtcggacgcgaggtaaagtactcaaagactctctccgtcagcgtcgctcccgagagctggagacacggatgctacctctccatcggtcttgagggaactcacggtgcagaaggtgcgtatgccgtaatcgaaagcgcagacggcgaattcctcggatgccccgaccgcgcagccggttacaactcgaacatctgggagtgccgcgcagacttctcgtacttcaccgatcaccactacacctactatttccccgttccccgtgaaatgtgcggaaaggaattcaagatccatattctcggacttgacgaggaaaacaagaagtacggtgtaaacgtatatctctgcgacgacaagaccgaggtcaccggtattgaagcagacgtagaattctgattcggatacgcagcaatgcgctgaattccggatagcttatctttaatacccccccttctgcgttcgggtccggtatacgggcaccgaagccgaagggggatcttcgttttgacggcgaaaaactacttttcacgaagacctaaaaacgtctcgatcttcccaaccgtatcctcacttataaagtgctctatcttctctgtctcctcaagcctcgcctcaccgcacacattttcgagcagcgcggcgaccgcgcggtgcctgcggacgaggtatgcgcctttcttctctccctcgggagtaagcgtcacaaagccgtacttttcaaatgtgcagaatcccgcctctctgagcgacgacgccgatctcgacgccacggaagcggacacgccgagccattcggacaggttctttaccctcaccggcacgctgcccgtgcggtagatcatctccagaaagtcctcgagattcgggctgatctcccccggcgaaagcttaatatacgcgctctgcgtaagaaattttccgttttcggtttcccctatacgatcatccccatatattgttactgtgaaacaaagtttcaacgatacaacatatgaaggagaacgtaaaaaaatgacgcttgacaaactcagacccggcgagcgcgccgtggtcatggaaatcgatgaaaacccgctgaagcgacggcttcaggagctcggactgtccgaaggctccgaaatatcctgccttttcgcaagtccgctcggcgatccgatcgcataccgctttgcttcatccgtgattgcaatccgcatatcggattcaaagagtgtacgcttatgggactgagccgcgaaaaggaaaacggcagccgccgcgttcgatccgacatgacggtcgcgctgtgcgggaatccgaacgtcgggaaaagcacggtattcaacgctctgacggggatgcaccgccataccggaaattggacgggaaagacggtgtccctcggattcggcgcggtgaaatgcggcggaagaaaaatagagcttgtcgatctgccgggcacatattcgctcgatttcctcagccccgaggaaaaggtcagccgcgacttcatcgcatcgggtgaggcggaaatgtccgtgatcgtatgcgacgcgctcgcgctcgagagaaacctgatcctcgtgatacagatcttggagataaacccgcgcgccgtcatatgcctcaatctgatcgatgaggcagaaaagcgcgggatataccccgactgccgcgcactttccgacgcgctcggcgtacccgtgatcccatgcgccgcaagaagcggcgcggggcttgacggactttgcaaagcaatgtcgaaggttacttcgccgtcatcataccgcacggattacggtccgctcattgaaagcgcggcggatgagcttgtgcgcacactcgaaatcagccgctttgatgctctcggcgtgatctcgggaaatttcgagcccgccgccgggaaagaaaattctgcagctgcctataatgtggcaaatcttctgaag

SEQ ID NO: 2116 - DNA, 10622 bp, Unknown
  16S sequences of unknown bacteria
cattggcgtaaaattcgtatcagaaaacagataggctttgtcaaacagggcctgcccgtcttccccagtccgctcgatctgaaacactccgtcttttgcaatccggtaaaccgggatcagctcctgcacccgttttggcaccggatacaggagctccgtcttttgccggtagctctgcatatctttctttttcagctgcatgtctcttcatcctccagaagttttttttctgtcactgccgcggcatacacatagaaaggcgtccggatacaggctgcccgtttgcgcatccagacaagcggaggcatcccggagatttttaaaaatccagaagccgcacacaaaaacgaaaccggaagcgcgcagtacagagacacttcctgcggcaaacgcaacaggctgtcgctaagaaaaaatacagccgtgccggatacgagcgtgagaagtgcacacaggcactcccgcatgctcagtcctttgaaaaaatcgtctttatagacgtcgatgtttttatttaccggtattttcatctatttgtacctcctcaaccaagtcccagacatctgcggactaccagttccgcccctttgacggatgccgctgcgcatgcgaacggcatacagtagccgcaaatctgcaaaatcatcgtagctgcattccaggtcccgtcccccgcttcaaacaatccgccaccggaaaacagtccatagctgaccgtgattgcaagcacaatcaccactgcctcaagtgcataggatagaaatgtctggatccatgcaatgccagaacgggccatctcatgcccgcctgcaaaccccgcaaaggcgaccggcgcaaacggaatacacagatacattttaaacagccgcgaaagtacagacaatacaagctgcaccgagcatacgatgataaacagcccgccaaccgcgccgcctaaaaatgccaccaccccaacgcttaaccagtctgcgccggagtctccatcttccagactgtcctttgccttttcaaacagatcatccggtgcttcctgattttcgagtccttcttcttcgtaaatcactgccaccactgccgtcgcacactcgctcaccgagctgatcaaagttagggcgttgacgattaatcccgctgtcaggacataccggatgcagaatttaaaaacctcgtcgatggaaaaattgttccggatttctacggaattgcgcatccatccaagaacaaagaacaggacagataaagaggccgcaatgcccgtggaaagcgtatacaccgatccggtcactacctgccatgcgccaagcgattccggctgctgctgtacataccgcatcgctaccttactaaagcttccccacaccgaataaccaccttttaagaagaaatttccggcgtccatcatcccgcttccaaccgcttccatcgccccggaaatcgcactgtcaatcagtcccatacctcacctcctgtcactttaataaagaaagcagcgcacttgcgcatagcataatgagcccgccaatgatgacccgcacgccctgaaactgctggctcgaatcatgcgccagccagcctgcgccaaagctgaaaattccgaataaaatcacgatcacgcctgcggcctgaacgatctgcagcaagaagtcagaaaggctttcgatttttgttgcgacttcattcgcatagaccggacttacaaagcaaagtgtcaatacgctgcacaaaaacagaaaatttccacatgtcttttttttctgcatagttcctccttaatagagcaagccccgctctgagggcctgcttcaaaatttgttttatttcttctgttttcttttccgaatgccaactaccatcagcacacctccggctgtaaccagcaaaattgcagggagataccggaacacatccccagtctttaccgcctgtgcaatcacggatgtcacaccgccgccggagtttcccccggtcgtcttcgttgtcgtcttgccggtcaggtcggttgtcccatcctttggcgcatcgtacatcttcacggtctgcacttccatgctgtccgtcacagtaaaaataaccgtctctgcgacctcgtatccgtctggtgcggtcacttccgtcagggtatatgtcccggctgcaaggttcatcttgtgcggctcttcggtggaaatccatgactcgatctcttttccttcctgatccttaacaatcagtttcgcacccggcagttcctgatcgttcgtcacatccagcttgctgaccgatacttcaatcggcttatcatacatgacgacactctgcacttccatgccatctgtcacttcaaatgtgattgtttctgcttttgcatatcgctccggcgctgcgatctcggttaaggtatacgtgcctgccggaaggttgaccatgtgcggctcttccgttgaaatccacttctcaattacattgccgttgtcatctgcaattgtcagctctgcgcccggaagctccttctgggacgtgatgtcctgcttggagatcgcaacttcaatttctttgtcgtacatcgttacctgctgtacctgcaggctgtccgacacggtaaacgtaatcgtctccgcgacagcatagcctttcggcgcccgttcctcggtcaaggtatacgtgcctgccggaagtcctttgatcttatgcggcgtctcttcggaaacccacgtttctacgacccgatcctctgcgttccggacggtcagcgtcgcacccggaagctccctgccgccggtaatatccatctttgtgatctctacattgtttgccgtattcgaaattttcagctcataagacgctttgccgtcaattaatccatttgcatctaccgtcagcttatagagctgctgctctaagtaatagcccggctgcgtctcggactcaaaaatgtagtaaaccgtatcgtgagtcagatccccaatatgaatccgtccattctcatcggtgatatactccgttccaagactctgcagcacttctttatccagctgatctaccgtcccaccagcctcatccagttctttcgatgtaaacatccggaaatggattccggcaagcgggatatcctcttctgcatccacctttaaaatgtccacagaggtttttacgtcctcgacctgcagcttggctgtgaccgtctcgacctgcgcatcatacgtcaggctgaccggatattcctgcccgctgacagcataatgctctgccgctgccgtctctgttactacatagtcaccaagatacagctccggagactgtgccaccccattttcatccgtctgtatctttgcaacgacgattccctccgtcagcgcggtttcttttccatcgacctgcattgtgcggatttccccgtccgcattgacaacctcttttgctactgaaacttcgaacgtatatccctctccgagctgctttccattttcctgatccagctttacgatctggatccttcctttctgcggcacatcatagcagactacctcaagcggatccagatagctgtgttttccgcttacctcaaatgtcagtccggctgcaagcagatacccttccggcgcttttacttcttttaatgtgtaacttccttttttaagcgccctggtcaagctgatgatgccctgttcgtttgtggtaaatacatccgttactttagtaaaatcccggttatccggcatctttaaagcatccccgttttgatcgaggatctggaactgtgcacctgatagcgggatcatttttttggtctctgcatcttttttcaggatgcgtacctgggcatcctgtatgtcgttggtcacaacatatttcaaagtcacgccgttttctgtgattttgatctttgcctctttcaatccggcatagccatccggtgtcgtgctttcatcttctgataaagtccataccccgtatacaagggcattttcttctgttgccgcatagccatatttgtccgttgtgatccacacttccggaacagatgcatcttcatgctgcagccggaaacggattccttccagctcaccccggtcgatccattcctgcaaaacagaatcgtcgtagttatcatcgagatatttcatcagcgaaaaactgccacggatcaccggctcataggaatttatcagcaccgaggcggcgccgtcatctgacacatccactacatgtaccgtctcatctggcagatagccggtggatgggcttgtctccttcacatagtaggttccaagttcgagatccgcacttttggcatgcccggtctcatcgagcgtcaggacttctaccggtgtacttaaggccgcgtccgcatagatggtgtactgcgcaccagtaaaagaaagtgccgtattgcccggctttgcttctccggtctcctgatcatatttctgcagctccaaaggctttttgatgcgtggctcagaagaagacactttgaccgatgcctgcccgtcatcggatactgtgatcggatagatggtctcgtccaatccatatccgtaagaggcttttgtctctttcaggtaatacattccataatacaaatcagagctcttcgcatatccggacgcatccgttgtcaggacctccagcactgtcgtgcaggacgcctccgcataaagtgtatactctgccccctgaaagctcgcagctgcacttcccggctttgcttccccggttgctttatcatatttttgcagctctaatggctttttctttggctgctcataagaagtaaacgtcgccgtctggcccggctcggccacgatggtataaacctgcgggtcggactcatagcccttcgacgggcctgtttccttcgcgtaataggttccggcctgaatgacggctaccggtgattttccatcttccccggtcgtcagggtcagaacagcctgcgtacatgcttcatctgtgtacactgtatataccgcccccgccagtgaataattttcattggccggtactgccgttttggtttccgcatccagcttctgcacatagacttcggatgtccggtcattgatattcaaggtcaggggcaggctctttttgccgctatagtagctgaacccaatgtcctgataacctttcagctgcagcttataagcggaataatcgaccgcgtacttacactggaaggtcagtgtttccgtcatactgccggaataatcctcactgacaaccagatggaacgtatcatctccatccagcgtgaccttaccggttccgttctttccgcttgtctcatttacgagtgtaattccatccggaattgtgaccgttgctgtattcccttccggagctttgtacgtcacagaaccgctgacccggtctgcgccgacactcgcattggtcgccgtcagcgttgtctcagataaatgtgtctccggctcatccagctttttcagtatgccaaccacttttttgaccagtgcaacgccggaagcattcaatacgttgttctccccgctgttcgcgttccagttgctgccgttcatatagatataagaaaggatatagtgggtcatcgtgtagtaatgtccggtcgacgagcatcccgcatccgtcagaacctgtttcaggttcacgcttcccgatccgtccgcatatgttacttttttgccccacatcgggcctccgtataaataatacatcccctttgccataccgttggacgcatccagctcgaccgcatcatcttccttataagtatggccggatcccggcgagttcagttttggctgaatgcagtatgcggttcgcgtcacgctgtcgcttccgtcctgccactgaatggttttataggttgttgccgcatttccgctctttaaagacgccggtgcaaaatagattgtattgttgacaatcaatttgaacttgtccggtgtatcctcagaaagcaaggcgatgccagcctcggatagctcggtttcttcggactgaagctcggtctcgttttccggctcttcaactgtgaatgactcggattccagttcagtctctgcaggcgctgatagctcagattccggctccgtttctctggtcgcttccgtttcggattcaatctcagtctctgtggacgctgatgacccagattctggctctgtctctacggctaacgttgtctcggattcgggttcagactcactttcggtctccactgctgctgtcaactcagattccgtctcaatcccagttccttcctccgccttttctgcaacggcaaccggacgcagcacataccagtcctttccgctctcctgatccgttactttataaatacagttgtatgttccggctacatcataaacgatgtcatccgaaatatactggatgacataccgttctccttcatagccaacgccccggaagtccttatatttatcaaactcccacgtatcaaacggaatgataatcgtagtcccagtaacgatacttccctgcttcggcagaccgtcaacatccgtttccggctgctgcacgtattctgtctccggctttgtttccgtttgccctgttgtattttccgtttgttccacctgtgctcccgatgcttcctgctgcatgcgattttctgtctcaaccgactgcaccaatggctgattttcttctggctgcgcgatgaacgatgctttcagccatacatctgattccggcatgactgtcttaatgctgccatccttttcccatgtgtacgccacctcatcctgctttgcatccagtaactgcagctgattcagctcatatccgtccgaagcctgcacatagagccagacgacctcaccagctgcataagacagcataatgtcactcttttccttctgtttttcttcctgcacatctgccttttccaacttgtcagtctcatactcataggtgcattccccgtaataaggcagtgtgaaatgataccgttgctccggctctgtcagcccttccggcaatgcactgctttttggcatttccgcttcactcatcggctcctgctcaaccgcataggccggaagcactaaggatgccgccgtcaacgctgcaagggccgcggccacccatctctggcttttcctcttcatacctgtgttcctttccatttctttttcatcccaggtcactgctgccggtccttcgcggcggcgcacggacacatcggtgctttctctccatagtctctctccccttttcgcgcaaacaaaaagaaggcccttaagcctccttctgttttcgcctgttcaactattttaagtataacacatggcccgtgcagcctgatgcgtcatcgtgatgcattgtgcgtcacaaagtaacgcaggggaatacctatctgcgttcaaacagcctgcagttccaaccactcttccagctgcgatactggaacctctattaattctgaaattgtttccagagagcttccttttttgtaaagctttatggccagctcctttgcttttttcttttctccaatttcaattcctgtttcaattcctttattctcgatagcagtacccaagttacacatgctctgcacctcactttctaattccgccgtcattgcaatgttgtatttttcactgagcacttttttcttctcatccggtgacactacaggagaaaaaagtgtatttagcaggttcaaaacaccacattctgcttcgtcttctgccactccaaggttcaggatcactacttccattaagtcataggtctcctttttcacatatgcctgacctaaaatcggctcctcaattgtatgataccggaacattccattttgtctgccctttgccgtcgacgggcaaatccatatggaatataccttctgaatcttttcgtagtgctccttggtaaatactgtgccatactgttctgaaatcattcgcgcacagtaatacgttccacgagtcaccaattcatatcccggcttatctttggtctgaatttccagattaataatcagtgtgattggctctttctttccgggaagaactgcgttaaaacggatatcgtaataaaccgtttcttcctttatagaactggactccgaattcatttttacaatctgctcatccccattgagcctctggctgcgatccaggtgatcctgatgaaccgcatgctctgaaatttccacttttccagacaggcaatgttccatgatatactctatgctgtaaagggaaaattctgccgtacagtatttcaaaatccatgcatcaattgccttaaatgacagcaatttctttgcacattcatcatatttcgccttgtcagcaacgatgtccaatgcttctgccaagtccgtttgtctttccacgggcaagcacctccgttttctttttccacagagaatccatttgttcctccatgttatcataaagccgttcttttatcaagcagttcggcttccctgtcagttacatactatgaactctattttattcttactttccgtacctttgaccatgccccatatacgcaacgtccctgcgcctttttccatgatcgcatccgtacataataggttcttttccgtttcagcttttttagcgtgattcctgtcttgccttttccggaaattttctttgtcttggcctgtttgaatgttttctgtgtgccatactgtacctcatatccgcctatgccctgctttttcttccagcgaataaccaactgacctttctttttgcttcgcaaagatgtgatcgctaccttggggagcttctgtttcgtgatcactgctttttctgttttagccggtgcctgatccgatgctgccttagacaactgctctgattccggttgtctttccggtatcttcgtctgaatcgaaaatgaaacaggccaagttacagacggctcctgctttaagcatacctgcagaaccaccttcccggatgctttcgcgcagatcatcccgtctgccacctctgcaatctccgatgtcagactgcggatcaaaaacgcatccagctgatttccccgcacgcctgtcgtcttgccttggtaaatcaggtacaacggaatggctgtctggtaaggaaactgatatattccactcactgtgctgctgcctccaaaagaacagttttccacatgcagtccggatatgactctgtcttttgcacacgttccagtcttaatctcttcgtttatctgctgattgtagccaaacgccaggatcgcggcatagccacagcccccttgcgtgcagacaccaatccctgccgttttcacactcggattcaccatcgcccggtaatggcccggagaatttttccagctgttgtatatttcataagctgaaagcatctggccacccatctgcgcattttccccgaccatttttcccgtcgcatccaccgtaatcgatgggctgccatccggtctggtatgtccgtataagacatactgctctgctgcccgttgcatggctgcttcctgcaaattcgcatccagtgtcagcggttgcgcaccaagccgtttccgttcttcgttcacgtagtccagtacctgatttgcccggtcataatattccgttaccgtaagattcatggaaaacgtatctactgtctctgcacatacctttttctctgatccggttatcagaatcaggaaacatgctgcaaacatcacaatccactttctgattcttctttgtccttccatagctcttctccctcgtattatctgcagtaaagcgttcatcctataaaccgggccgctctggtttatatcgatacccgtctgccgctaatcttccagcaagcttttcgcacaaatgatcctctgcctgctctgacagtaccacttccggaacctgctcttttccggcaaaggaacatactgccgcacaaatataatctttgatcgtcttatatttctgcctgtcgcggttcaaaatacaactatcgaccatctgatctgtctcttcttccattgataatttgatcgtaatcttttttgcttccttttctaatcggtccatccattctttcccttccttttgactcgtctcatttgctcttttcatcggccgccaacgatcctgttgcacccgttgctgctcggaaccaaaaccgaaaatttttttctttccttttaattttctgttatccggattccctgtaccacctgacggatcgcgctatccccggtacaggtcgataaggtcaccaccgtttctgattcattcagctctgcgcctgtttccacttccgatgctgcactcattttttccagccatttccggtatgacgttgcgtccggaaaccggacggtataagtgctgctctgcgtacccgccgcatggacactgaatatccgatacaggtaatcttctgctggcgtactgatccagaaatacggacacccggcaagcatttccgtttttttatattctttcagttttgcgaacatgcttccatcgcgcatgttgtggccatacaaaatcgtattataatttttcaggtcaggggaattgtaataatccataaaaacgcttcccgcaaacagttcctcttttctcacagaccggtgcagataatattcgttgtcatctgcttgtaccacgggataagacagatccaccgccggtaaatacagcc

SEQ ID NO: 2117 - DNA, 26656 bp, Unknown
  16S sequences of unknown bacteria
cgtaggcggtggtccagctcagacccggcaaaccgagaccgccaaagtccagccctggtgatgaagcccctggccagccagatggatcagcaggaagccttcgattacgctgtcaagcacatcagcgagaaggataccggcctgtctgtggaaactgtcaagggcagccagttcaagcagcctctgcttgagttctccggcgcctgcgccggctgcgttgagaccgcctatgcccgcctgatcactcagctgttcggcgaccgcatgagcattgccaacgccactggttgttcctccatctggggcggcagcgcacctgctgttccctacactgtcaacaagcagggccgcggtccttcctgggctaactccctcttcgaagacaacgccgagttcggcctgggcattgccatcgccacccgtcagctgcgggagcgtctggctgctaaggttgaaaaggtgatggagaaggccgaaggctccctgaaggaagcctgccagacctatctggacacccagaccaacagcgctgcttcccgcaaggccaccgatgccctgatccccgaactggagaaggctgctgaggctggctgcgagctgtccaaggagatcctgaaggataaggacttcctggctaagagaagcgtgtggatcttcggcggcgacggctgggcctatgacatcggctacggcggcgtggaccatgtgctggcttccggcgaagatgtgaacatcatggtcttcgacaccgaagtgtactccaacaccggcggccaggcttccaaggcctctcagatcggccaggttgctcagttcgctgcttccggcaaggccatcaagaagaaggatctggctgccatctccatgagctacggctacatctatgtggctcagatcggtatgggcgccaattaccagcagaccgttcgtgctctggttgaggccgaaagctatcacggcccctccctggtcatcggctatgctccctgcgagatgcacggcatcaagggcggcatgggcaacagccagctggagatcaaggccgctgtggaagccggctactggcatctgttccgttatgatcccagactgaagaatgagggcaagaaccccttccagctggacagcaaggagcccaagggcaactacgaagacttcatcaagagagaagtccgttacaccgctctggcccgctccttccccgagaaggctgaggctatgtactccctggctgcggaagaagccaagaagaagtacaaccgcctgatcaagcgcgccaccgagaactgggactaatctcccctttctccggccgtaacaggtaaatgaaatgaggtgggcaccttcgggtgcccgcctttttatgcaaaaaaatccccaggccaatgcccggggattttttctattgcgccaccgaaaactccactggatcggtttgaaacagggtatcataactgtccggagaataaccctggaaggtcagctggatattttccaccgcctggatgccgtttgcctccagatcgctttccattacggtgatgttggccatcgcccggcaaccggcgttcacctgacagtggagatatggggtgaccataaatccattgacagacatatcatcacaggaaataaccacatccccttctccggtgttttccaaaaacagcaccacaccggccccccagaaggtatcctcctccacatagcgtcccacaatgcgcacgccattctggttatacagctcttttccctcatccatggccggctgctcctcacttcccgctgccgaggtggggattttcacctcaatgggcccccacagatcctcataggaatcgggatcataggccgcaaagcgggcggtgatatccatgatcgtctcgatcccggctccttccagatcgccatcggaaaaatacatggtttcattggcctttttccccgcggccacatcggcggaaaacaaggatgtgctcatcatatagccgttgaccgccaaggtatcgcaccggagagcataattcctctgggaattgttttccacaaggagcttgagtccgatgccccaaatggggtcttccgtcagttccactgcggtgaccatcagcccatcctgatccagaagcacctgcttttccaccgtgggaagtccctgttcttcctgctcttcctctttctctccggcggtgtttctgccctgctgatcctcttggaccccatcctcctggatgggtttgcgggatggggcttcaccggtacaggcggacaaagtccagaccatacaaagggccaaaagaagagcaatccatcttttcttcattctgttttccccttttcctcttttgtcaccggctgctgggggttctttttccaccggatcaccgagatcaggaagatcacggcaaaaatcaggcacaatccaccccaaatcaccagatcttcgaagatcccctgagccgttattcccagaagtccggccagggcatacagtatggtgcagaaaatcccaccgccccggctattgcgggccgcaatggccacaatgccaccaataagcatcagaatggctacaagcagcccggaaaagccgctggtgcctccttcatccatcatggcgtcccccaatccggcggcgcaagactggaacaacaccaaaaaagtgagaacgatgctgatgatgccgatgatcagctttgctgttttcatttgtttttcctctctttcccttacaatttcccattttgcgtgggagcatcgtctgagacgacctcctctttcagctggacataccgggccagcttgatgcctttgttcacctcggacagataccccatgccgatgcccgactctttgacgatctcccgcagaggccaggaacattcccgcagggcttcggcatactggatgccgaacaaatgcacctgacaggccgcttcgttccggctggctccctggtacttttcccgcagaataccggccagggtcttgccatccatttttcttcctcctttcctgtgctttgtgctttttgctctttgcaatgtgcatcataacaaaaaaagccaggactgtttcccccaaacagggggaaatcagtcccggcatcgggaaagaggaggctcaccatgctgaatcagaagatcgtccacctgatccacccatgatatgcctcgattgaaagcgatgatcaatatggcatcccgttttttccggggatagagggccgccaggccataaagctccaaaccccgctgggcctggggaagctccaaccccatggaaaaaaacagccgcagcagcttgtcccggtcggtggtatgcttttctcctgccagcagcttataaccgtatttctgtggaatgtcggcccgctgaaagatctcctgtcgggtcatccctttgctctcgatgatctcatccacccagctggcaaaggtgggcacctttccctgaagataccggcgatggtattcgccaatgtcctccgggtgggccgagcgcaaaacctccagcaaagaagaggtgctgtcctttcttggctctttcatccgttcctcccttgtggtatcatagcgttgttcctttatattaccaaggactggaggctgggtcaagagatggatctggaaagccagctgcagctgtcttattacctggaaatcgctctgctcaacgaaaatcaccgggtatggctggtacagcacacagaaacgcaaaaaatctatgtgaaaaaagccctggaggtttacgatctgcaagtgtatcgttatcttcagcagaacccccagccaggtattccccgcattttccagctgatacagggagacgggccgctgtttgtcatcgaggaatacatttccggccgctccctcaaagagatcctggaggaaaagggaactctccctgtgccggaggccatctccattcttcgccagctatgcgcaattcttcgccctttgcatgccctttcaccacccatcgtccatcgggacatcaaacccagcaacctgatcctcacccctcagaatcagctttttctggtggatttcaatgcggccaaggcggtttcccctggaaaagggcaggatacggtgctcatcggcacggcgggctacgccgccccggaacaatacggtttttctccctctcagcctacggcggatatctatgccctgggcgtgctgctccacgaaatgctcaccgggcaccttccctccccgcctgcttaccaggggccgctggccccggtggtcaacaaatgcctggccatggagccttcccggcgctttcaatcggcaacagagctggccagggctctgcatcgccggtggccccaccacccggaagggcggagcggctggcgaagctggctccctcctggactgcgcagcggccgggtttggcaggttagtctgggtattttgtggtacttgctgcttctatccatgtgttcttccattcagctggaagagggcaccagggccacactgatcgtctttcggatcggcacctttctgattttcctgtctgaaaccctgtggctgggcaattaccggaacatctggagcaaatttcccttctgcgaccggcgccgtccctggatctgtctgattgctgttagcttctgggcctttcttttgctggtggggatgctgcttctcatcggcctgatcctgccccggtagtccggataaaaaaagacgccggcttgatccggcgtcttttctctttttattttactgcggcgatgatggagatctccaccaggatgcagtcagcagccattttggcctctacgcagcaacgggccggctcatggccatcgttgacccaagcgtcccacacctgattcatgctgtcaaacagggacatatccttcagatagatggtggcgctgaggatatgatctttatccgagccatacttgcccagcagatcctcgattttgcccagcaccgctttggtctggccctgcacatcggcttcctcccggctggtctggccgcagagataaatggtgtccccatggacgacggcccggctcatccggccagtgccctcatagcgcttgatttccatattgattttctccttccattgcattggatgtttttattgtacccttctccgcctttgttggcaacgaaattttatatctttccaaatccttcgtcaaaattgacattgtatctatggcctttttatgctaaaatactataaactgtgtgcaaatgcaagcttgtgatatcttaggagtgatacaatgcagaaagtgacgaacaagctggaagagtttttctggctgttcctcttcatcaacccgttcctggacatcggcaatggtctttttatcatgttgatggaaaacctgtacgaccggacctgggaacagatcaacctggcctttacccccagcctgctcatccgtatgactgtgctggtgctctttgggctttatctcctgctcagctgggataaacgggcccttctgaccatcgtgcccattggcgtggtgtgggtgctttcggtggccggacagatcttctggcccatggatcaattcagcccctttacggaccttcaatacatcgcccgctttggctacaatctggtggtgctgtttgtctactggcgggtcttccagcacaaaaagctcagccgtgagcggctgctgtatcaggtcaaccgcgtgatcacctttaccctggccgtgctttccacttccattctggtggcctatgccgccgatatgggctacaccacctacgccgaccggttcggcctgcggggcacccggggattcttctattcgggcaacgacatcaccgccgtgctgatggttcttctgccggtgtgcatctgcaccttcctgctgctggaccggaaaaaatgcggcattgtccggtatatctatcaggtctataccccggccgccaccatcgccaccctctgcctcatcggcaccaagaccgcttttgccgctgtgggcgtggccggtgtgggtcttttgggctattccctgtatctgctcattcacaaaaagcagaagatgcccttgatccgtctggtgatcgtggccctggcctgtctgattctgctgggtatcctggcccttttctccggcaatctctttgccgacatcagcagctcgctgaacaacaccggcaacatcgcccgtcgggaaggcgtgaccaccgctttgctcagcggccggcagaacaaactgggatcggctttccaggacttccgggaaggcggggtctataaatggctcttcggcatcacccgcggcagccagaaggccatcatcgaaatggatgtcttcgaagttctcttctattacggcctggtgggcgcagtcttcatgctgtggccctatctgaagctgggattcggctttgtgctgaagttcatcaaggagcgtaccatggtggcctttgccgtgttctgcagcctgggcctgtgtgccttctatctgtttatggccgggcacatccttttcagcgtcacttccggtttttatttttcctttatgcttctttatggaaaactgctttattccgacaacttcaaaaaggaagaaatctaaaacggcataaaaaagccctggagaattttttctccagggcttttcttattcttcgtgggaaagaatcaatttgacgatctcaggccggttgttcaggcgcagcgggaattcgctgttgcccaggccccggctgaccaccatggcggtggctccctgcacatggacgccgccggtgtacttgggcagcacaccctgcccaggagcaaagaccccctgatgaagcaaacggaactgcccgccgtgggcatggccacaaagcaccatatccacgccgctcttttgataaatgggaaacagctccggccggtgggaaagcaacaaacgaaagactttttcgtctccctcggtcagctgcgccagttttttctccagcacctggctgtttttccgctcctccggcggcaaaaaccgggggtcccgcaatccgatcagctcgataaagccaccccggtaagccagacaggccttttgatcttccagcacccgaacaccggctttgaccagctcttcccgcaaacggggatagacggccaaccgtccctcatggttgccgggtgtgtaatacaccggcgccagccgtaccgcaccccggacaaattccatggcccgggcgatgttggtccggtggcagtccaccaggtctccggtgatgaggatggcgttgggttcctcagcggccagccgatccagcaagccatgctgatgccggccaaaacttttgttgtgcagatcggacacctgcagcagaacaaaatcctcaaaggaggaaggcagcttatggctgccgcagcggtaagtagtcacactcaggctgctgttctgccaccggcagaagaccgcaaagcctgcggcggcacccaggccgcctgcaatggcagagattttccgccagtgggaaggtctgttttctttcatccatcggcctccttcgccataaaacatggtttatacccgtgtcttgaaataggaaccggcacagtaaagggcaccagccggattgtgggccagcacccgatccttggtgaccaaagtagtgcacatggcctcagaatacttatagaacatggaatcatgacccacgcacagaccgatgaccacattgaactgggtcttctgttcgttgagcagcatggcctgggccaccggattgcacatcacttcaaaagtgccgggacgcaccttttcctcttcggtgactcccacggtctccttgggcatagcgccggttttgcacatcaccgacaccacttccaggccgtgattgcggaagatctcgcaagccactttgccctcctggcgcagaccggtgcaaaaagccacgccgatctttgtaaagccgttcttcttgcagaattcggcaatctccttcacccgaggccactggcaatagccttccgattccaccaggcaggaatttttgtagaaatcacggtattccggcttggcgtactccgccttggcccgctccatcagctcctcattgtgcatggggcagtttttgggcatcttctccttatcgccggatacacaggcgtgtatctgacagctggcacaagtgtacatgatcttcgtttcctcctttgatccgggcatttttcatactagggtgtttttcccatacaatagatgcagcaatcctttctccatattatagcacaacttccagagggttcaaaagggtatttacacaaactcccccagatgataggattaaaaatagttaaaacagcgaaaggaggccgtgctatggtcggtcttgccttggagggcggcggcagccggggcgcctatcacatcggcgcctaccaggcttttatggaagccggaatcacctttgacgccatcaccggcacatccatcggggcggtcaacgccgccttgctggcccagggagactgggaaaaagcccgggaaaaatggctcactctgtccaatgaagatctcttcgacatcgacaatgcccgttaccaaaagctcttcaccgggaaggtggacccttccgacctgtcctattacaaagatgcccttcgccagatgcgggaagatggcggcgtggacaccgggcggatgcaaaaacttctctcccagctggtagacccccagcggctgctggaaagcccggtggatttcggtctggtcaccgtgtccatccgggatctgaaaccggtggaagtgttcaaggatcaggtgccgccccatcttcttctctcctacatcatggccagcgccaccttccccggtttccagcccacccgcatcggcagccgttcttttatcgacggcggactctatgacaactgccccatgcatatgctggtctcccggggccatactgatatcatcgcggtgcggatcttcgggccagggatcttccgtctgcccaaggacaaaaatgtacgggtacgggtgctggagccttccgaatccctgggacccatcatgaactttgatccttcggtctctgcccggaatctgcgcatgggctattatgacgcccgacggatgctggaaaatctggcgggacatctgtattatgtccgccgcccggcagaggactgggccttccctcgcttttgcgccctctccttccaggatataggagacgctctgcgcctgctgggggaagaaggggaaaatccttctctccgggccctgttcgaaaggattctgcctcagatcgcccacgagctggaggtgcccgacagcgccgattacaccggcctgctcattgccatgctggaaaaccgggcccagcgggctcagatccatcggtttgccatctactctctcaccgatttcttccgcctggcatcggctgcatcggcgccgcctccttcccgccctcttggcctgcttcccacggcccgctcccgggccaccgaggcttcggattttctcctgacccggttgctggccgatttccacagctgaacatcttcccccggttctttcggagctcgggggaattttgttaaatttttgtcatttttctattgacacccatcgtctggtggggtatactctatctgtctcatatgagacagtttcgggaggtttgccatggagctgactgcaaaagaacaagaaattctcagccggtgttttcttttccagggtctggaggaagaactggggcgggaactgatggatcaaggcgagaaacggctgttttcccctggtgaaaccatctattctgcccacgatttccgccaggccattggggtgatcctgtatggaaaagtgcaggtgcacagtccgggcggtgtgctgctgaacacgctgcatccgggaagctgttttggggtggctgcgctgtttcatcccacccaacggtatgtgagcaccgtcaccgcccaggaggaaagcggcatcctgttttattccggggaaacgctggaaaaaatgtttgtccgctgtcccctcaccgctcggaattatatttcttttctctctcagcgcatccaattcctcaatgacaagatcggcagttttaccgcccccaccgctcaggcccggctggctttgtggcttctggctcacggccctcagcctcaggtggaaagctacacccagctttcccgggagctcaatctgggccgggcttctctctaccgggctctggaatccctggagggagaagggatcatccggcggcagggaaattgcattcatcttttgtccgtggaggagctggaaacactggcccatgcaaactgaccgcccacaccatatcacaaaaaggagttcattccatgaaacggagatttttatcccttttcctcgctttgctgctgcttttcactctggccggatgccagaaatcttcctcttcccaagatgatgccaacaaggattctgctcagcaggagcagcagaaggaggaagaaaagacccctgaagaaaataccgacgatgtgaccatccgggtggccgggctgaaaggtcccacggccatgggcatggtgaaaatgatggatgacagcgccaagggcgaagcccaggggaactatgatttcactctggctggcgctccggaagagctcaccggccccattgttcagggtgagtttgacattgccgctgtacccaccaacctggcctccaccctgtacaacaagacccagggcaaagtgcagctggccgccctcaataccctgggcgttctgtatatcgtggaaaccggcgactctatccagtcggtggaggacctgcgtggccgcaccatttacgccactggtaaaggctccactccggaatatgccctcaactatgtgctgacccaaaacggcctaacccctggtgaggatgtgcaggtggaatataaaaccgagcacagcgagctggctgctttgctggccgccggacaggccgacctggcccttctgccccagccctttgtcaccagtgttctcacccagaatgaaaacgcccgggtagctctggacctgactcaactgtgggaagatgccgcccagggtgaaagcgttctgaccatgggctgtctgctggtacagaaatcctttgcccaggagcatccccaggccctggccactttcctgaaggaataccaggaaagcgtagactatgtcaccgatgaaaaaaatctggacgaagtgtccaccctcattgaagaacagggcatcatcacaaaggccgtggcccagaaggccctgccccagtgcaacatcgtctgcatcaccggcgatgagatgaagaccatgacccagggcttcctggaaattctgatgaatgccgatcccacctcggtgggcggtgctctccccggcgatgacttctattacctggaaagctaaaccgcgtctgctgcggtgggggctgatcgctctgttctggctgctgctgtggcagatcggggcctggcagctgaatcagcccctgctgctgccctctcctctccaggtggggcggcggctgggagaactggcggtgactctccctttctggccgagcatcgccttcagcctgcagcggatcgtggccggattcctgctgggctttttcagtgcggccttgctggcggtggcgggattcttcctgccgccgctggcttcccttctggcgcccccgctggccattatcaaatccacaccggtggcctcctttattgtgctggcccttttgtggctgccctccccctggctgtcggcctttatcgcctttttgatggtgctgcctttgtgctatgaaaacctgctgcaaggtctgaaaagcgccgatccgctgcttttggaaatggggaaggtttatgcctttaccccctttcaggtctttcgctacatctatctccccgctctcgtgccttatgccctggcagcggtgcgcaccggcctgggctttgcctggaaggcgggaatcgccggtgaagtgctggccatccccacaggggccatgggcactcagctccacaccgccaaagtcaccttggagaccaccgatctgtttgcctggacggcggccatcatccttttgtctctggctctggaaaagggcgcgctggccttggtaaagtgtctttcccgccggtatactccccccaaaaaggaggatgccccatgctgagcgcccggaacatttctttttcctatggaaatcagccggtgctgcaaaatctgtccttttctttggaaaagggagaacggctgctgcttttaggtccttccggccaagggaaaaccacttttctccggctgctctgcggtttgctggagcctcaaacgggaacgatccagcgcccttcccgcctgggcgtagtctttcaggaagaccggctgctgcccacattgaccctggaggaaaacctatgccttgtgagccgtaccccggctctggcccggcagatcggagaagagctgggccttgcggagtatttctcccaccaccctgctgccctcagcggcggacagcggcggcgcggggccttggggcgggccctggccttcccctgtgatgcccttctgatggacgaaccctttcagggcctggacgaaaagagccggaagaaagcggcccagtgcattctggagcatcaggaagggcgggcgcttctggtgatctcccatgaacccaaggacgcagaactattgaaagcccggcccatcaccttggaaagtctgatgatataaaaaatccctgcttcaaaagaagcagggattttttctttatcggccctttttccccgaacgggaaggctgctttttgccttttgtatgctgggggcggggagcttttacgccacgcacctttttgtgctcccgcaccggaggcggcgtctctttcttccccttcccctctttccggcgggagtgggctttttcccacaccagacagtgcttgccatggccgatgagatcctctctcccggcctttcgcagcgcctccagcaccagcgcccgatttttggggttcttccactggagcaacgctcgctgcatggccttttcatggggatctttggccacatacaccggttccatggtgcggggatccagaccggtataatacatggcagtggaaagtgtgcccggagtgggataaaaatcctgcacctgttccggccggtaaccagtctggttcagatattccgccagatagatggcatcgtccaaccggctgcctgggtgggaggacatgaggtaaggcaccagatattgttccaaaccgtatttctggttgagccgcttgtatttgtcgcagaaccgctcatagatctccttagggggcttgcccatgtaataaagcacattggggctgatatgctccggggccaccttcagctggccgctcacatggtagcgcaccagatcggcgaaaaactccccggaagggtcgcaggccatataatcataccggatgcccgagcggatgaacacctttttcaccccggggatcgcccgcagcttgcgcaaaagggccagataatcgctgtgatctcccttgagtacaggacagggagaggggaacaggcactgtctgtccttgcaggctcccaccttggcctgcttcgggcaggcagggccacggaaattggcggtggggccgcccacatcgtggatataccctttgaaccggggattttccgtcatgcgccgggcttcttttatcaccgactggtggctgcggctggtgacgaaccggccttggtgcatggtgagagcgcagaaattgcaggcgccgaaacagccccggttgtggatgatggaaaattccacctcccggatggcgtccacgccccccaactcttcataagacgggtgataggtgcgggtatagggcagatcagccacctgatccagctcctgggtattcagcggaatggccggcggattctgcaccagaaaccggctctcatacccctggataatggcccggccccggacaaagtcctgctcatcgtgctcgatgagggccgctttggcataggcgtgtctgtcccggctgacttcctcaaaggaaggctcctgcacaaaggggaaaacacagtcctctgtgtccttggtcatataacaagtgccccgcacatcccggatctggtggatatcctcccccttggccaggcggtgggcgatttccgccatctgatgctctcccatgccatagatcagcaaatcggcggcgctgtccaccagaatagggcggcgcactttgtcctcccaatagtcataatgggcaaaccggcgcaaagacgcctcaatgccgccgataacgatgggcagatcgggccaggcccgcttcaccagattggaatagacgatcaccgcccggtcagggcgttttccacccatcccgccgggggtataggcatccttttcccgccgccgcttggccacggtgtaatgggccaccatggaatcgatgttgcccgcattgaccagggccccataacggggccggcccatggccagcagctcttccaccgaatgatagtccggctgggacaggatggccacccggaatccttccttttccagcagacgggaaatcaccgccgtgccgaaggagggatgatccacataggcatccccggtgatcagcaggaaatcataataataccagccccgctccaccatatcctccttggagatgggcaaaaattcatatcgctccgccatggtcccgttcctttccttgtgcataaaaggacggctttcaaggccgcccttttgcgctgttttattctttcacataaaccgacaacacctggccggtgtagatccggtgataatccccgtctccatagaatttatccttccactgctggggaatcttctccggcttcagatcatccacatagatcttcttgcagatgagcaccacctgggcttcttcaaaggccacctgcccttccagctccaccggggtcaggccgctttgatggatcttatccatatcccggccggattttgttcccagcacggccagggcctgaggacggggtgtgccgaagaaggaaacggtaaagcaatcgttttcctcggcaaactgccaggtatagcggctgggacgcacataagcggtaaaagcgggtacattccacagatctcccatcagtccccagccaatggtcatggtgttgaaatgctctttggttccggcagtaaacagcgccgcctggtgctcgatcatctcaaaggggttgcccggcatatcccaggcttccagctttttaaatcccataacagtccctcctgaaaaacagattgttccgttttgaaaacggccgcaaagatgggtattcgaactgctcttattatagcacgatgcaggccaatggaaaagagggtcaggaaatgtgaatatgtactccgttcaccgtcacttcttcatcggcccggatcaggatgtacttcactccatcgatcacccgggtctggatcagctcggcccgctgcgggtccacctgcaccgtcaccgctggggtctttacctggatcttgttctccaccacatttttgggagacagcagggtttcctgaccaaaagactgggtgtagcactcttcaaaatgattgtcttcctcttcctccagaccgcagccccgcagcagcattcccacttccttctgggaaaaagtgaggggttcctcctgcttttcctccttgtgccgggcgatggtctcccgcaatttctggtccacttccagcacccgctccatgctgcactgctgctgaaaactctcctccaaaagtccctggaaggtttccttctgctgcaccgccggcataggcagttctgtggcaaaaagcacatcggccaggctctggcagttgtcttccgggcttttggtgtagtagagggcattgtagatattggccgtccgctcgtcaaaagcggggaacaaaaagcccagggccggacgggcgatcacccaatccagcttgcagttgtgaaacagattctcatggggagaataggaaagaccgggcttggtcagcttgacgggacagatggcgcagaggatataccggtacacatcggtggagctgtcctccatctcctctccgtccttgccgtgaccgggcacatcgtaggtgtcataggccagcaggatcaggtagttctcctccagtgtcacgccttcgatcaccttctggaaaaaccgctctgccacattttcatcccgcaactggctttcccgcagctccatcatcagcttgtgctcttctccctccatcacctgctcattggaaaaggccacatccagaaggttcttccccagcgagccggacaaggcccccttgagaagagccagcattttttcctcttcttcctggcccagagtggacaagggctgatcgaactgggtgagaatctccccccggtcgttgacatagcagcctctgatatgggtaatgctgtttttatcctggcgaaaccggcggcgcagctccgccacttccttttctgtcatagctcctccttcttggggcacggtatgtaagaacccatcctggttcttcctatggtatcacatgatttacgggaaaatcagtcgctttgccgcagcaccatttcccgccattcgtcccgggtgatcagtacttgccggggcttggagccttcgaagggccctacgatgccccgctcttccatctgatccaccagccgggccgcccgggaatagcccagcttcaaccggcgctggagcatggacaccgaagcctgtccggtctccaccaccacctcgatggccttggggagcatttcgtcctcttcttcctccccactgcctccagcggccgcactgccgttgtcggctccttcggcctggcgctcgatgtgctccatgacctcctgggaataatccggcgtaccggtctttttcacaaactccaccaccgcttcgatctcgccggtggtgatgaagcagccctgcacacgcaagggtttgggcgcacccaggggattgtagagcatatcgccccgccccagcagtttttctgcaccggtggtatccagaatgatacgggactcgatctgggacgccacggcaaagctgatgcgggaggggatattggccttcataatgccggtgatcacatcggcggagggccgctgggtggcgatgaccagatgcattccggcggcccgggccatctgggcaatacggacgatggcattttccacttcgctggccgccacaaacatcaggtcggccagctcgtcgatgacaatgacgatctggggcagtttttccccatctttttcctgggctgcttcgttataggcctccaggtcccgcacattgtattcggaaaacagcttatagcggcgcatcatctcggaaaccgcccagttgagggctcccgccgccttccggggatcggtgaccaccgggatgagcagatggggaatgccgttataaacccccaattcgatcattttggggtccaccataatcaggcgcacttcctggggggtggccttgtagatcagactgatgagcatggaattgatgcacaccgatttaccggaaccggtggtaccggcgatgagcatatggggcatcttcttgatatcgcccaccacattgtggccggtgatatccttgcccaccgaaaagctgatcttggatttgctgccggtaaactccggggaatcgatgatatcccggatgggcaccagctccacatttttgttaggcacctcgatgcccaccgccaatttatcgggaatcatggcaatacgcacgctggccgcccccagagacagggcgatatcatcggacagattggtcacacgggagaatttggtccctcgtttcagctgaagctcgtaacgggtgacagtagggcctcgggtaatatccaccagggtggcttccacgccgaagctcttgagggtatccaccagtcgggcggagttttccgccagctcctgggtgtgatccatctccacggtactgcctttgttcagcaggctcacagggggatagagatagatatccttgggggtgtattcttccagggcctcttccagcacctgctggcgcttgtcggcctgttctgggtctttttcatcccattccgggccttccctgcccaaggattcccggggcgattgggtagccgccatggctgcggcggcggccagagtctcatccccgccaaaagagggttgaggcgcttgttccgtatctgaggaaaaagactcttccggcattttgtggctttccacttccggcttctggaaaaccggagcggcaggaacctggcaatcctgctcttctgccttgtccacagattccgccggttcctcttcttcccagggcaggctcgctgcctgttccgcctgggacgccggtggaaatgggatgggatcctgggcctgagccacttcctgtttccgctcctctttctgggccgctgccttgtacatctgggccgcctttttggccgcaaactcccgggccctctggatggccggaggcaccactggctcgccctgaggcatctccggaatcaccggcgaaggcacttccccgcttttcaccggctgggccacagtggcctccggccggtgcttaggctgagcggctccgatcacctggtccggtgtctgtacattgggcggggagatggaaatgggctcccctttgggataatctggctcctggggtttgcccaccggaatgtcgatgttcttccgttttccgccgaacaaccctcccagtaccgaagaacgggccggagcggcctgctgctggggcatgggagccggggcgggcggaggcggaggtgccgcctgtgcctttttccggctgcggggtcttgtttcctcttcgtcctcttcttccgggggcagatcccgcacccgctcaaagagcatggaaaggctggtgttggtggagatcagcagacagaccactcctaccaggaagatcaccacaatggctcctgcatcggagagggccgccgacaaaaacatggccagaccgccggacaaaaggccaccagaggtgcgggacgcaccggtgaggcacagatcgatgagcccgtccatggtcaggggaaattccctggcacagaggaaaatatgggcggcactgccccacagcaccggaagcaaaagggcgcagaacacccgcaaacgcacctttccccggcgttttatgataaaaagccctgcggcaaaaagcaagcagaaaggcagaagtacaaaaccggtgccgatcagcccgccgatgcccttttccagccacaaaagcaaaaagccggtgacccgcagcaggctgaggaagcagagcaccgccacagcggcacagacgccggcatagatctccctccgggccgccacctgctgccgggtgggctttttctttttgcttctgcttccgctccggctggaggaagaagaggtgctccgcttttttcctccgctggaggaagaggatgaagtttttcgattctgggtattggccaactgtgatcacctgtactttatttttgcgcataacattgcaggatacagtatagcacatttgtttcaaaaaagacagtctgtctttgacgaaaaaagtcccgcctggctgtgccaagcgggactttttattgaatttccagctgagaaagagaaagataggcactgagatcggtggtatagagcctgcccagacggggccggccgtactcatccacatggatctccgccatggcccctccatattgggcctgctgaggcgccgtatactcactggggaagatctgatcctccggaatgatggtgtgcagcatcggtttccctccctttttcctcgtcgatcatggcatggagacattccaatgcatcgctgagacttcccaggctgtcaatgagaccgatgtccaccgcgtctttgccatagactacgctgcccacatcggtggtcagctctccggttttcatcatcagcttgcggaaatcctctgcggacacatggctgttttccaccacaaaatccacgatccgatcctgaatcttttcgaaataggtcatggtctggggcacaccgatcaccgtgccgctgagccgcaccgggtgcactgtcatggaggcagtgggcgcgataaagctcttctgggccgaaacggccaggggcacgccgatggagtgacctccccccagcaccagggaaacggtgggctttttcattccggcgatgagctcggcaatggccagtccggcttccacatccccgcccaccgtgttgagcaggatcaacagcccatcgatctcatcgctttcctcgatggccgccagctggggcatcacatgctcatatttggtggtcttgttctggggcggcaggatcatgtgcccctccacctgccctacaatggtcagacagtggatggacgacttctttttgtcgctttccaaagtaagagagccgatctgacggatggcgtccatctgctcttccggcacctttccctcctgctcttccccttgctgatggtttttgatggtatactcttttttgttcaaaaaaaacacccctgggctcagtgtgcccagggggtgccaaactatgcacttattttttctctgcttcttccatttgaggcaggctctccttcagattccgacagagggcttcctcgtccccatcattttcgatgaggatatcacacagagcctcgtagaactgccggtccggctgggaggccagccggatgcgggcctgttcggggctgatgccgtcccggcggacgatccgctcggtgagggccggttcggaagccaccacaccgatgacgaaatcacacacatggtccagaccgctttcatacagcagaggcacatccagaccaatgcggcggcagccctgactggtgagcacccggatgcggcggcggatctcccgctttaccgccggatgggtgatggcattgagccgacgcagctccattcggtcttcaaacacgatgcggctgagggccttccggtccactgtgccatcggggccagccacagcggggaactgattgagcaccgtgcgggtcaggttccgatccagtttgagcagctgatgatacacctggtcggcgtcgatgatctgccagcccatctgctggagacaggcgcccacactgcttttgccgctgcccgaggtgccggtgatgcccaccacctggaatttcaccggatgcaccacctggaatcctgccgctttgtggatgcggttgctcaccgccaacccttccccaaagggacggggagcctgagccagaatccgctggcaggaggtggcgtccagatcccgcagggcagcaaaaagctgctggccctgggcctgcttgtcgcaggaggggccataggtgcgcacagggcccttttcatcgtcatagaaatcatggtattcgtcaaagcacagcaccgcgtcatgaggctgcatctcctgctcgatggcccgggcggtcacatcgggcgcgcccacaaagagcagcaccggcgccttgggggcgtaatgacggtatttcatcccaggggagcgcaccggctggccgggggccacctcgtggaacaccgcttcatcgatctccacattcttccccagcacccgcttcagctgtttctgggtgatggcgccgggacggagaatccggggcacatccccggtcatgtccaccacagtggactccacgcccaccgagcactcgcctccatccagcaccgcctcgatccggcctttcatgtcttccatcacatgggcagccgtggtggggctgggttttcccgagcggttggccgaaggagccgccagaggcacgcctgcagcgcgaattacatcccgggccgccggatgctgaggcatccggatggccactgtctccagtccggctgtgatctcctgaggcacccgggggcttttgcgaaacaccatggtcaaagggccgggccagaaggactgggccagcttttctgccatgggcggcacctgctccaccagaggcggcagatcctccaaagaggcgatatgcacgatgagaggattgtcctggggccggcctttggcttcaaaaattttgctcaccgcctgcccgctggtggcgtcggcggccaggccataaactgtttcggtggggatggccacaatgcctccccgacggagaatctcccccgcccgctgcacatcttcctgttcatttgccttcaaaagcagtgtttccatcatgttttgactccttccgctggccccggtgatggatgttattccattcttccgcaaaaatgacactcgtaggtatacaaagtctcccgaatgatctgcaaagccgcttcccggcccagagtgttgctcaaagtggtgtttttatgttccagactcttatacacctcaaagaaattggcgatctcattgaggatatgaggaggaagctggttcacatcctgatagtaattccaggtggggtcctccagggggatggcgatgatcttgtcgtcatattcctccccgtccaccatgcgcaccaccccgatggggtagcactccacttccaccagcgagtccaatgtctcgctgcacagcaccagcacatccaacgggtcgccatcatcggcataggtgcgggggataaagccgtagttggccgggtagtgggtggaggtataaaggatccgatccagacgcagcaggccggtgcgcttatccagctcgtactttttcttgctgcctgccgggatctcgatcactgccatgaacttttcgggtttgatgctgctggggtcgatgtcatgccaaatattcattcgatacacttcctttattctatgccggctctgtctctttcatcaccggttctttattcttctgtccccgcccgcagcttttccgcctgatcggcggcgatgagagcgtcgatgatctcgtccagatctccgtccagtacggcgtccagccggtggagggtcaggccgatgcggtgatcggtgacccggccctggggatagttgtatgtgcgcacccgctcgctccggtcgccggagccaacctggctgcgccgctcgctggcccgctccttgtccagggcctgctgctgcatttcatacagcttggtgcgcagaatcttcatggctctgtcccggtttttgtgctggctgcgctcgtcctggcattccaccaccagcccggtgggcaggtgggtaatgcggatggccgactcggtcttgttcacatgctggccgccggcaccgccggaacggtaggtatcgatctgcagatcaccgggatcgatctgcacttccacctcttcggcttcgggcagaacggccacggtggccgccgaggtatggatgcgcccggaggactcggtctccggcacccgctgcacccgatgggtgccgctttcaaacttgaagcgggaaaaggcgcctgcgccccgcacctcaaaactgatctccttgatgccccccagctcggtctcattgctgctgagcacttccaccgtataacgcttccgttcggcgtacatggagtacatccggaagagggaatgggcaaacaacgccgcttcctctccgcccacgccgccgcggatctctacgatgacattcttatcgtcgttttcatctttgggcaaaaggagcagacggatctgctgttccagctcttccagacggtctttgctctcttcaaactccgcctgagccagctcccgcatctctccctcttcgctgtgcatcagctcctgggcatcctccatatccttctgggtgcggcgataggcccgataggcctccaccaccggggtcagctccttctgctctttcagcagacgggccgccttttccggatcggcatacagatctccctgggccagcgcttcttccagctcgccaaatcgtttttccacaagttccagcttttcaagcatacttttctttttcctttatctctatgattatttcacatattttccggctgtgcggcgcaccagcttctgcaaggccaggtaaagggcggccgccacggcggattggatcagattgagaggaattcccgctgccgcggcccccaggccgtacaccagccagcttcccagaaaatacccggccacattgatgaacgaggccagcagcagtcccagcaccatccgccagggaccggcctgcttccctccggccagacggcacatggtgtaggccatcagccctttgatcacaagggacatgggggcccagggcagcatggcgcccaggaaaatatcggccagcgcggccccggcagaagccgccaggatggcatagggcgtggggaggatgacgcaggccaggtaaatcaccccatcgccgatatgggcatactcgttgaggatgcgcaggaaggggaacatcaccgtaagcaatatcatagcggtaaacaccgaagcgatgaccagcatacgcacattggtttttcccattttccctgtctccttccaggctccggctttctccatggccggaagctaccttaaattatagacgaaagcccgcctgcttgcaagggggagcctccctctctctgccctgcttttccaaagattttaccctttttccctctgctttcgccgccggtgatctctccccttgtcttttgagggatatgacaaaaaggccgccgcagaatttcttccgcaacggcccttttttatggctcttagagcactaccacattggcagcccgcagcttctcgctgttcttgggatcgggctccacatcaaagctcacctgctggccttccttcagagtgcggaagccttcggcctggatggcggagaaatgcacaaacacatcctcgccgccctcgtcgcaggacaggaagccgtagcccttttcgtcgttgaaccattttactgtaccggtcatgataggtacctcccatttctgtttgaataattccggtgtaaaaaaaatctcacacccttttgcaaatcatcaggagcaggacaatgacttacaaaaaaatgtgagacgatcgttcattccagaatattacgagatgattataccaacagaaagcggccttgtcaaacaaaactttctctctgcatagcggggtttttcccgggcaaaatacagtcattccaaccatcgatctcccatgagtgcaggaatagtatacgcattttcggagaaaatacaactgcctgcaaaggaggttttccacatgaatgaaaaacagcgcgccaatggggctaaaaaggtcccggtgaaaacggtctgcacatctgcaggaatgcgaaaagatcgggtgcgtcccctcacccacgcgcctctccccgatgagcaaagcgttcgggaagagatgcactgggtgatggaaaaccagaaataacgcggccagaccgcgaaagaaaggatcaatgcttttatgaaaaagaagctgcttgcgctgctgatggcctgcgccatgctgatgatggcctcagcctgttccagcaaaaacgacaccaacaccggcaccgacaccactcaggattcggtccaggatgacatgaacaacaccgaaaacgatctgaaggatgcaggcgatgacctgaaagacgccggcaacgatatggtggacgaaggcaaggacattctggacgacgggaaagatgtggtagacaatgccatcgaggaaggcaaacaggccaccgagagcaacaccgacagcgcccagaaaaactaaccgagcaaaagaaggcggtctttaccgccttctttttatgcaacaattctttcatccttatttcatattttaggggcttttttgttcataaatcgctggtaaagtgatagtctcctcaggggacgccctgaggagacacaaccccttcagtgaagaaaggatgagaacacagcataaaacgctttttcgccttgctgatggcttccgcactgcttttgtcggcagcggcctgttccagcaaggacgacacccaggacacttccagtcaaaccagtgataccagtgatgtgtccggcaatgtctccgacaataccgaaagcacagattcctccagcatcaccgataccgatgaggattcctccggtacattatccgatgagctggacgatacagaggacagcacagactccctgagcgacgacagttcctccgatctgacggatgcccccagctcggataccaccggcaccaccgacatcggtgattcctcgcaaagcagtgactcttcctccactacggacgataccactgtgcagccctaaccaagccctttctaccgacagtgtctttcccagtgaaagattctgtccattccctctttatacctctcttttcaaaagcaagagccgccttccggggcggctcttgctgagcgtgtcgaaaaagtgacctaggtcactttttcgagtttttgcaaggggctgtatgcacgccgttggcacacactggccccttgataggtgcaaaaagccacgcacaggtcgcggctttttgtggattgatgaaaggtagggcaaacgatctttttcgttatataggtttctcgacagactgaagaaagagccgtcacttcactgaactgccccatcttgtgcggacagtacaaaaaagccccctggcaggaaatattaag

SEQ ID NO: 2118 - DNA, 32759 bp, Unknown
  16S sequences of unknown bacteria
ggcttctctcggcagaccttttttctgcgcccacctgccgtttccgtccattatgaacgcgatatgcttaagtccgcttctctttaccgcttccgtcggtgttattccaatggggagagtgtttctttcctgcatatgatttcctttttaccaatactaagcgcccggcttggtttttcctcacaataccgggcgcacgatgtttatagtatacttaaatctccatgatttccttgtcttttgcttctgtaatggtatcgatctctttgatatatttatctgtcagatcctgaacctgcttgtcggactgcttctgttcgtcctcggtcatttcgctgttcttcttcatctgcttgctcttgtcgttagcgtcgcgtctgatgtttctgatggagatttttgcttcttcgcccatctttgcgatcttcttcttgatttccttacgtctttcctcggtgagctgcgggaatacaagtctgagaaccttaccgtcgttcattggtgtgattcctacatcggatgcgagaattgccttttctatgctcttgagtgtggatgcgtcccagggagagataacaagagtcttcgggtcggtgactttaacctctgccatctgggttattgctgtgggagatccgtaataatctacggtaacatgggaaattgccgctgtatttgctctgccggcgcgaattacggaaagtgcttctttgtaggtctcaattgtctttttcatttttgtctcgaattcttttacgtcaagcttcattttagttctcctttattctgaaatttaaaattaatacattattgcgtcggtgtcttcgtaggtcacgagcgtgcctatctcttcacctgaggctgccttgaggatattttcgggttccttgagcgcgaacacgtacatatttatcttctgttccttagcaagtgcggaagcggaaacgtcggtagcgtgaagtccttttacaaggcattcgtcatacgaaactatcttatatctcgggacgcttctgtcgatattgccgtccttatctacggggtcttttgtgtagattccgtcgatattctttgccatgaggataacgtcggcttcaatttcggcggctcttactactactgtggtgtcggttgtaacaaacgggattcctgttcccgctccgaagaggactaccgtgccggattcaagataagaaattgcttttctgaagtcgtactgctccgcgaagctgttcatgcctacgggagacattactcttgcgctgcatccggatttttcaagcgcgtcctccattctcaggcagttaatcatcgtaccgagcatacccatctggtcggctctcgcacgttttacgccttttccgtaagctccgcgccagatatttcccgcaccgataacgattccaacctgaacgccgtcgtcagtcagcttttttactactgtcgcaatttcagcaattttttcgttatcgaatatttcatgcgagtccttttttgcgatagcttcaccggagagcttgagaagcactcttttatatttactgctcataatattacctctcacatcatacataatcgttccagtatattttacattatttctcgcgatttgtaaatagcattttttataattgcacgtaaaaaaatcgaataaatcagcaatcttccttcaaattatttgacttttcaaacaaaaaaggagatacgacgaggtatccccttatgttatttacagaataattactgagccttgcctgtgagtcttgcgatctcgtcagcgaagtcgtcttctctcttttcgagaccttcacccttttcgtagagaacgaaagagtcgatcttgatgtcagcgccgagttccttggaaacctgagcaacgtacttgccgattgtaaggctgtcgtccttaacataaacctgttcgttaaggcaagctctttcatagaagctgccgattctgccgtcaacgatcttgtggaggatagcttcgggcttgttagcgttcttttcgtcgttcttgagctgagcaacgaggatttctctttcttcagcgagaacggattcgggaacgtcttccttagatacgtatgtcggaggtgtgccggctgcgatctggaggcagatattctttgcgaattcagcgaattcaggcttagctgctgtagcgtcgtctgtgctgaacttaacgataacgcctgcaactccgccgccatggatatatgtggaggtgatgccgtcaacgattacaaaacgacggatattcatgttttcaccgatagtgaagatcatatccttgagcttagcttcaactgtttcaaaatcagcgtcataacggagagtcttgagttcttcaacggaagcgggcttgtttgcaacgataaccttaaggatattcttaacgaatgtcttgaatgtttcgttctttgcaacgaagtctgtttcggcgttaacttcgatcatagcagctgttctgccgtcaacgagaatgtcaacaacgccttctgccgcgattctgcctgccttcttatcagctttgccaagacctttttcacgaagaacctttattgcttcgtcgaagttgccttcggtttcaacaagggcttttttgcagtccatcatacctgcaccggtcttgcttctgagttcgtttaccattttagctgtgattgctgccatattattaaactcctgtattataaatttctcgtgtatgatcagttcttagcgtcttcagcgtcctgagcttcttcagctgctgtgatttcgggttctgctgctgcgagctgttcgccctgcttgccttcgagaactgcgtcagcgataacggatgtgataagtctgataccgcggatagcgtcgtcgttgccggggataatgtagtcagcgtcgtcagggtcgcagtttgtatcaacgatagcgactaccggaataccgagcttcttgcattcgagaacgcagttgtgctcttttctggggtcaacaatgaacactgcggagggcagacccttcatgttcttgataccgccgaggttcttttcgaggttgtatatttccttctggagagcggcaacttccttcttgggaagcatatcgaatgtgccgtcttcctgcatcttttcgagagaacggagtctttcgatggatgtcttgattgtcttgtagtttgtgagcataccgccgagccatcttacgttaacgtaatacataccgcagcgttcagcttcttcacggattgtatcggcagcctgcttctttgtaccaacgaagaggatgtttccgccttcttcagtggtctgacgaacgaacatataagcttcttcaaacttcttaacggtcttgttaaggtcgatgatgtaaacgccgtttctttcggtgaagatgtactcagccatcttagggttccaacgtctggtgtggtgaccgaaatgtacgccggcttcgagaagctgtttcattgaaacgatagacataataatgtcctccttcggtttttgtccaccatatcgcataaatccgccgccggaattttacggggattttttagatagctttgattattcaaagaatccgcgcaagcccgaactgccgtcagccgagctttttacccgtccacccgaacaacatgaccggtctttatcaccgtcaacgcttcgtgaatttggcaccgggcggaattgactccgatatgtgtgtattaatatggatgcagaaatactccgcataccactttattatatcacataggattttcaattacaagatatttttacactttaacattttatttacaaatcgaatatccagccttttctctttcgctcttccctgcacttttcttcgcagcggcatatttttccggcgtctacgagaattgtgtcctctcctatgcattttatcatatcccaccgtatctttatgcagtttttgtttccgtttatcgagaaaaacttatccgaaacatacacagccgttactcttccgcagtcggtgtcaatgtccatatcgcatatatatccgagcttttttccgtcgcacacgtttattacatccttttctctgagttcgcaagatgtaagtgtcataatgcacctccgttcgggtcattatatgcgcgcttcaccgaatattatgaaaaaaaggaacctgcaccttgaatacagattccttatttttattaaattaggtttccggcggatagaggtcgtcgtgccatgtgctgtaaatggaagctacagagttttcgttttcgaggtctgtgagctgcttgaagagttcgctgtctttgagttccttcttgtactcggagatagcgtcgtcgaattcagcatatgtgagcgcgtcgagctttgccttatattccttggagagatcatcaagctgcttaatgagatccttgttgttatcgttgatatatcccttgaacttgatgtaggggctggagatggagtcgatgttctgctgcttgccgtaatcccagtaatccatggacataccttcgcccggatatgtcatgtaaacgttaccggtagttacaagatccatctgataatcgttgttgaggattctgatggtgtcctgagtatcttgattttcatattcccagttttcgccttcaataccgtactggagaattgttcttatatcggtgcttgtgttgatataagtgatgatctccattgcgcgggagaggttctttgaatatgtgcttactgcgagcatattgccgtatgcgtcttcttcggtcatcatgggcttggagtagatgtatgtgtagtactcgtcgccgtactgttcaacgattgaagcgtcgccggcaactacgcctacagcaaacttttcgccgtccttgattgtaccgtcgccgatataaccgagctcggaaagttccttcatagcgccgattgtgttaacgaatacgttgattgagaacacactcttcggaacgagcttgagcttataggacattgtgttggtgatctgagaagcgagtatcgaccactggctctggtctgttccccagtatgtcatgttggcgggttcaacttcaccgagaagcggaactacgccgtcaagatgctgattgccgatatccttgatgaagtctgtacacttaagaagcgttgtgagttcatcgggatcgtagtcgtatgtatcaacaagttccttattaacaaggaggtactggtactgacctaccggatggttattcggaatagcgtatgtgccgcttacatttgcgagttcaaggaatgtcgggtaaatgtaagttttgagcagctttgagtttccgctgagttcgctgtcgagctgctgaatgtactcgttttcgatgtagctgttgtagttgtcatagccctgtacaaggaagatatcgaactgtgtatcgcctacctcgggatactgcttgatggagataccgagatcgttgacgatggtttcttcttccgtctcaacagtttcggtagtttcctcgtcgtcgcctgtatccatgccggaaacgtcaacgccctgagccttgagagcttttatctctttacgtctcgactcggctgcggactcttcttcgagaatctttgtattgatggagctgagagtgtcgtcaatatatgcctgatattcgttctcgggaataagtctgagatcgatagcggtatcgaatttagcctgagtgagtctgtttattgctgcttcgaccttctgtgcagcctcatcagttgttccggacttggtaggaagcgcaagtgtaagtgtcattgatacacgaacggactgttctgtatcagctgttgctacatcctcttcctctgcctttgacgaacatccgactaagctgccggcagtcaaaagagccgcgagcaagagactggtaagctttttattcatttgggaatcctcctcataagattctgggtttgacctataataacgcccatattaattcttattttattgtacacgaaaagtgcggatatgtcaagctttttttatatattttgttctgcagaaaacgcttttttagcttttttatgccaaaatatcttcaagtttattgttgcaatggtacaatcgggacaattaatttttagttaaaattccgttttttttgtttgtttgacacaatattttcgtattgaaatattgataccatccaattttattcactcgagatagtctttaagtctttttgagcggctcggatgtctcagctttctcagtgctttcgcttctatctgacggattctctcgcgtgtgatattgaactcctgaccgacttcttcaagcgttcttgttctgccgtcgacaagtccgaaacgcagctttaagaccatttcttcgcgcggagtaagcgtatggagcacctcgccgagctgttcccgcaggatatgataggacgcttcgtcaacgggagtgggagtatcgtcgtcggggatgaagtcgctgaggtggctgtcgtccgcttcccctatgggagtttcgagcgacacgggatcctgcgatatcttcattatctccctgaccttgtcggcgttcattccgatgtctgccgcaatttcgtccgatgtggcttccctgccgtattcctgcaaaagctggcgctggcttcttgaaaccttatgtatcgtttcgaccatgtggacaggtattcttatagtacgtgactggtctgcaatcgcgcggcttatcgcctgtcttatccaccatgtcgcgtaggtcgagaacttatatccttttgtatagtcgaacttttcaacagctttcataagtccgaggttgccctcctgaatcaaatcgagcagcaccatacccttgcccatgtatctctttgcgatgctcacgacaaggcggaggtttgattcaaccagtctattcttcgcgtcctcatcgccctcgtacatttttctggcaagctcggtttccgtatccaaatcaagcagcggtatctgtccgatttccttcagatacattctgacgggatcctcaaccggaagtccttcctgcgcgagtatcttcgtcatttcctccgctgtgctgaatcggcttacgtcattgctgatttcgttaagctcttccgggtctatcaggtttattatatcctgaccgtttttttcatattcctcgtattcatcctcaagctcatcgcctgtgtcgtcgagaacttcgtcaaagttttcttcgctcattatgtcttccgagccgtccataactttaccgttgtctttttcggaatctgtaccgtacatttttacctccgtttcgctccgctgagtcagcggtctgtatgcagtcacccctccggttgctgtagtttatttaatcagtttacatcgttaagaaagcctttgagcggttttgatctgctctggtgtctgagctttctgagcgcttttgcctctatctggcggattctttcccttgtgatattgaattccttgccgacctcttcaagcgttctcgttctgccgtcttcaagaccgaaacggagttttattaccatttcttccctgggcgtcagtgtgtgaagaactttattgagctgttctctgagaagctgatacgatacggcttcggcgggtgtaggcgaggaatcgtcgggaataaagtctccgagatggctgtcgtcctcttctccgataggcgtttcgagagacacgggatcctgcgacgccttcattatctcacgcaccttatccgcgctcatgccgagcttttcagcgatttcgtccgttgtaggctctctgccgtactcctgaagaagctgacgtgacgcacgtgacacgcggtgtatcgtctcgaccatgtgaaccggaatacgaatcgttcttgcctggtcggctatagctcttgttatcgcctgtcttatccaccacgtcgcgtaggttgagaatttatatccctttgtatggtcgaatttatctaccgctttcataagtccgaggttgccctcctggataaggtcgaggaagtacatacctctgccaacgtgctttttcgcgatgcttacaaccagtctgaggtttgcttcgacaagctcgttctttgcgtcctggtcgccgagagctattctttcagcgagataagcttcacgttcggggtcaagaagcgggattttgcctatatccttaaggtacattctgacggggtcgtctatcgcaacgccttcttcagcgaggaatttgtcgatatcctcattatcctcgacctcttcctcggtatctcttacaacgtcaaagccatcgtcttcgcttccgtcgtcatcgtcgttgttctcgatatagttggttatctcaattccgctgccttcgagtgcctcatacaccttgtcaatctggtcaacatcgtaaccggagtattcaagcgcctccataatatcgttgtttgacagtgatccttgggactttcctttttcaatcaatccctgtacatcaactttctttttgctatccatagataaacctcttgtttggtaagtaatgttttatttactgcgtctcatgctgtttcttttttcggcaaggacgtcttcaagggacattttgctgtcgtcttcttttttggcttctctgagagctctgacatatgtatcaaacgttatctcatcgctcattttcagctcattccggcgcgctatcattccgaacacacgcgagacctcatcctgtgtgaagtcctcgttcagtatgccggggttgaatccgttttccgcagtgtgctccttgacgaacgagaacaggcgctttccgagggatgtgaaaaagtcttcttcttcgagagcttttccgtcgacgggtcgcgttatgtactcgtttttcacaagcatcatgcctagaacgtcttcttcgagctttcccgccttcggatttttcgcgtaatcgggattcactctcacgtcggttcccatcgtgacacggataagctcgccgcgccgttttttgtcgttttcgcggatgtttcttcggcgttttgactccacgtcatttcttatgcttacgggagcgacaccgaattccgcagctgtttttgatatgtatatttcccgctctacgcttgaatatacacctgctatatacgacgtgatgtctccgagagcttttattctgtcctcgtcggagtcggtgttgtatttcgagtgtatttcgtcgagcttgaaatcgaatttcccgcggcttccctcgatgagctttttgaactcagccgcgccgaatttttttatgtattcatccgggtcttttgcgcctgacattttcagcaccttcgcttcgattccggcggcgtcgagtattcctatcgctcggttagcggctttttgtccggcttcgtcgttatcgtaggaaagaattactttgtcgacgtatttttttatcactctcgcctgctccgacgtgaaagccgttccgagagacgctaccgccatgccgaaacccgcagcgtgcattgcaatgacgtccatatatccttcgcacaggataaaataaccatcttttgtgtttttcgcgtagtttaaagcgtacaggttcttcgtctttttgaatgcgggagtgtcggaggtgttcaggtactttctgtcggactttgccgagtcgattattcttccgccgaacgctatgacatttcccgacacgtcaattatcggaaacatcacacgtccgcgaaagtagtcgcagtagccgaagtcgttttttcctccgaggtacgcagtttttatctcatcttcgccgaatccgagggagagaagatggcgcacaaggttgttccctttttcgggagaatagccgagcccgaaccgttttatagtcgcgactgacagctgtctttccgcaaggtactgtcgtccgggagcgcctattgtttcgtcaaacagcattgcacggtagaattttgcggcttcgaggttcatctcaagcactctcgaacgtgacggtccggagctttttccgctgtcttcgctgaaatcgggcaggtcaattcccgctcttttcgcaagcgtttcaatggcagaaacatagtcgaggttctctgcgcgcataacgaacgatatcacgtctcccgcagctccgcatccgaagcagtagaagctctgtgtggcgggatatacggtaaacgacggtgttttttcgctgtggaacgggcataatcctttgaggttgcttccggctcgtttcagggtcacataggaggatatcacgctctcgatgtcacagcgatattttatgtcttctataatattcgacggtatcaagacgcgcgcctcctttttgcgttattttcacattatgttcgcaggttcgaatcctactagcccataatgcgttattcccacacgtgcggtatgaacaggtctttatacatctctattgcgtatctgtcggtcatgcccgcaacgtaatcgcagacgcaacgctcgacagactcgtttttcgtattgttgtagtaaaactcaggcattttctccgggtgcttgcagaaatatccgaacagctgtctgagcatttccacggcttttcgctcctcttttttggcggaagaattgtaataaactcgctcaaacagaaaatttctgagcttattcgtcgcgtcccacacctcgggagtcatttttatatcgtcaagctcgcggcttccttcaatgacggacgtaaccattgtgttgattctgttgctgtgggtgtatccgagaacctccgaaagctcacgcgggatatcgtcctcttttataacgtttccgcgcacggcatcgtcgatatcgtgattgatatacgcaattctgtcggcgaactttattatcacgccctcaagagttgacgctttgttttctcccgaatggttgactattccgtcacggacttcccatgtaagattaagtccttcgccgttgttctcaagcttttcgactacacggagactttgcttataatgcgtgaaatccggagaatagcactcctgcatgacgctctcgcccgtgtgtccgaaaggagtatgtccgaggtcgtgtccgagcgctgcggcttcacacaggtcttcattcagcatgagagcccgcgcgattatcctcgctatctgagctacctcaagcgtatgggtaagtcttgtcctgtagtgctcgtccgtcggaaagaaaaagacctgcgttttatgcatgagacgtctgaacgatttgcagtgcagaattctgtcgcggtcacgctgaaactccgtcctgttcacgcactcttctatcggtttatcgcgtccttttgagttttcgcaaaggcaggctttcggggacagcgaatttctttctctctcataaaatatttcgcgtatatttcttggtgcatcagtcatcacgtcgtctcctttctgtcgccaaagcggtgcaaaacaagtcgcgttttcctaactcacaataaatatacgcaaaaaaacaggttatttctttttttgagcaaaattttgtttttcatcgcgcagtttgttacaattacgcgattcttttgataacttaaccgatgcgggaagctctttcctcacatccgataacggcgatttttccttttccgtatgtcagctcggacaccaaatcgaacagttctcgtgctctggctttttcgatagccgaaatcaaggtaacatcctctccgaagtcgcagttttcctcagtcgcgccgattcttgcgagagctacggtaagtctttgataatcggagtatgtcaccgttatcttcgcgaggctgtactcttcaaacaccgcaagaccggacgcgtctaccgcaatttttgccgccgaggtgtacgctctcacaagtccgcccgcgccgagaagtattccgccgaaatatcgcgtgactacaacggcaagatcggtcgctcccgacatttttactacgttcagtatcggcactcccgctgtacccgatggttctccgtcgtcggaatatcttgcgacagcgccgttattcagaagatatgcgtagcagttgtgcgttgcgtcgtggtattcacgtctcttcgattcaatgaatgcgcgcgcttcgtcctcgtttctcactggagtcgcgtgtcctatgaatatggattttttctcctccatttcacatgagacatttttcgcaagagtaattctctttttcggagtttcgatctgcttttctttcaccgtatcggttttctttttcatcttattatcaaaaaatccaaacaaaatttattctcgttattcttcaacaatgtattttttcagttttgccaagagcttttcgtcgacgtcgcactcacagcggattccatcctcgcagtagtcaactacgacattgtcgccttctttgtagatagttcccgtgatgccgccctcttccggtggaatgaagagcttgatgtgctttttgccgttctgcgccattttttcgagcgtttcgacgagcttatcacatcctgctcccgtttttgcggagataaacactacctcggtattggttttcgccgcgagtgttttcatctgcaaaagcgcgtctcggtcagtgcaggcgtcgcatttattgaaaatgtatatcatgggttttgctgccgctccgagctcttcaagaaggcttgtcgtcacctcggtctgactgatgaattcggggtcggacgcatcgatgactatcatgagaatatcggagaacacggcttcgtccagggttgacttgaacgcttttatgaggtggtgcggcaggtttctgataaatccgacagtgtccgtgagaagcagcttcacgccgttttcggtgacaaactgtcttgttgtggggtcgagagttgcaaaaagcttgttttcagcgagtatgccggctcctgtaaggtaattgagcagcgtactttttccggcgtttgtatagccgactatgccgcacttcacgatgccggatttatctctctggcggcgcattaccatacggttctgttcgacttttctcagctcttcctcgagagacgctattttttctttaatcctacgtctgtcaatctcgagctttgtctcacccggacctcttgcgcctaccgagcctgatgatgcagctccgccctgtcgtgaaagctcttttccgcgtcccaccagtctcggggaggtatatttcagctgtgcaagctctacctgaagtcgtccttcactggttctcgcgtggtcggcgaaaatgtcaaggatgagcatacttctgtcgataacggaaacttccgatgaaatatcgtcctcgattgattttatctgggaaggagacagctcgccgtcaaacaccacaagctccgctccgagtgtctcacaaagctgcgacagctccgtcatttttccctttccgaggacagttctaacatcaggtgtttccctgcactgagtaactatcgcaacgcactcgcatcccgcggtttcgcacagtttttcaagctctccgagggacacagtgcattcgttttcctgattctgcttatatatagcgcaaaggacagctttcatcttctgtgcgccgatttcgtttttttccatataaacctccgttattttatcctcaggatactctgaattaatcggatttttgcgataaaaggctgaaatatagggacttttttcgcaaaaataaccttaaattagaggcttcctaaattacttaaaaactcacattcatcctcagaatgacataaaaatcgggcaggacaacaaagccgaagccttgtaaaatcccgcccgaaagctttatcggacaaaaattccggagagcgaaagattatttacctctctgctcaagacgcttcttgaacttatcaacgcgtccgccggcatctacaaacttctgcttaccggtaaagaaaggatggcacttggagcaaatgtcaacacgaagctcaccgttagcatcgcccttcgttgaacgtgtctttacggtttcaccgcacgcgcaacggattgtcacctctttatactgaggatggattccctctttcatttctattcacctcttccaaacaatttgaacaaacgacttttcgcttgctaaacaataaatttgtgttattacggaacacaccgtaaattatctctgaagaaccgcggattttgccgcagaacataagagcctatttctctccgtttttgcagtaaactaaaacttagtcagctacgtaaggaaggagagcaacgtggcgtgcgcgcttgatagcaacagtgagctgtctctgatgcttagcgcaggtgccggaaattcttctgggaaggatcttacctctttcgggtgcaatgcactttctgagtcttactgtatccttatagtcaatgtaatcaatgttttctgcgcagaacaggcagactttctttcttctgttgtttctgttctggcggttgtatctctgctgaggtgcagcttctgttctttctgtggttgcgggagcagcagtctcttcagcaacaacttcggtcttttctgtatccatcttacttaaatcctcctgttaaattgagtgaattacattagaacggtaattcttcgtcatctgatatttcttcaaatttcggagctgtctgattctggaagccggtattctggctgcccgtatatgctccgtatccgtcaggtacatacgaaggagcctgattctgtgcatacatagccgcagcctgctgtacagcgatcgggctttcgctttttgcgtcaacaaaatatgcctcgtcagcgacaatttccgtagcaaagcgcttctgaccctgctgatcggtccatgttcttgtttgaatggttccgactacgcagatggagcttgcttttctaaaatagcgcgtgatgaattcagccgtctgtctccaagcggtaacgttaaagaaatccgcctgtgcttcctcgccagccttaccgccgaagcgtctgttaaccgcaacggtaaatgatgttacggaaattccggacggtgtggttttgagctcgggatctgccgtcagacgtcctccgaggataaccttgttaaaattaaagttagccatattttctccttaaactaaggacggtgaagtagcttacgcttcagccttttctgccttttttgacgcttttttgtcttcgtgacgaattacgatggaacggagtatgccttctgtgataccgaaaattctttcaagctcaacaggaagcgtgccttcgctcttgaaggtgatcagtgtgtagtagccctcggtcttgtcgttgatgggatatgcgagtttgcgcttgccccattcgtttgcttcaacgatttcgccgttgtccgagatgagctttgtgaacttggcaacaagtgcttttgtagcttcctcggtcagatcagggtcaataacaaaaagggtttcgtaagaattgatgatcttttccattgttttatacctccctatggacttcagaccgtcgacagatcattcgacggtagagagacaggcttatgatgatttgcccgttcattttttgattataccattttatttttcttttgtcaatggatttcagcatattttttcagttttttctctatgttttgcggtgattatacggcgcggacatgaatataattctctgaacattaaatccatacggaacggtgaagaaatgaacgatgcgataaatattactctcggcaaaaaggataagcgggcggggaatcagacgaacattccctctgtctcatgcgggctgagcgaagatgaggttgaggcttcgcggaagaaatacggttcaaacgcaatatctcggggaaagcgcgcgggatttttgcggcagtttgtggggaacctgaacgacccgataataaagatactcatagcggctctcgtcataaacacggctttcactttttcccacatcaactgggcggaaaccataggaatcgccgtgacggtatttatttccgcttttgtcacaaccgtatcggagcattcgtcgggaaaggcgtttgaaaacctgtacagcggactggagaatacgacggtcagggtgattcgtgacgggagtgaggctgacataccgctctctgacgtagtgatgcatgatatcgtactgcttcacccgggggacactgtgcctgccgacggtattgtaatgcacggttcgctcgggtgtgatgagtcccctcttaccggcgagagcgcgaaggttaagaaggctttttctcatgcggttttacaaaaatacaagtcctctcccgatgaattcaagccggagacgggagagtcgtcgtgtgtgctgaggggcagtcatgtggcggaaggagacgcggctattcttgtgactgctgtcggggacaaaacgatgtacggctcgattgcgggagaattatcggtcgaaaatgacgtaagcccgctgaaggaccgtctcacttctctcgcgaaaaccatatcaaaaattgggtatgtatccgcagtgatagttgcgcttgttcatctgacggacgcgttttggattgaagcggggatgaatccgacggcggcactggctaagctgcgtgacatacggtattccctgcccgaattcatcacggctttcactatggcgatatcaatagtggtcgtcgctgtacccgaggggctgccgatgatgataaccgtagtgctttcctcaaacatgaagcggttgctgcgctcgggagttctcgtgagacggcttgtgggaatagagaccgccggaagcatagacattctcttcaccgacaaaacgggaacgctcacaacgggaaagctcatggtttcaagcataatctccgccgaaaacagtgaatttcactctgcgaaagccttaaaaagctcgtcaaagtacatatcggaaagtctcgcgaaaggggacagcgcctgctcttccgtcggaaattcaaccgaaaaggcgataaactccttcctcgagataagcggacgcggctcaacagctcagggcgggcaaaagataccgtttgactcatccaggaagttcgcggcgggcatttgcggaaacaaggcatacatccgcggagctgccgagttcattcttccctgctgcacgagctatgtcaccgacgatgggcaagtcaaaatgatgacgtccgacgttcttgacaggctgaaaagcaccgtaaaaagccgtgcgggagcttcatgccgtattctgattcaagccgaatgcacggaagagagctttaagatgctcgacaatggtggattaagtccgactctcgagcttacgtttgtttcgcttttcgtaatccgcgacgagatacgaaaagaggttatcccggcggtgaaggaatgcagaaaagcgggaatccaagtcgtaatgataacgggcgacaaccgcgatacggctaaaaaaatcgctgaggaatgcggaataaccgactcgggatgcgaaatattctcgggaagtgtcggtgcgcagaagtacgcgtcgtcaaaatccatacgctcgcttctcattgacggagaggagctgcactgtttatccgacgaggacttgacgctgattctgccgaagattcgtgtgatatcccgcgtaactccctccgacaaaagcagactaatcaggatttcacgtgccgcgggacacattgtaggcatgacgggggacgggataaacgacgcgcctgctctaaaatccgcggatgtggggtttgcgatgggcagcggaagtgacgttgctcgtgaagccggagacatagtgataaccgacgacaattttgtttcaatcacaaaggctgtgctctacggcaggacgatatttttgagcatacggaagttcatcacgttccaaataacgatgaacatggctgcggtcggagtctcggttctcggtactgcattcggaatagactcgcccgtcaccgtaatacagatgctgtgggtaaacataatcatggacacactggggtctcttgcttttgcgggcgaacctgcgctggaggaatacatgactcatcctcccataggacgtggggagcacattctcacgcggcgcatggtgtggcagatcatcctcacgggcggttatgcagtcgcgctgtcgatgttcttcctgctctcaaaggatttaaggcatttcttcggcggaagcgaaacttattacatgacgctgttcttcgcgatgtttattttcatgggaatcggaatagcaatgtgtacgcgcaccgagagaataaatattttcgcaaacatatcgaaaaacaaagccttcgccgttatcatgccggcagtcgcagcggttcagcttcttataatctacttcggcggcgacgttttccgatgtgttccacttgcgccggctgagcttctcatgtgttccgtgttcgcgttcaccgttattccggcggattcgataagaaaatcggtacgcgccatagcttcacgacaaaaataaaaaataagcctgattttttacgtcaggcttatagttttgtttaaggatactctgaattaatcgaagtagaggggcttgagcttctggtcgatggacttcttcacaaccttttcttttgctttgtattcggaggaaaggtttgtcttgttgttctgaagcatatctctgatgaggtaaggcattcttacaaagtatgtttcaccgaactggaaagagaagtcaaagttacgtcccgcaacgatgatgtcaaccatttcagctgtttcagcttcggaggagtactttcctttaagagcggtatcgtagtattcgggataaaccttcttatagctttctgcggagagagcggagaaaatagttccgatgaattcggcattgccgtatgcgctgagcggaattacaaatacggagaacttgtcgtctgcgtttgtatagtagttttcctgagcttcatcccacttcggataaggaagaatagagtactgagtttccatgtcgcggagagttgtgtaggcggaaacgaaacgcataggagccattgcgagaagtccgttgcggaagtgattttcttcttcctgagcggtagttgtatatctgaagaatccggggttatttgtgtggaaatcggtgagcttatcaaggatggcaacgctcttgtcgttcatgatagttacctgaatgtcttcgtcgcttacggatactataggtgcgtcgaatgctgccatccaaacgtcacctgcgttttcgatgaagtagccgtagccgaagaagtcgtccttatcctttacgccgttaccgtttttgtcttcgtaaatgccgctgacgatttcgctgaatttatcgaatgtccacttgccttccttaacgagagaataaaggtcgctcgaggaatagccgtagttattcatgatctcaacattaaagaacgttgaatatgtaagtgtcaaggatgttgtggaaaggtcggagcagatagcgtagagacggttgttgatggttgcgttgtcatttgccttctggttgaaccatacctgcgttgtatcaacattgggtatttccttccagttgagaacggcttttgcgcttatcggcacatacgcggtatagtcgtaaatggaaacgatttcatagtcgtttgttccggcggttgccattgtctttacctggttctgaggggaatccatgtcggttgcggagatttttacatcaaaacggttttcaacatcaagatttctgttgtaaacagcatcgttgcaggcgtcaccggtgagttcatcagccacaatttcaagtcgatagtcaacgcttctgttgagcttaggcgtgagtgctctgaattcctgtccgttatattttacgtcgggaagattatcggggatgagctgtcgcttatcgtaatcagaaagctgttcctcggtttcggtgctttctgttgtagtgtccgcagaaactgctccggttgtttcgtctgttttgttgtcggagttctcctttgtttcactgcacgcaacggatgtaagaagcatgagagaagcaaggatcaaacataaaccgcgttttttcattatagaattttcctccatatcggttcaatgagttcttaataaattatcgtacaagacccatttaagataatattattatataatattacacctcttttgtcaataattatatgcacattgaccattcgcttttttatagttcaatataagatttttgtgtaatcgtcttttgcgctatctatgcacaggttaattgaatgtattttgtacaatatgacgttattattttcccgaattgttcattttagtctccgcgagtacataattgttttcaatactactacattaatagttttatccgttgtcgaatcacagtaaaatttcatgcaatctgcacaagtatttccacaaaaataagcctgaccaatcagccaagcttataattttatatttgattatacaggataattcatttttcatcccaaagaacaacggaatttgtttctctggtctttctcaggtcaattattctctggtttgacgagcctctgaacctcagagagatatcttttttggcttcaacaaatcttccgtcgacaagcacatcaataagcgaaagcagctcttccgttatttcgcagtgagcgtgtgttccctccgtcgtcagctcctcgtaagtaaagccggagaacgcccatattgtctttttcggatatctctcacgaactccggcgacaaaaggcagaagcgcgcgttgattcgacggttcaaacggctctccgcccaagagtgtcagtccgtttatgtagtcgggggacagcatttcggtaatgtgctctgccacctcgggtgtgaattcttttccgtagcaaaagtcccaagtctgcggctgaaaacaatgctcgcagtggttggtgcagcccgaaacaaacaagctcactctgacgccgacgccgtttgctatgtcgtagttttttatctcaccgtaatgcatttcccgcacctttcgctaaatcaaagatgaagtaccctgtcctttatctcctgtgttcttccctggttccagaactgagttccgatataaccgcaggttcttcttgcgacgttcattttatcctggtcgcggtttccgcagttcgggcattcccacacgagttttccgccgtcctcgacaatctttatctcaccgtcatatccgcagacctggcagtagtcgctctttgtgttaagctccgcgtagatgatattgtcgtagatgaacttcatcacctgaagcacagcctcgatgttgttctgcatattcggaacttcaacgtagcttattgcgcctccgggtgagagatgctggaactgagcttcaaacttcagctttgtgaacgcgtcgatgttttctcttacgtttacatggtagctgtttgtgatatatcccttgtctgtaatgccttcgataacgccgaaacgtctctgcaagcacttcgcgaacttatatgtcgtggattcaagcggagttccgtaaagcgagaagtcgatgttgtgaattttcttccactcgcggcaggcggcgttcattttttccattatatcgagcgcgaaaggtgtggcggatgggtctgtgtggctctttccggtcatgtacttgacgcactcgtaaagtccggcgtatccgagggaaatcgtggaatatccgccgtacagcagcttatctatgggttctccttttttcagtctcgcgcaagctccgtactgccagagaatgggcgcggcgtcggacagagttcccttaagtctgttgtggcggcacataagcgcacggtggcacagctccagtctttcatcgaatatctgccagaacttctcaacgtttccgccggaagacagcgcgatatcggggaggtttaatgtaacgacgccctgattgaatctgccgtaatacttcggcttgttcgtttcgggatcaacatacggtgtgaggaaggagcggcatcccatgcaggtgtagcagtgaccctcgccgtttttgtcgatttttaattcaagcatcttcttctcggagatgtagtcgggaaccatgcgttttgccgtacactttgccgcgagctttgtgaggtagtaatacttcgagtcgtcgtggatattgtcctcttcaagcacgtaaataagcttcgggaatgcgggagttacccatacgcccttctcgttctttacgccctggtatctctggataagcacctcttctatgattatggcgaggtcttttttctcctgctcgttcttcgcttctccgaggtacatgaatacggtaacgaacggagcctgaccgttggtggtaaggagcgtgactacctgatactgtatggtctgcacgccttttcttacctcatcgcggagtcttctctcgacaagggcatttgtctcatcatcagaaagctctctgccgattatgcggttttcttcgagcacgtcgttgcgtatcttcttacgtgaaacgtcgacaaacggcgcgagatgcgtgagggagatggactgtccgccgtactggtttgacgcgacctgagctataatctgcgttgcaatgttgcaggcggtggagaagctgtgcggacgctctatcatagttcctgtgataacagtgccgttctggagcatatcctcaaggttgacgaggtcgcagttgtgcatatgctgtgcgtagtagtccgtatcgtggaaatggattattccctcgttgtgggcttccacgatatccttcggcaggagcaggcggtttgtgatatctctggaaacctcgcccgccatataatctcgctgagttgagtttattacggggtttttgttggagttttcctgctttgcttcctcgttgttgcattcgataagcgagagtatcttgtcatccgtggtattggactggcgcacaaggtttctcgtgtatctatatgttatgtaagccttagcaacctcaaacgcgccgtgagccatgatctggtgctctaccatatcctgtacttcctcaacggacggacttctcccgagctgttcgcacgagagaacgacactctccgcgatgcgctttatctgaactgcggtcatacggcagctttcgtccacgttcaagttagccttgctaattgctgagatgatttttgttatatcaaactcagcttccgatccatttctttttattattttcatctcggctgttgtacctttctcccgcttttttcagcaggtgattttattattgtaaaaattgtccgctcataacaatacaatatattgcggtgacgtttttaatttgtcacacaacatattgtatatcagcggattgtattatagcacatatagtgcgctttgtcaatgacaaaaaatcaatttcagacgtacaaattttcgcttaaaatcacagcaaatttcgtcataggaatttacccgaaaaatcttgacacggcttcgtcggcaatatccgaggtgtttctgacttctccgtccttatccggcacaagtctgtgggaaactttatcctttctgaaccagataagctgtcgtttggcgtagtggcgggtcgcaagttttatctcttccctgacctcgtcaatagtcttttctcccgcaaaatacggcaaaaactccttatatccgatagcctgcgctgcggttctgctgatttttctgcccgagagtaggatttcacgcgcttctctctccagtccttcgtcaaacataatgtcgacgcggcggtttattctgtcgtaaaggagctcgcggcttgcaaaatctatgatgaacgcgtaatcgtcgtatctgctctcgccggatatctgctcacggtcggtctcggttttggtttttcccgtggtttcgtacacttcgatggcacgcaccactctttttacgttgttcggatgtattgcgtcggcactctcggggtcaatcttccgcagtctgtcgtgaagcgcttcgtttccgtgagtttttgcgtattcgtacagttcctcgcggagtttttcatcctgttcaccctcggaaaacgatgttatcttcatcaccgagtcgtggtacattcccgttcctccgcagaaaatcggtatttttccgcttgaaactatatcttccaccgcatcggaggcaagtgaagcgtaatcagccgcggaaaactcattctccggctcaattatgtcaaggaggtggtgcggtattccctctcgttcggcttctgtaggcgtagctgtgcctatgtccatcccgcggtaaagctgcatggagtcgcacgatattatctctcccccgagccttttcgcaagctctatcgcgagagatgtctttcccgacgccgtaggtccgagcaccgatattgttttaattttctctgccatggcttagtgaataaacatcgcgtcgccgaagctgaagaagcggtacttttcttctactgcggttttgtatgcgttcatgattatctctcggctcgacagtgcggacacaagcataagaagcgtactctcgggcaggtggaagtttgtgataagcgcgtctactgccttgaacttatatccggggtaaatgaatatgcctgtgtcggtgtcaacgggatgaatcactccgttttcgtcggcggcggattcaagcacacggcaagaggttgttcccacagagattattcttcctccgtttgcgcggcgtcggtttatctcgtttgcggcgtcctccgtcactctgatatattcggaatgcatctcgtggtcgacgattttgtcctctttcacgggtctgaacgtgccgagtcccacatgaagaagcacgggaactacagcacagccttttgctctgattttatctagaagctcaggcgtgaaatgcagtcctgcagtaggagcggcggctgatcccggagttttcgagtaaacggtctggtatctttccgcgtcctcgagtttttcggtgatataaggcggaagaggcattgttccgagcaaatcgagcgcggcgaaaacattgtctgcgtccttttttacgttgaactttacaacgcggcatccgccctcaacaacgtcaagtatctccgcttccataacgccgtcgccgaagtctattatgtctcccggcttcgctcttttaccgggtccagcgagagtttcccatatgtcgttttctctttgctttagaagcagaagctctacgggtcccgtggaatcggtttcgacagcgcgtccgaggtctttgtcaaagcggtactttctgtgtccgatgattctcgccggaataactcgcgtatcgtttatgacaagcacgtcctccggatttatatagtcggcgatatcacggaatatcttgtgttcgatttcacccgtgtgcttgtccagcagcataagtcttgacgagtcgcgcggttcaaccggggtctgagctatcatttccttgggaaggtcataataaaagtcggagagcctgagttcggtcttcggcagttcgttttttatcatatcatatcaccgtcttttctctttgcgtagcatatgctccaaaacagcatacggtaatattatattacatccgcgaagaaatttcaacccgttttaagccgcggctgcaattttaacaatttttcaattatgcataacattaatgggaggtgttgacaatgggcagattgtatgatatcataactgtacagaggtaacggcatagtaaagttgtgcataaactgctcccgaaagacaaaacaaaggagtagtttatgaagaagaaaatcatattcaaaggagccgcgaccgctcttgtcaccccatttgacgcactcggagaaattgactttactgcttttggtgagcttatcaagtggcagatatcccggagcattgacgcacttgtggtatgcggaacgacgggagagagtgcgacgcttacggacactgaaagacggcggtgcatttcgttcgctgtggaaaaggcagagggcagagttccgattatcgcgggaacaggctcgaacaatgccgaatacgcgaaagagctgtcgtgctttgcttcatccgagggcgtggacggaattctcgttgtaactccgtattacaacaaggcgacggatggcgggatggagagatattacctcagcattgcggagtcagccacctcgccgattataatatacaatgtaccgtctcgaacgggatgtaaagtgactatgccggtgtacagaaagctcgcggagcacgagaacattgccgcggtaaaggaagcctcgggggatgtttcgctctctgccaccatactcgcggagctgtcggactcgctctcggtttactcgggaaacgacgatttgacgcttccaatactctccatcggaggagcgggtgtgatatcggtgctctcaaacattatgccgcgggagatgcatgagctgtgcaaaaccttcttcgacggaaacctttctgccgcgaaggatattcagctcggtctgtacgacatcatgcgggcgatgttttatgaagtgaatcccataccgataaaaactgcctgcggtgagatgggattatgctctcctttcatgcggcttcccatgtgcgaaatgaatgaaaaaaacaaagccgttcttttgacagttttaaaaaagcacggactgataaaataatgaaatacgaggacgaaaaaatgcttatacccggtcttgtttcggtaactttccgctcactcagtcaaaacgagatagcaaaccttatgtgccgctccgagcttaaagccatagaatggggcggagacgtacatattcctgtgaaggatgatccaaccgaagaggatatggaaaagctcgatgaagcgctgagcaacgcgtcatatctctcggagtctggcaaattttatatcgcgtcgtttggctcatactacagatgcgagggatacgctactcttcacggcgaggctgctgtatcaatcggtgctccgaacatcagagtatgggcgggaagacgttcttctgccgatgctgacgaaagctaccgtgctcttgtggtaaggaacatacaaaatctctgcgacgagatgaaagagcacggaatcacagtttcaaccgaattccacggcgggacactcacggatgaggtggacagcgcgctcaggctgataaacgacattgagagagaaaacttcatgacgtactggcagccgaatcagttccgcgacgaggaatacaacctcacggctctgaaaaaggttctgccgtatgtctcaaatgttcacgtttttacatgggacgcgaagaaccgttatccgcttgaagacggcgagaaaatctggcgtaagtacattgacattataaaaggctcgggcagaaaccatcatcttctgcttgaatttgtgaaagacgactcggtggagcagttctaccgtgacgctgaggttttaaaaagctgggtcgaataacgaaaaaacgcactcgtagggtaaagttccgtattgagtgcgttttcttctttatgcgaatgatatagtctgcttttccgcgtcaacctccgccgtcactccgaaaggtattatgcacctcgggagcgcgtgtcctatgtttatgttgcacagcacgggcagctcatattccgcagtcttttcggcaagcaggcgtttgtattcatcgtggtatttcccgttcatcggctttcccgcgattattccgcttatcacgccgaacattcccgtgcttttcagataatcgagcgcttttgcgtatttttccggcggcatcagctcttcacttgattcaaggagcagtatcttatctttccagtcgtcaagtgacgggaacaagccgtatttttcgcacaccgcgggcatatcttcatatctctcaccgtcaaacatatcgtaaatcgagtcaatgcatccgccgagtatttttcctgagaattgcgccttgccggagataagctcaaatccgctgtttttgtgctctttcagtggaacgccgacctgactttcgtcaaatttttctcggctctcgtaccacgtcccgctcggtgttatctgctttatcgttcccgtgtttaatagttcttcaaaatatttctgcgtatacgggagcatatcacatgagagctcgcagacgtcggggagaaaagcctgtccgtagaaggtgttcattccgactttatgcagcatgaaatggttgagcgtggtatcggaaaagccgaggaaattcttatttctcacggcatttttcagcgcgtcgttttcaaaaaggtacggtgcaagcctgtatgtgtcgtccccgcctatcgcacagagtatcatgtcggtttcactgtcgcagagcgcttcaagcagatcctccgcacgcttttcgggatgttctttaaggtattccacacctctaagagagttcggcatgaattttactcttactcccatgtcccccagtcttttcagtccgatatcacgctcgaacttaacaaaatcttcgccgagtattccgcttgagaggctgactatacttatgttttttatcatttttatatttcctaacctaaatcgatagagaaaaaagcccaccgcgtatatagataacgatggacttttgcaaaaatggagacgaggggaatcgaacccctgtccgaaaacctatccgcacaactttctccgggtgcagactgtctattgtgtttcccgcacgaagctccgtcagtcaggatctccgagtcggtagccttttaatgcatgacgattacaaaagcaaaatcatcgttcacgttcgccactgaatgatgccgagaccaaataagggtcactcccatagggacattccgaagtcgtggcattctccggacggacagccgcacttaggcagcgagagctaattcgttgttagcgtttatttttaaaaatgaggattattatagagattccccatctctacccgcttatcgtacttcaaaatccccgtcgagaccattacgtccccatagacacggaatttctccgtatcttatattatacactattttttcgcgttatgcaatagctttaattgaattttaatcctccggtgttccgataaggtcaactacttcatccatcggacgtctttcacgcatgggcggctcttccgtcggctcacctatcgccacaacagcaacgggagtgtatctttcgttcttcacaaaatcatcaaagcatttctccgcgtcaaacgagcctatgaagcatcccgcaagtccttcgtcagacgcggcaaggagcatgttttcgatggcgcaagcggtgtcttgaatagagaagaggttctttccgcgctcgcctgccattttctcaatgccttctctgtcggtcgagactattattaccgcgccgcagtttactatccagctgtttccggtgtattcgggagagaacttctttatgacttccctgtcgcatatcacggtaaaatgccacgattgcttattgcaggcactcggagcgtgaacggcggcatacatgatgtagtcaagctgtttctttgttatcggcgcgcctgtgtacgagcggcagcttcttcttttgtcaagtaattttgaaaattccatatcatacctccgatttatttaattattttcagtcgtcgtaatcccgtctgctcctcgattttgtcacgcgctctatctcacgaccggcttctgctttcgcgtcggattcacgcttatcccagagctttttacccttgcagagtccgacctcgaccttgacgtgcgagcctgaaaaatacattgacagcggaacgagtgtataactgtcccttgttgtgtactggaacagctttaatatttcctttttgtgcatcagtagctttttttctctcagcggatcgcggttgaagatgtttcccttttcgtatggggagatgtgtattccaagcgcgtaaagctcgccgtttttgacgctgcaatacgagtccttgagattgacctgccctgccctcacgcttttcacctctgtgccgtagagagctatacccgcttcatatgtgtcctcgacaaaataatcgtgccttgcttttctgttcacggcgatgatttttttgccgcctttttcgtttggcattttcttcacctcgatttcgttactatgatatattaccataacgcgctgctttttacaaggggaattttagcgatgtaatgtaaatttaacaaaacagccttacgacctgatgaatcggcaagactgttttttgttataacgaattaatttatattttcatatatccgtccttgacccatccgagcttgcgcattatctcgttgaaaacaatcgaaagcacagcgggaagaactacgcagaggagcacgattccgacccaagacgagccggagtccgctattatgccgataggtccgacaagtccgcatgttcccattccggcagaaactccgctgcattcaagcccgaacaccattgtggaaagaggtccgcatatggcagaggcaagagtgggagctatccaaatctggggatgacggcagatgttgcccatttggagcattgatgtgccgagtccctgcgaaaccacgccgccccatttattctcacggaagctgcacgccgcaaatcctaccatctgacagcagcatccgacaacagccgcacctcccgcgattcccgaaatggatatcatagcgcagagagcagcggaggatatcgggagtgtcaggactattccgacgactacggacaccacaattcccatgagtaaaggctgatactgtgtcgcggtattgacaaaatcgccgaggtaatacataagatacgcgattccggggcagattagctttgcggtgagaactccggcgagtatcgtcacggaaggagtaacgagaatatctaccttggttttctttgaaacgagcattgcaagctcagccgccacgattaccgcgaagaacgagcctgcgggacctgccgttacgttaatctcccctatcgccgttccgagagaatatccggcgtatccgactgtcgcacacgagaatatgacgagcggatcggctttgagcgaacaggctaccgctacaccaatcgccatcccggcagaggctgaggcgagcttattgatatcggtgaacaactcaactcccgtatattttcctatggtgttaaagatagttccgatgagcagtgacgcaaacaaaccgagagccattgctcccatcgcgtcgataaagtacctttttagataccctctgattttttccttcatgatatcctccgaaccatgcagtttatctattttattataacataatttacccgccaaaacaattgacatttttgtcagagatagtcaggagagcggagagatttttggcacgtcagattttttgttttatggtataatacttatacaatcgataaaattacagaaggaatatatatggtaaaaactaatgctatgcggcttctcgacagcgctaagataaaatacgatttatccgaatacgaggttgacgaaaacgatttgtcgggcgttcacggtgcggaaatgctcgggatcgacccggactgtatgttcaaaacgctcgtatgtgcggacgaaaaaggtgagcacgaggtatttctcattcccgtggcgtatgagctggacctcaaaaagtgcgccgctctcgccggagtaaaaagagtggagatgatacacgtgaaggatctgctcccgctcacaggatatgtcagaggcggatgctctcccatcggtatgaagaaaaaattcccgacctacatagacgagacggctcagttatgcgagcgtatctatgtaagcgcgggaacaaggggtgttcagcttattctgtctcccacagaccttgcggaatatgtaggagcgaaattcggggatttgatgcgttagtcctttttctcgagtattctcaccgcgttgactccgtcgaattcctcaaccataacggaaactatctcgccttttgatgtaggaatgttcttgccgacgaaatcgggacgtatcggaagctcacggtgtcctcggtctatgagaactgcaagctgtattgccgcaggtctgccgtacgagaacacagcttcaatcgcggctctggctgttcttcccgtgtatataacgtcgtccacaagcacgacagtttttccgcttatgtcaaatggcaggctgctgtcggaggctttcggaagctcgtttgtttcactgaggtcgtcgcgatacaatgtaatatctatatatcccaccggaacatcgcatttttcaaacttttttatgttctcggcaaggatatgcgaaagaggtacccctcgtctttttattccgacaagatacaggttttcggtacctttgtttttttcgataatttcgtgagtcattctggtaagggttcttcttaccgcagactcgtccataagctcggattttacgactaacatactcacactccgtttatatgtttctttgatttgctatacgcgcaagctccgctatcttatccgcgcatgagtcgaagaattctatatagctctcgcagtatttctgtctgagcagctttccgttttcatccgcaccgcgatatcttgcgcatcctccgcggcacagtacatagtatcggcatcggcggcatttatcgtcggtttcgtatgacctttcgcggaattttcttgcgttatcggacgagaatatctcttcgacggaattgtcaatgatattcccgcacttccactcgtcgaggacataaaaatcgcatggataagctccaccgtccgcttctatcacaaggtttgccggacatacgccgttcattccgcagcactccgccattcttccctgcgcaagcataacaaaattatcaaattctcttacgctgatgtattttccgcttttgaagtcgtcataataatacccgaaagcggttttcagaaatgacgcgtatctttt

SEQ ID NO: 2119 - DNA, 32190 bp, Unknown
  16S sequences of unknown bacteria
atagatattcactctcccctgaccgatataaccgtctcgtgaccgttacttcctcataggcaaccggcaatttgtgatctgcattgtccatggtaatagctaccgacgcaaagctcaaaggcttccggttctctgtcccggagaaaatgacgtcctgcatggttccgccacgaagctgcttgacccgctgttcacccagtacccagcggactgcatctgccacattactttttccagagccgttcggtcctacaataccggtgattccattgtgaaattcaaatacgatcttatttgcaaaggacttaaatccctgtacttcaatactttttaaatacatgcattcttttcctgttctagttttcccgccctgtcagcgcatggtaggctgcttcctgttcagcggctttctttgtccggccttttccgcggccgatcaccttctctcccagtctggcctctaccacgaacagcttctgatgatccgggccttcctctcccaccagttcataatgcaggactttgtcatgatgcgcctgcacgcgctcctgtaaaatggtcttactatcaaaaaagagtttcttgtgctccagatcattgagaatgaacttgcagataaattcttttgcgctagtaaaaccaccatccaagtagattgctccgatcaatgcctcacaggcatcagacgtaatagatgctctggtacgtcctccgctgatctcttcacctctgcccagcagaatatagtcccccaacgggatcgcttttgcacagaatgccagagtctgctcgcatacaatgctggcacgcatttttgtagcatcaccttctggcatggttgggtatgtatggaacagatactcgctggtcaccagctccagtaccgcatctcccagaaactccagccgttcattgctttttaattttcccatgtgccgttcattcgcataagagctgtggctcatggcatgtttcagaagtcctttatccttgaactgataaccaatcttctgctccagctccgtcagtaattcgttttccattatctttctccatatttaagaaaaggtgttgcaaaacccagtcttacagggcggattctgcaacacctccacgttttagtttactgcattcttaatctgctcaacagcatcgccgacggttacaatcttctccgcatcttcgtttgagatctcaatatcaaactcttcttcgatgcccataataatctggaatacatccagggaatctgctccgagatcatccacaaaggtggtatccattgtgatctcctccgggtcaacattcagtacttctgcgatgatttcctgtaatttttcaaattccatgataattcattccttcctgtttttcttacttcatttcttctgcctgaattccggccttaatcttatcattcattccctgttccacaaatgtaacacactgaaggatggaattcttgatttcaacagctttggagcttccatgggtcttcactaccagacctttcagtcctaacagcggtgctccgccatactggctggtatcaaactttttcagtgttgtcttcagtgctggtttgaccagaagtgctccaatcttgcttctcagcgtagacatcatcccttttttcaccatggaaatcagggtagctccaactccttcatacagtttcagaatgatatttcctgcaaaggcctcacagacgatcacatccgcataacctgacgggatgtcgcgtgcttcaatgcttccaataaaattaatatcctgacatgctttcagaagcgggaaagtctctttgaccagtgcatttcccttctcttcctctgcaccaatattgacgatggccactcttgggttcttcacacccataacattttccatataaatggaacccatctttgcaaactgtaccagatgagacggtctggcatccacattggcaccgcagtcgatcagcagtgaagctcctttttctgtcggcagaagaggcgcaagcggtggacgctccactcctttaagtcttccaacaatgagctgtcctccaaccagtactgctcctgtactgcctgctcccacaaatgcatctgcttctccattttttaccagtttcatggcaacaacgattgaagaatccttcttcgaacggattgcctgaaccggcggttcagccatctcgatgatctcggttgcattgacaacttccattctggaagcatcatactgatattttgaaagttcctgctgcacagcttcttcctgccctaccagaatcaccttcagatcagtgctggcttttagtgcctccacggcgcctttgacgatctctgccggcgcattgtctcctcccatggcatctactgccactcttatcagttcctgcatcttactcctccttgccggcgctcaccatatgatacacacaggttcacgctatctatatcataatacgaaaacagattctttaagtcaatactttccatcaaaaaagagacaggcacttttctcctgtctccttttgctctggcttttactgccagattcccacgatcgtctctcccgcttttgcggttacccctgtggtatactgaacatcaccggaatgctcgccttccatcacgatctgcatgatctccatgcaatagccttttgcttccagtgcctcccgttcaaatcgaatcagctcatctcctgcttttaccttatctccggtctttgcaagtgcttcgaacccttcccccttcaggttcactgtatccacaccaatatggatcagcacttccagtccgccggtcagttccaaaccgatcgcatggttgcttccgtccatggtcacagttactgttccatctgccggtgccacgatcacatcagacgtgggacggatcacgactccatttcccagtgcgcaggaagaaaatactggatcggttgcttccgtcatcggtacaactgctccatctaccactgctttcatttcataagttacttttttctttttaaaaagtccaaacataataatcctcctgacttccgctgactctttctatagaataacaggtcagcctcgcttcgtctattcacaattttcctttctatatggaaaatcgttacttcttttcgttttctttctcagatgcttctcttccaggtgtcttcagatggaaatgtaaaatacagaatcggaatacaatataataaagcagaccaaacaaaagccccaccggcaagagcagtcccgggttctgtgtcataggtgcattcaggcacataaaataatccatcagtccggcactgaagttaaatccgatccgaaaaggcaacgctgcgcagatatacatagagatgcccataaggatcgcatggagcaaaaacagacctggcgccagaaacataaacgcaaattccagcggctccgtcactccggtcagaacagagcacaaagatgcagtcagaagaagtcctgctgccatcttcttttgcgccggatatgccgtatggtacatggccagtgccgctcccggaagtccaaagatcatgaccggaaaatatcctgtcatatacattcctgtctgtccatagacacctgttccattccagaagctgttcagatccgcaattcctgcgagatcaaaccagaatacagaattcagcacatgatgaaatccggtaggaatcaataaccggttcaggaatccataaactcctgctcccaacgcgccagttccgatcagtgactctcccacatacaggcagacagaatgaagatatggccaggcaaataaaagcataattgaagccagtgccgcataaatcgttgccatcatcagtgcataaacacgaccgccatagatctgaagcggtccgcggaacactttaaagcgatacttattacaacagtatgcaccgatccatccacttaagattcctacaaactgattattaatataggaaaacgaagatgcatctacccggttaccagtcaatatcaccacattatccggtgaaagaatcttctggatcatcagccagctgatcacacctgccagagctgccgttccatcctgttcatccgccaggcctactgctacccccaatgtaaacagaagactcatattgtcgatcagaacacttccggcaaggatcatcacatgtgccagcagaagattctctccctgtcccaccggatccaaccagaatccgactcccatcagaagtccggctacaggaaggcacgcaaccggcagcatcactgcctttcccaaacgatatgcatatttcattcttccgtattctcccttatctttttcatccggaatttatctatttatcataccaaatttgcactctggtgtcaacgaatgcacctttgaaaacaccctctggtacactcagaagacagagaaaaagctccggaaaaccggagcttttctctgatatatgttaggatagtggattggtttgattacaagagtttcttgaactcatcagctacgaactgtaccttcggtccgatgattacctggatggaagtcttgctcggacggatcacaccactgatacctgcagatttgatcttcttctcatctactgcggtgtaatctttgatctccagacgaagtctggtgatacagttgtcaacacttgttacgttctcttttccgccaagaccttccagaatgattgctgccatagcagtgaaatcattgtttgcaagctcgatcttggtttcatcgatatcgtcatcctcacgtcccggagtcttcagatcaaacttggtgatcgcgaaacggaatacaaggtagaatacgattgctgctgcaataccaagcggaaggatcatccatgtcttagcatgtgccggcagggaagcactgaataccaggtcggtaagtcctgcagagaaggagaaacctgctctgaagccaagtgctacagtaactgctgcgaatactccgtaaaggattgcatatacaagatacagtgccggagcaaggaacatgaatgcaaactcaaacggctcagtaacaccacagatgaatgcacagatagctgctgcgcccatcagggaagctgctgctttctttttctccggttttgcacagtgaatgattgccattgctgctgccggaagaccgaacatcatacatgggaagaatccagccatgtacataccagcggttccgcctgctccattgagaagctcgcctgcccagtaggaaccaaggtcattgatacctgctgcgtcaaaccagaatacagagttcagtgcgtgatgcagaccaaacgggatcagaagacggttcaggaatgcatagatacctacaccaactgcgccaagtcctacgatgctctcaccaactgctaccagtccggtataaacgatcggccatacgaagaacaggattgcggatactacgatagaaacaactgcagttacgattgctacgcaacgttttccggagaagaatgaaagtgcatccggaagtttggttcctttgaatttgttgtagcaggtagatccgatcagacctgcaaggataccgatgaactggttgccgatttttgcgaatgccgggttaacagcatctgctccaacaccagtcagggttgctacagtaccggttgcaagaaggttggtgatcattaaccaggataccagacctgcaagacctgcagtaccatcattgtcatctgccataccaactgctacaccaatagcgaacagccaggacatgttgtcgatcagagcaccaccagcttttacaaggaaaaatccaatgatctgagctgctccgctgatgtcaccaccctgcatggtgctcgggcaaagtgcatatccaatacccatcaggataccacataccggaagacacgctacaggaagcatcagtgacttaccaagtttctgtaaatatttcatcatatctacatttcctcctttatttgatttttcaatcaagtttttatggtcttattgtaatcattttttttgcatctgtatagttacgattttatccatcctatggacaatttgaatgattcttaaactataaaatttttctaaaaaccctaaattttttgtaatatggattttcttattcttgatatggaacattttctctttttcggcagaaataaacaaaacaggtgaaaatcatctatattctatggtaaaataggaataaagtacaaactatgaaaggatttctttatgaactatgatgacaattatgaggatgaagcttttcagacgcttcgccattttgcgcttgttggcctgaggaatctgaagatccagaaccggttgatcatttcctatataatatccacgatctttccacttctgttcgtatatctgtattcctactatttatatggacgctctgttgtcaccggtcagctgctggttctgtcgatcctgatcgcaggcattgcactgaccatgaccacctacacttacctcagtatttccagtccgatccagcatatgatcgagacctgtcagaatatctctgacggaaatctggatgtacggatccaggataaaggaaatgatgaactggcatatctgtccgataacattgacagcatggtgacagagattcagcttcttctggaacagcggcaggaaagtgatgcccgcaagagggaactggaattaaagatgcttcagtaccagatcaatccacattttctgttcaacacactgaacacactgatgttggttgcacagatgaatcaggacaaagttgttgccgatggtatccgctctttaagtgaactgctgaaaaacacgctgatcaatgaccatgaatttattactatcggcgaggagattgccaatctgaaacactatttttccattcagaccattcgatacgccggaagcttccatgtgaattatgagattccagaagatctgacagactttatgcttcccaagctgatcctgcagcccctggcagaaaacagtgttctgcacggttcttataatgatggaactgtcatggagatttatgtgcgctgctaccaggaatcagcggatattatattggaagtggaagatcacggaaaaggatttgatatgaatgataaaagttctgttccaaaaggactgggtggtatcggcagtcgaaatgtcaatgaccgcatccatctttacttttcagacgactatggaatgaccgtatccagtgctcccggaaaaggaacgctgtgccggatccgcattccatctatcaatacaaaaattgtcaacgcaaaagagggagaaacttatgtaccaggtactgatcgtcgatgacgaacctattgtaaaaattgcacttcgctccatgctggactggggttcgcttggtttccatatctgcggaacggcctccaatggacaagaggccttggaaatggctgagcgcatgcatccgaatctcattatctgtgatctgaagatgcctgtcatggacgggattgatctgatccgcacagccaaagaccgcagtatgaactgtgaatttctggtcatcagcaactatgaagattttaattatgtacgaactgctctggttcttggagcctctgactatattttgaaggtcagcatcagccccgaagaactgaccacccagctccagaagatcaaagaaaagctggatcagaaacaaactcatcatcagcacaaagaaaacagtgcagaacaatcttttcaccatcaggaacagcatgctgcctggcgggaatatttcactcacaaaagctatgccttggaagatctggtctcgattaccgatatcgataccgaacatctgggttctctcgccctgtgtgagatttctttcgactggtatgcccaacaactggagactcttccagccccggatctgatccgcagcaccttgaaaaatgcactggagcattttgaccggagacgcatcattttcttcagttccagcagcacactcctgctgatacaggaagaagaattaaaaaaacagaataataccattgagggactggccgcccgtatagagcagttgttccggtattatatgcccttgtctccaacgatcatttatcaggatcatgtaacggatcttctgcaggcccgtaaagtatatcaccgtttccaggaattgctggaattaagtttctacggcgaactaggaaccatgaatgcccataatgtctccgttaccacttccatcccggaactgacttatcgagagctggccaccagaatcctggcactgccgaccgcagaacgtctctcccgttccgaagaacatatcaaagaactgttgaacacttgcagacaacagcatgtagttccggacaaagtcattcagtattctgtccgcctgttggtagaactagaatatcagctttctgagattccagcttccgcccacgaccagattgtggaatgtgcagattttatgcgaaatgccatcagccaggaagaactggaacagcatctgttccatgctctccaggtcatgttttccccggaatccagcactcaggcaactacagatcaatacagcctggaggtggaacagtccattgcctatattaaagaaaactatatgcgcaagatcagtcttgcatctgtggcagaacatgtgggtttaagttccggttatctgtgccggatcttcaaggatgagaccggtggaagcatcaacacctacatcaataacctgcgtatgaacaaagcaaaagagctcctctccgacaagaacagctatatcaaagaagtggctgtggctgtcggattcgaagatcagctctatttcagccgcctgtttaagcggtattcaggtctgacaccttctgaatatcgggcatctaagaatccgcaataatttcacaagaaagtacaaatgagcacggtatgaccagtcattcagtcataccgtgctcattttatatcgttcatagttaaaaaaatcaagggcatatataatacccttgatttttaatgcttctgattaatctacagaaacgatctcttttttgttataagatccacaagctttgcatactctgtgcggcatcataagagcaccacatttgctgcattttaccaagttcggagcactcattttccagtttgctcttctcttatctcttcttcctttggaagatttattcttcggacaaatagacacaggttacacctcctctatgctttctcgattcagttcatcgttcgtcgaacctgcacaggaggtccgtctcactcacacttaattgagtatacacgtcattgtactaaatgtcaagacatattttgaaaacttatttggtcagtctcagagtctctcttgcgattgccagctcctcgttggttggaatcagcattactttcactttggaatctgctgcggagatcactcttctctcaccacggatatcatttgcctcatcgtcgatcttaacgccaaggtatccaagatactcgcaaactgcctttctggtagctttatcgttctcaccaacaccagcggtgaatgcgattgcatcaacaccgttcatagctgcagtgtaagcaccgatgtatttagctacacgatatacgaatgcctgaagagctacatctgccagatgattgccttcttcttttgctttctcaatgtcacggaagtcgctggagattccaccgctcataccaagaataccagatttcttgttcaggatgttcagcatctcattgatgtcgataccctctttgttgcagatgaactggcaaacagccggatcaatatcaccacttctggttcccatgatcagaccttccagaggagtcagtcccatactggtatctacacattttccaccgatggaagcggaaatacttgctccgttgcccagatggcatacgatgacttttgcattctccggatccaggttgccgaatttgatagcctcaccggatacgaacatatggctggttccgtggaagccataacgacggatgctgtatttctcataatactcatgcgggattgcatacagatatgctttctccggcatagccataccaaaagcggtatcccatacagctacgtttgctttgcctggcataactgcctcacaagcttcgattcccatcaggtttgccgggttgtgcagcggtccaaggtcgaagcactcgcggattactttcttaacgtcatcgtttactacgatagactcgcagtatttggttcctgcatgcagtacacggtgaccaacagctgcgatctcatcggtgctcttaacaacaccatgctctgcatcctgcagtgcttccagaaccagaccgattgctactttgtgatccggcatagctttctcaacaatgtatttgtcttttcccggtacctgatgagtcagtttggaaccatcgattccgattctttcgcaaagtccttttgccagtacgctctcatcagtcatatcgatcagctgatatttcagggaagagcttccgcagttgataactaaaattttcatgggtatgtattctcctatactctaattatttacgacaattggggcggattcttatttaacgatctcgccgtatacttctctgccgcatccagctgcgttggactcgtcagtgtcaatgtgcattgccagagcaaatttcgggcttacacgaacaactacatcaccaaatacaagacttcttccgtcagtatcgatcttcacggatacaacatctttgtcctgaacaccaagcttctcagcatcttccggagttgcatggatgtgacgttttgcagcgatcacgccctctttcagctcaacctcaccacaaggtccaaccagtttacaggcaccgcttccagcgatatcaccagactcacgaaccggagctgcgattccaagagtacgtgcatctgtcagagagatctcaacctggcttgcagaacgtaccggtccaaggatagatgcggtcatctctttcttcggtccaacgatggttactttctcgttacttgcgaactgtcccggctgggaaagatcttttttcttggtcagctcatagccttttccgaagagaacctccagatcctcctgagttacatgtacgtgacgtgcagatgtttcaacaataaatttcatgatttattattctccttttcttatatggtatataatttgtaacgctgtctctggcagctttactcactgttttggtgcttcctcgatctccgatacaaggatgcagttaggggtctccaccttcaaaggcttaccccacaggctgaaatatttcttctcataattgatgcggaagatcgtcatggtattggattcatggttcaatgccataatatgacggttatccgggaagaaatctgccgctttcggataatctccgctgattggcaggatacagatcttctccagcataccggtcacccggtcaatcttaaagataccaacgctgttgtcccctgcattggagcagagcacataattccagtctctggaaaatctcagtacgcaggctgcacttcccttggaatggtattcattcaaagttgaaatcgtctgtaccagttcaaaaaccggtcccctcggaccatctttataactatatacactgatgtagttcttcaactcacagatcaggtatgcgaaccgtccatccgggctgaatttgatgatccgcggcgcgctctccagctcacaacgaagcatatccaccagtgtgatcttacctgtttcatcattaaacttgtaaatttttacctggtcaacaccaagatctaccgcacacagatacttctgatccggtgtgatattgacacagtttacatgcggacggaaattacgctctgccacacttccgattcccttgtggaagacctcatccgtcatctctccgatagttccatcttcgttcagacgcatgactgtcacttttccgtcatgccagccgcccacaaacaaatagcggtccagcttgtccgtagacagataacatcctctcattccacagatagacgcactgttcataggttccagatcgccatctggcaggatcttaaaagaccgtacaccttcatctgagatagaatacaggtactttccattatgagattttttgatgtaggaagggttgttgataggaacaaccttacgctctatcgcgcgtccattctccacatccaggtcgtaaatgtaaattcctttgctattgccatgggtataggtgcccacatatgccacatatttcttctctttcaccgagactttcctccattggctttttcctgttcgcaattataaaaattttaacatagtttttgctgtttgttaagcattttgcactgttttttcaaaataatttctcatgattgacagtgtctcatccacctgttcatctgtatgtgcatcggacaagaacatcgcttcaaactgggaagaagcaagataaatgccatggtccagcatatagcggaaatatgcggcaaatgcctttgtatcagagcttttggcactggtgtaatccactacaggctgttcagtgaagaacatacatcccagagatcccacatggttgatctgatacggaagcttcagttcctgacacagcttctccatgccaccgtacagacgctctcccagtgcttccagatgagtgtaaacttccggatgggcattgagataccgaagctgtgtaagaccggctgccatagccaccggattaccgcttaaggttcctgcctggtacacctgaccaaccggggataccacttccataatgtctctgcgtccgccgtaagcgcccactggcatacctccaccaatgatcttaccataggttgtcagatctgcctggataccaaaatattcctgtgctcctcctcttgccagtcggaagcctgtgatcacttcatcgaagatcaacagtgaaccattctctgtacagagtctgcgcagtccctccaggaaatctttcttcggcggaaccacacccatattcgcacctaccggctcgacgatcaccgctgcgatcccgcttccccatgtatcaaataatttttctactgcttccagatcattatacggagccagcaaagtatcttcggttgctcccgccgggacaccggagctgtccggaacacctgccgtcatcacaccggatcctgctttcaccagcagcgcatcactatgtccatgataacagccttcaaacttgataattttgtttcttcctgtataacctctggctgcacggatcgcactcataacagcctctgtaccggagttgaccatacggatcatctcaatggacggcaccatggaacagatcagttctgccatctccacttctgcctcagtagctgcgccaaagcttaaaccttttttgcatgcctcaaatactttttccagcacatcttctctggtgtggcccaggatcataggtccccaggatcctacataatccagatatttgttgccatctgcatccataagatatactccatttgcagatgcaataaaccggggcgtcattcccacatttccaaaggctctgaccggagagttcacacctcccggtatcaggtccactgctttcttaaataactgctctgatctgttagtttccatgactatccgattctcccttcatccataaaatgcgcgatctcttttgcataataagacatgtaaatatccactcctgcacgatatgcgctggctgccatctcgcagaggatcgctgcttcatccacatatccaagctttgctgctgcttttaccatggcatattcgccgctgacactgtaagctgccattggtacatctgtcagatctttaatctcacgtaccatatcaagataagacatggctggttttaccatgatgatatctgcgccttcctcaatatccagcatagcttccttgataccttctcttctgttatggtaatccatctggtagctctttctgtcgccaaatgccggtgcacttcctgcagcatcacggaacgggccataaaatgcggatgcatatttgactgcataagacatgattggtgtggttacaaatccattcttgtcaagaccttcccggatcgctgcaatatgtccgtccatcatatcagatggagccaccatatctgcacctgcctgtacctgggaaactgcgatctgagccagtttgtccagagtcaggtcattgtccacatagtctcctttcaggattccgcagtggccatgactggtgtactcacacatacagacatcaccgatgtagtaaagatccggcacttctttctttgccttctccagtgctctctgaataataccatcacaggcataggctccgcttcccacttcatctttgtgatccggaataccgaacagcataacactgccaacacctgcatctgccatctcctgtaggatctccggcatccgatccagcgtataacggaactgtcccggcatggtcgggatctcttcctttttattctccccatccattacaaacatgggatatacaagagagcttttgtccattctcgtctctcttaccatttttctaagctttgctgatgtccgaagacgtcttggtctgattgttaaatccatcttctgttacctctttctttatcttatcggtccatgtctttgcaagtctgtgatcctgccctccggcattgataccgatcaccaaatcccctctgcttgcgattcccggaaactgaaaatcacataggttccggtcactgcacacattgaccagaatgtgcttttctctgcattctttccagatctgtgtatttacccacgcatcattggtagccgccagcaccataaaggcatctgcaggaatcgttccctcctggtaagcttcgcgtttccagacaagatatccttcttccgccgctctttgcacccgttccgatgcctccggtgcaaaaacagtcaaagacgacgtaaaagccagcaatgtctccactcgtcgggaggcaatcacgccggctccatacaccactacttttttttctgtcagatcaataaacaaaggaaatttcttaggcatatcacattctccatatacctattctacaaccacaggttttcacatgtcaaccatcataaactttttaatgatctcagcgatagctgcctgattgttatcacgttctgtcacataatccgccgccgccttcacttccggtctggcgttcgccaccgcgcagccaatgccagcacttttgatcatagaaatatcgttgttctcatcccctgcagaaagagaattggcaatgggaattcccatttttgcacagaatgcttccagagcagaacctttggatacaccacacggcacgatctccagatactgacggttactgaaaaacagatccagctttccttcaaacttatcctgcatagctttccggaaatcttccagcttctcatgatccttcagatcaacagccagcagtttacatgcttctttctcaatactttcttccagatccgacaccagtctgccttccatccgaagcctttttacataagaacgatattcatcaccgtcctgaccggacagcacatggtttccttcataggtatgtacatagacaccacgctgctttgcttcatgggcaaccagtttcatccactctaccggaatggttttctcataaataatgtcaccggaaatagcatccagcaccattccaccattaaatgagatcacataacggcagccgatcttatccagtccccactgttccagcagctttcgtgtgcttgccgtaggccgtcccgtggtaactacgatctcatgtccggctttcagagctgctttcattgcctccagattttctttcggaatctccacctgatcgttcagggtggttccatccatatctaaaaataatgccttcttttccattcttgctcctcagtcctgcaatggttccgccggaatgaagactctgttattcgcagtctcttcttctggttttgccagcttttttgcatattccataaaataatcctgtgcacacagcgcttcttttcctctgcggtctactttactgtaggttccgtcagactgcttgatctgcgctttcaaggtgtcccgcagctggatctccagcacatggatcacttcttgtttcagatgttcattttccaccgggaacagaatctccacacgccggtccagattccgcggcatccagtccgcactggacagatagacctcctcctgaccaccgttcaggaaataatagatccggctgtgttccagaaaattaccaaccagagagcggacttcaatattctcactgatccctggaatccctaccttcagacagcagattccccgtaccaccagttcaatctttactcccgctgcactggcctcataaagagcggcgatcagttcctgatcacacagagaattcatcttcgccataatatgtgccggttctccgtttttcgcatgttctgtctcccggcggatcatgaacagaaaacggtcacgaagccacagcggtgccagagacagtttgttccacactgccggttcggaataaccggacaacatgttgaatacagccgttgcatcctctccaatcgcctctgaacaagtcagaagtcccatatccgtatataattttgcagtggaatcgttatagttaccggttcccagatgcacatatctgcggatgccatcctcttctcttcgtaccaccagcgtgatcttgctgtgggtcttcaatcccaccagaccatagattacatgacaccctgcccgctccagcatttttgcccaggcaatattattttcctcatcaaaacgggccttcaattctaccagaaccgatacctgttttccattttctgctgcctgagccagagccgcgataatcggagaattgccgctgacacgataaagggtctgcttaatagccagcacatccttatcttttgctgcctgccgcacaaaatccaccaccggatcaaaggtctggtatggatgatgcatcaggatatcccctttacggattgcctcgaaaatatctgcacacccattcagttctggcactggctgcggagtatatttcggtgtcttataagcatcaaatccatccagtccgtacatcttcatcaggaaagtcagatccagcggtccgccaatccggtatatgccatcttctttgattgcaaactcttttttcaggatcttcaacagacgcttgtcgaccttttcatccacctccagacggataacttcgccccactgacgcttcttcagctgcttctggatctcctccagcagatcagatgcctcatcttcgtcaatggtcaggtccgcatttcgcatgatccgatacggatgtacacagagtatatcataactcaagaacagcttgtccatgtttccggcgatcacatcttccagaaggatcactgcctttccgccatcttttcctgccggaatggagatgatccgcggaagcactgaaggaacctgtaccgtggcaaactcaagctctgcgtccttctccccctttttcttcagaagagctcccagattcaatgtcttattgacaatcaatgggaaggggcgggaagaatccactgccatcggtgtcagcaccggatacacattttccataaaatagtgatccacgtaagtcttctgctcttcagacagttccttgctgtcagagatcacacaaagtccagcctgccgaagacctggaagcagcgaacgctgccaggtggaatactgcatgttcaccagactgtgcacccggtcatggatcgcattcagctgctgttccggtgtcataccagacaaatccttcttggtataacctgcgttgaccatatctttcagtgatgccacccggaccataaagaattcatccaggttggaagccgtaatgcttaagaatttcaaccgttcaaacaaaggagtggtcttgtctctggcttctcctaagatccgctcatcaaatcccagccagctcagctcccggttctcataatactctgcttttttataatctttttccatagctttttcctccctgactacattctcttcgccttcagaaccggacgaatactatacacttcttcaaaaaattctgctttttctccaaacagtgcctgttccagtgtcaggtcttctgtggtgtccaccaggatctgcatcgtatgattatcttttaatgttactttgatctcacggatcttctgccggtggcttcgatccagtgcatttgccacacggaggattgctgtcagcttggcgatcttcatgtactcttcttttccaagcagcgagctggccgccagttcttcgtaagacagaatctccccactgttgaaccgcactacattcgccacaagttctctctccagatgagaaagaccgatcatctccgtcgccataatgatgttataggaacactccgacgaccgggacatattgatatattttccgcagtcatgaagaagcactgcaatctgtagaagcagccgctcccgtctgccaagaccatgaacatttttcagcttatcaaaaattgtcagggcaagctgctccataacgatggtatgattccggttggtatgataccgcttggcaatatttcttgcagcctcaataatatcattttcaaaattatgttctggctttaagatgcccttcttcactccatggtcataagccatgccatcgctcagatcagtgccaaggataatgactttctctgctccggtctcctccagaaaccgcttgtagatcaccatggccgggattaaaagtgctccgttttcattactgactcccagctcctgggctaattcgcgttcccctttacggacatgattttcataaaacttcaggaaggtctcacggtcgatctctcttccgatcccatttttctgcatgtactgctcaagatcatgcacataacttcctaccagcaatacatattgaatattccgatctttcagatacagttttttataggtgcgaagttcattgtccagaagctcctccactactgcagcatagcggaccgtacgttctgccacatctgccaggcgctcccgcagacgcagacttcccatgcgaatgttctgagtcgtcacaagattgtccttatcaaacaaagagatctgtacgcttccgccgccaacatccacaatagctgtacctttttcaatgatgttctgaaacgcattttcattggaagcaatggatttgtaacccagataccgctgttctgaattggcaagtacttcaatatgaataccggtcttcagataaatacggtccagaaggatcaatgtattatgggtttcacgaatcgcagaggtcgcacaggcacgatactcctgtactccatagtccttcatgatccgcttaaaatccagcagcacctgacaaagctcgtccaccagctctgtcccgatctttcctgttgcataggtgtcacttccaagatccagccgatgtcgcacatggttcagcagacgaattccattcttcatcgaaagctcatagatcttcagatttacttcataacttccgacatcaattgctccaaatatcctatatgtcatagatagctcctttccgtccgcacccttatcttactatctactactgtcgtccagttgtcccaaatccgcctctgtctttacccgtcagtacttctgtctcttcaaataccagttccggctgatgctccataatacggaactgacagattctgtcgttgacatgaatctccgtgtctctcatggccagtgccggaaaataccactgatcgttgtcgccgcaatagctttcatcaatcaatcccatgctgttagcctgcagaatgccaaaattcttgtaagtactgcttctggggatcacgtgagcttcataacctttgggaagctccatggcgattcccaaagggatcagcttgaattctcccgccttcaatgttacatctgctgatgcccgaaggtcgatccagtcagattttcctccgatataggtcagtttttcaatcttatctgaaaaatacttgattctgatcttttccatcttgttctcctgtttaagcatagaggacgatctgtcccagctctcttgttttctgtacgtcaatgactctctgattggcactgcccttccacggaaggctgttatcttttagttcttccacaaaccggccgtccaccaatacatccagatactggatcagttccagatcctgaacatcatcccagagatatccggtgtaaagccagattgtcttctctggatagttcttcttgatctcttttaaaaattctgtcagttcttccctgtttcttaaaagcaatggatcaccgccgctgaaagtaatgcccgatacatattccttattcagttcctcatagatctctgctttggcagcttcatcaaaaggcagacctccatccggatcccaggtcaccggattctgacagttcttgcaatggtgttcacatcctgccagccataatacaacacgcagcccatctccatttaacatatcatctttggtaatattatgatatctcatatctgttcgcttctttccttaaatatctcccttgaggatcacatctttattcttcacaatataatccaccagggataccacagtcaggatcagggcaatccaggtcaggatctgtccgatcagtacaaatacaccaccaaaattcagcaacagtacgatgatcataagcatctggaaagtggtcttgaattttccccaatagctggccgctataaccacaccgttatcagatgccaccagacggaatccactgatgataaattcacggctgatgatcacaatcacgatccatgctgacagccgtcccatctcaatgagacagatcatggcagaacataccaacagcttatctgccagcggatccatgaattttccaaagtcagtgaccagattgtattttctggcaatctttccatccagaaggtctgtcaggctggctacaatgaagattcctactgcaatgtaatctgtataaggaaggattccactgaacagagtcgtaaaccagccccactgttgaaatccacctaaaagtaacactacgaatggtacaatcagaatcactctgaacacagttaatttattcggtaaattcatcgtcgatctctcctatcaaatcatattcgtccgctccggtcacgcgcacttttacaaaatcaccggacatgagttcttcgatggtctgaataaacagatagccatccacgccgggtgcatccttgtaggttcttgccacgtatgcgtactcatcagcgacttttccctctaccatgcaccacaggctcttgcccaccatctcttctgctttttcaaaggaaatctcctgctgaagttccatgatctcgtccctgcgctcttctttcagttcctccgggatctgatccggcatggttgctgccggtgtatcttcctctgctgaataggtgaatactccaaggcggtcaaactccatctcgtccacaaaattcatcagctcttcgtgatcttcttccgtctctcccgggaatccactgatcaatgtggtacgaagacagatatccgggatctcctgacggagctttccaataattgcacgcagatcagcctggctggtacgacgtcccattctctttaagatccggtcagatgcatgctggattggaagatccagatagttacagaccttcggctcttccttcatggtctggatcagttcatcgtagatctcctccgggtagcagtactgcacacggatccagcggatacctttgatcttgcatagttccttcagcaacagatgaaggctcttctttccatagatatcagttccgtaaagagtggtctcctgtgctaccagaatcagctccttcacgccctgtgctgccagctcttctgcctcttttaccagtttctccatggggaaactgcgataatttccgcgaagcttcggaataatacaataggtacagtgcttgtcgcagccctccgcgatcttcagatgtgcataatgtcctccggtagtcagcatacgcttggcattggtcagtaccagccggtcaatatcctcacatttcagcatatgctcgccgccgagtgcttcttccaccgcctcgataatgctgtcgtaggtagtggttcccagcactgcatccacttccggaatctcatcaatgatctcctgcttataacgctgtgccatacatccggtcacgatcagagccttacattttgcatcttttttgtgctctgccatctccaggatcgtgttaacactctcttccttagcatcaccaataaaacagcaggtgttcacaacgatcacatctgcttccatctcgtcatctgtaaaaccatatcccttttctgccagaagtcccagcatcacttctgaatccaccaagttcttgtcacagcccagggatacaaacagtatattcatcatagatgatgtcttctcctttatttttcattttcaatccattataatacgaaccaaaactaaaaagcaatcgcattttctaaaatcaataccacctgtcaaacgggtgatttgctcgggagtttgacacttaatttatctaaagctatatcatgcgattattttctttcttgttttatggacatatcacacaaagattaaaaatccccatgattttacccccttggatttttagtatgaattcattacatagcaatttatccaaatattacaagacacctaccaaaaagcacaatgtttagcataaaaattgcaaattttttttgtatttcctgtgatataatgaggacatctgatataatgaacacataaagccgtgagaaaggggaggtatttttatgctgattcaaagtaaaaagatttggatcgcagaccagtttgtacctgcgatcattgaaatgcgcaatggaaagatcacagagattcttccatacgaaagcaaacctgtagatgtagattatggagacaaacgagtcgtgcctggttttctggatattcattgtcatggtgcatttgagtttgatactaatgatgccaacgaagaaggtctccgcaactggacaaaaaatattgttgcagagggtgtaactggttttcttgcaacaaccatcacgcagagtgaagaagttctgactaaagcagttgccaatgttactaaagtcatggaagatggttacgaaggagctgagattcttggtatccattttgaaggaccctatctggatatggtatacaagggagctcagccagagcagtatattgtaaaacctaccattgaacagtttgaaagatatcaggcagctgccaaaggtcatatcaaatatataacaatggcaactgaaaccgatgacgattttacccttaccagatacctgaccgaacatggtgttgtagtaagtattggccactcagcagccacttatgaacaggctgttatggcatatgcacacggtgcccgttccatgactcatgtatataatggtatgtctgcctttaatcatcgtgcaaacggactggtaggtgctgcttaccggattcgcaccatgtatggagagatcatctgtgacggtaatcactctactcctgctgccctgaacaattactttatgtccaagggacctgattattgcatcatgatatctgatgctttgatggctaaaggaacccctatcggaagcaaatttatgtttggcggcaacgagatcgtgatctatccagatggaagtgcacatctgacttccaccggaaaactggcaggttctactttaaaacttaatcagggtctccgtattctggtcgaggaagctatggttccatttaattatgccattaattcttgtaccattaaccccgcaagatgcatcggtgtagatgatcgtaaaggtatgatcaaagttggaatggacgcagatattgtcgtacttgatgcagactattctgttattcagacctactgtatgggcgaagcaaagttatagaataaataagttataaaataaatcaatagataactatggagggataaaaaaatgaaacatccaattcagcatatgatggatcagcgtcgtgagggcaagatttgtggtattgagtctgtctgcagcgcaaatgggtttgtacttgaggtggctttgaaacgttcaaaactgttcaatgcgccagttctgatcgaagcaactgccaatcaggtaaaccagtttggcggttacaccggaatgtatccgaaagatttctatgaaatggttctcaaaatggcagccgagatcggtgttcctgagaatcatatcattctcggtggcgaccacctcggacctctgacttggcaaaatcttccagaaacagaagccatggaaaaatccgagactctcgtatatcagtatgcacgtgccggattcaccaaaatccatctggacaccagtatgaaagttgcagatgatccggaaggacttctctcaaccgagactatcgcacgcagaggtgcaactctttacaaagcagctatgaaaggttatgaagagctgaaggcagaaaaaccggatgccatgagacctgtatttgtcatcggaagcgaggttccgatcccaggcggtgctcaggaagcagaggacactctcgctgtcaccaaaccagaagcattccgtgacacagttgctacttacagacgtgtcttcaaagaagaaggtatcgaagatggcatgaacgatgtggtagctgttgttacccagccaggtgtagaatttggtgatgatcaggtgttcctgtatgatcacgatgctgctactgagctgtgcgcagcattaaaagagttcccggaggtatgcttcgagggacactccacagactaccagagcaaagagtgcttaaaacgcatggttgaagacggtatcgccatcttgaaagttggtcctgcacttacctatggtctccgtgaaagcctcttctctctgagcatgatggaaaaggaacttgttccagaagagaaacaggctcactttatcgagactctggaaaaagttatgttagaaaaacctgacaactggaaaaagcactatcatggagatgaaaaacagcttgcactttgcagaaaatatagcttctccgatcgctgccgttactacatcggacttccagaagtcgtagagtccataaataaaatgtttgagaacttaagagagtatccgatcccgatgaatatgcttcatcagtatatgccgatctcctacatcaaagtaagagacggtatcattccgctggatcccagagaactcgctttagatggtgtcgtagccttcatggaagactatgaatatgcaattggacgttaattataccaaattgatcagcaaagccattattgttgttctattttttctttatgcccttttcactatgaaggaattattctaataaaggagaacttttatgaaccaggaacccaaattcctggagaaagaactggatggatccgataaaagccccagtctgcaagactgtttaaaagtgcctgggaacgctatacaaatgcccgttccactgcttttacacttatttttatcggcatacttggtcttactacaagcatactgccggactacttattgcagaagaaacagatcttgcggatgaagagatgtatctaagaaaatacaatatcatcgatgtcatcttgaaaaaacattttccagatgcaccagaagcactcttagataaactggcagctgatctttgtgatgaaacagaatcttaataactatcataaaaatggcggggaatttcttccccgcctgtttttattaatgcctatgctcttccattgctgccgcataccagcattttactcataacatattcttttactttttctctgccgactgcacaatatttcttcggatcaaatacatccggattctcagcaagatattctttgactccattagaaaatgcgatacggaggtctgttgcataatttactttacagatacctctgcgaatacactctctgactgcatcgtccggaactccggatgttccatgaagaaccagcggaatggaaacaacttcgcgaatctggcttaaccgatcaacatccagtttcggaatgcctttgtaaacaccatgagcagttccaattgccactgccagagaatcaactcctgttctctctacaaactccgctgcttctgatggtaccgtatatccaccatttcctccatccagatcatcctcttttccgccaacttttccaagttcggcttccacaggcacctgtccggcatggcatgcatctacaacagattttgtaatcgcaatattctcttcaaatacactgtgagatccatcaatcatgatcgatgtatagcctgcacgaaatgcctgcatagccaattcaaagctactgccatgatccagatgcataactaccggcacgcttgctttctttgctgccgctgcaacatttgcataatacatatccggacctgcatattttaatgtagatggtgttgtctgcataatcacaggagatttcagttcctctgctgctgcaaccactgcctgaaccatttccatgttttcaacattaaacgcacccactgcatatccatttttctgtgcatctaataagagttctttcgttgtaaccaaagccatcttaaactcctccttcatagtgatgtgaccattttcctttattatagtacatccttttctgttctgcaatcagaagaagcagaggtttgatatttatttcacattttttctgtccattacaggtacttgttcgtcactgtgtgcatccaggttgtttatgtacttctttgtttccttgacgattaccggcgtcagaagcaatacagcgatcaggttcgggatcgccatcagtgcgttcagaatatctgcaatcgtccataccaggtcaagtgcaacgaccggtgcaattgctgccacaaggacgtaaagtatacgataaggaatcagtgcatttttaccaaaacaatattctacgcagcgctctccataatatgcccatccaagcacggtagaataagcaaacaggatgataccaaataccaggatcatcggtccaatgtatgggatctgatcaaatgccaatgtggtcagcacgccgccgttggacacatttccaatatctatagatggattcttcataatgctggttaccagaaccagacctgtcatagcacatacaacgacggtatcccagaaggtgccggttgcagataccagtgcctgacgcaccggatttcttgtctgtgcagctgctgctgcgatcggagcagaacccattccggattcattggagaacagacctcttgcaactccataatgcaatgccagcataatgccgccgcccgtaaggccacctgctgctgcgcccggctggaatgccagcgttacaatcgttttcaatgccggaagcagaaaatcaatgttgattcccagaattacaatacatccgatcacatagaacaaggccatgaacggaaccagtttctcacagacactggaaatagatttgattccaccaaagatgaccagtgcggtaaagaatgcaacggttcctcctacgatccatgatggaatgccgagattctcactgcataccgttgcgattgcattgacctgtgtagcgcagccgattccaaaagatgcaaatgatgcaaagaaagcgaagatcagtcccagccatctcatgttgagtcctctctccaacgcatacatggcaccaccctgcatccgtccatcgggagtctttactctgtatttcactgcgatcaatgactctgcatatttcgttgcgattccaaatacaccagtcagccagcaccagagaactgcacctgggcctcccagataaatggcagttcccacaccaataatgttaccggttccaatagtagatgcaagtgcagttgccagtgctccaaactggctgacttcaccttctgcctctgtatcctttgtcacagacagtttaattgctgtcccgattttcctctggatacctccggtcgctcctgtcatgatcagatgtgttccaagaagcagcacgatcatcggccacccccatacatatgcatccagattgttgatcatcgaaataatttgctccatacactgactcccctttaaatttttttgtattattgtatcactgtatacatttttcaatagtttacagataattttgtcagaaagagaataattcactaaaaaaagaggagctgctgtatattttgcagtttctcctcttttgattaaaattattttattattttatgttaaaaccaaattttttatcacaatacctgttctctgttgtgttcatcactctcctgtattatcttttttgattgcagtctgcatttgctttattttctttacagtaaggagtatacggaaaatttgtggcaaaaatatgggtgagctgtgaaaatggtgtgaaaagctattccttaatcacgtccagttcatttaagttcacgccggatgctgtcagaatgactttcaattccacgtatctgatccgcattgcctgatatacttctgaatctttttcgcacagcttcatataactttgcagtcttgaaaattcctccacattcttctgtaaccactctttacctgtcatctcttccatccttatccaccgcctttctatacatacagtatagctgttttttacttactttacaagcaacgataataactaaagctactaaaatacccaacagccacagcctgtttctgtccgaactattctctggccagatcagaaaattcagattttcttccgtctcatttccagctgcatctatcgctctgacccgaagattctgccactgttcttcctttccaaaatgtaacacaattccattgtctgaggtgcgcaaagtctcggcatcatagctggtggtatctccaccgaatgtcacctctgcctgctccagacaaagattatcttccagatacaggttgacgacccgcccctgttcccgatagatgccctgattgcggattcctgatacacggatccgcggcggtgtatgatctaccataaaacgaatagttctgtctttcagaagggtattggaataattggatgccagatcctccgagcagactgcaatctcatagacaccattctgcgaaaatacttctttccgaatctgataaatatactgcttccagtcccccaatgtcttcttttcagaaatgatgtaatcctgatccttcttgagtatccggctctttccgttatggctgtacaaaatattctgcaaatgcaggccatccacattggtctccgtgatcgtcatctgtgccccctgtttcaaataccgattgccatccagtaactgctccgtcagttgatcaaaagtatataccgatccaaactggttcaccgaaaagctgcaagtctgacggctctcatttcctgccagatctctcgctactgcttccagcacataaatatcatccgtcgatggttcgtttggaaaattttcataaatatactgttctccatctgacatcattgcaaatttcccggaaaatgtacgtattccccgaaggcttccagtcagccgaacttccagagaacctgactggtaattcaaatcctgactaatgatctccggtttcagcacaccggcattggctgaaccatctctcaccccacgaatttccagttccggcggaatctgatcaatcacaaacaggtcagcgcggtattcagagcatgtatttcctgccagatctctgcctttgatagtcagaccataggttccgtcttctgaaaaacgaacccttttctgatggatctgcccctgtgtctcccagtcagaactctgtgcctgaccatattcctgttccaccagaacttccatctcttccggtgcaaaattccgttcttccacttgaatcagtgcctgacgtccttttgcataataactgccattctggctttgttctgtatcccactgtaccgtcagtaccggtgcagtctgatcgatcacaaattcatctattcggtcatatgctgcctggtttcccgctttgtcctgaaactttaccgaaaatgtatattcaccatcctttgaaaacgttacctgacagcgatgtacggtctcatcttcagttccttcacttgtccattcaccaatcaccggtcgtacaccgtccgttccagtcaccagaaattccacgtcatccgcagcaaaatttcgttccttgatcgatacggtcgctgtccttgcctcttggtagaaccgttcatttacaggatcatttttatcatattccaccgtaatttccggtacagttgtatcaatatggatcttcttttctacctgatcctcgtatcctgcattatctatgacggttgccagaaccggaacatcattctggttattatgttcggccataatggttccttcccattcacaggtgagagtaattggctgtcctggcgactctgtccggtctgtccctgcctgctccagatagttagtctcctctgtcaattcacttcctgcttttaagaacatttttcccaaaccggaaatcttgtcagtaaatataaacttcacctgtacatctgaacggtaataagcttctccatccacgattcttcccggttcagtaagaatctccatctgtactggttcctgagcctgatgtgcctgttcactttccacgatcacgtttccactctgggcatctgtattctccagcctgtccttcgcatttacaatgattgttccgtcaaattcgcttccattatcaggcagcacaatgctctgttcccagcaaggagtctgaccattcggtacatctgcttctttctgtaccacttctccatccgcatcaagaaccaccacttctgcctgcccgattccactgagtggatcggtaacctgtatccttgctatcaccggctctttggaaaaccagtaaccatattcctgataatttccataattgacaggttcgcctgattttgttgtaatattcatctttatctcaggtgctgatgtgtccaatacaagttccgggctgtgtaactctacaatttttcccgaaccttccggcttttcatccgcttcctcatcatcattctccattaaatccggttttatctccggcttctctgtctcctccttctctttccagactacttccagttcatatattccatccatcttatgcgtttcctggtctgctttgatccacagttttccctgcacatactcttcttcttcagaccattccacaacaggttcctttatttcttcactatctttataaagtttccactcacagaaatccaacacttcttctatagtttcatcttctttttcaatctggacctgcacccagaaggaatccctgtagtaaactttttcaccaatctgaatatctgcttcctgacagataatcctcactcccgatacatcctctgtcggttcctcctccccatgagccatcagtcccagtccagtccagagaacaaaagctgtcacgaatattagcaggaaagaaacttttcgtttgcttttcctcacacattttctaccggcacaccattttcttcgaaaatatccgaacacctcatacatatccaaccggatatataaaaatattgaaagtaaaagtcccggcagcatacctgccatacacaacacatacagtcgatgataaaccgctattctgttctccatgttactccccctgtctctcctctaatgctgccagcaaatattctgcttcctccatctgctgtatcagccgatccttaatttctgaaaatgcatctgctccgcccaggtcctttcctgtaaaatcctgctgcagatgtgtccgtacctgtgctagttgttcccggatcctgtctgccctggctcctgcctccaggaaactctccccatggaacaatacctgcccaatcagttcctcatacacaacaaccgctgtccgctcattatctgtcattacaatatttcctgctgaaacctccaccagatcttcccagtactgcttataatccatctggtcatcccccgcagcatccaccagaccgatccttgtatag

SEQ ID NO: 2120 - DNA, 4886 bp, Unknown
  16S sequences of unknown bacteria
tttccgtcggggatttttgagtgcagtctgaaaagaaattatttgcccgccatctttttatagccggcaagacgctctttggaggcttcttccgtttccttatacagctcttccgcgagggcgggctccgtcttcttcaaggaagcgtagcggacttcgccttgcaggaacgcctgataatctcccgtgggatccttggaatccagcgtgaagggattttcgcccttttcggcaagctcgggattatatctgtaaagctgccagtatccgcagtccaccgcgttcttttcctcggtctgggatttgcccatgttgatgccgtggttgatgcagggcgcgtagcagatgataatggagggaccgtgataagcttccgcttccttcaacgccttgacgaactgcgctttgtccgagcccatggagcactgcgcgacgtagacgtatccgtaagtggcggcgatcatgccgaggtccttcttcttcactctcttgccgcccgccgcgaacttcgcaaccgccgcgatgggagtggctttggacgcctgaccgcccgtattcgaatacacttcggtgtcgagcacgaggatgttgacgtcctcgcccgaagcgatgacgtggtcgagtccgccgtagccgatgtcgtatgcccagccgtcgccgccgaggatccagaaggattttttgacgaggcaatctttgtctttatagatttctttggcgagttcgtcgcagtcgcagccgcagtccttgcagtcttcgaggcatttcaccagttccgccgccgcggctttgctgcctttcgcgtcgtcgagattggcgatccagttttcgcaggcggctttgccttccgcccatgcgttccatttttcggccaaagcggctaccttgtctttcagcgcaagtcttctcgccttgtatgcgaggctcatgccgtagccgtattccgcgttgtcctcgaagagggagttcgcccaggcggggccgtgaccttctttgttcaccgtataggggcaggtgggggaagaaccgccgtaaatggaggaacagcccgtcgcgttggcgatgatcattctgtcgccgaaaagctgcgtaagcactttgacgtaaggggtttcgccgcagcccgcgcaggcgcccgaaaactcgaacaaaggctgagagaactgagattttttgacgtccgccatctttgcgatgacgtccgcgggcgcgtagggaagttcctgcgcgtagtcccaattggcggcttctctcgccgcgatggtttccaggggaaccatattgagggcgcggtttgcgggatcgactttcgtgccgtttttcgccgcgtcgctgcccgctttctgattgacggggcagacgtccgcgcagacgccgcagcccatgcagtcgagcggggaaacctgaatgcggaatccgtagcctttcgcctgcaaagcgggtttcgtcttgaaatcggcgggcgcggaagtgccttcggcgacgagataggggcgaatggtcgcgtgcgggcagacgaaagagcactgcgcgcactgaatgcacttgtcgatattccattcgggaacgagaacggcgacgccgcgtttttcgaacttggtcgtacccgtaggtacggagccgtcggcgttgaacgcggaggagggcagtttgtcgccttcgagcgcgagtatgggcgccacgacgttcttgaaatagtcgttgtccgcaagtttcaccatttccgcgccttccgaggtggtcgcccaggaagcgggaatgtctattttcacgaggttttcctttgcggaatcgatggcgttgtagttcatctgcacgatggcgtcgcccttgcgggagaaggacttgtacgccatgtatttcatcagcgccacggcggtgttcttgtcgtttttatccgcgctctcatagggcatgatctgaggattgatgcagaagaacgccgattgcaaaatggtggacgtcttgccgcgaagtcccagttctcccgcgatcttgatggcgtcgatgacgtacagtttcgcgtgcttcttggcgagaatattcttcattttggcgggaagctctttttcgagcgcttccacgctcgtccattcgcagttcaacaggaacgcgccgccctctttgaggtcggataccatgtcgtaacgggtgacgtaggaaggattgtgacaggcgatgaagtccgccgcgtcgatgagatattcggactgaatgggcttgtccccgaaacggaggtgcgaaacggtgatgccgcccgattttttggaatcgtagaagaaatacgcctgcacgtacttgtcggtgtgatcgccgatgatcttgacggtgttcttattggagcccaccgtaccgtcggagccaagtccgtagaatttacaggaagtggagcctgcgggcgccgcgtcgagtttttccgaaaaatcgagagaggtgttcgtgacgtcctcgtaaatgcccacggtgaagtggtttttcggctctttcgcttcgagattcttgtagacggaaagcaccatggtaggggtgaattccttggagccgagtccgtatctgccgccgtatactttgacgttcgccctgcccttttcgagaagcgcggcgcatacgtcgagatataaaggctcgccgagggagccgggctccttggtcctgtcgaggacggcgagttttttgcaggaagcggggatcgcgtccacgaacgcggtcgcgtcgaagggacggtacaggcgcactttcaagacaccgtatttcttgccctgcgcgttgagcttgttgacggattcctcgatggtttccgcgcccgagcccatgacgacgatgacttcttccgcgtcgggcgcgcccacgtaatcgaagagatgatagcttctgcccgtataagcggatacggcttccatcatttctttgacgattgtggggaccgcctgatagtaggcgttcgcggtttctctgttctggaaataggtgtcgccgttctgcgcggtgcccttctgaatgggatgttcgggattgagggcgcgggctttgaactcgtccacgtatttctgcattcccagcttatcgaaaatcgccttgatctccgcatagtcgtttgcttcgtcgaaaccgtccactttggaatattcgtgggaagttctgaatccgtcgaagaagtggaggaagggcacgctggatttgagcgtggcaaggtgcgccacgagagcgagatccatcgcttcctgcacggacgaagacgcgatcatcgcataccccgtctgacggcaggccatgacgtcggaatgatcgccaaagatgttcagcgaatgcgccgcgagcgcacgggcggacacgtgcatgaccatgggcagaagttcgcccgaaatcttatacatattggggatcatcaggagcagaccctgcgacgccgtataggtagtggtgagcgcgcctgcggaaagggatccgtgaacggcgcccgccgcgccgccttccgactgcatctccgcaattttgagcttttggccccacatattggtgcggcccgcggtagcccattcgtcggcggactccgccatcggcgaagagggagtgatggggtagatggcggcaacttccgagaacgcatacgcgacgtgcgatgcggcggtattgccgtcgatggtcatttttttcatcaaaaaagcctccgtttatataatatcgtgtttatgtcaggcgcaggcaaaaacattcccgccgtttacggcggaaagtcatgcccggcacccgctctatttcacatacagtaatattatactttctttttttccataagtcaataccaaaataccaaaaaacaaaagaaattccgttaaaattcgtgtaaaattattttttttcgcgtttatggcgcaaaaaatgcgggtagcgctttcgtccgggaggtcgagcgcgccgcggggagaaatcgcgcgccgcccggagagcctgcggacggaaaaaaagcggcgtatgtttctttgtgaaaaggccggcgcttgcccgaaacctgcggcgggagaagcggggcgttttttcccgtttcttagtccgcgcgcaacaaatagagttatcggaagtgccttgatgtaaagtaggacataaaataagcatttgcgaaaattccgctctcggaaaaatccctttcgggatgcgtcggagggaatagcgggagcaaaaaggagccgacgaaggaaagcgtaaagaaaaatcgataaaaaaatcgtcggaaaaggataatttcacctcattttcattgtaatggcaaaagaaatttgctataataataaagtacacaaaaacttatgcgaaaacgtaagactgaaaatcgggcgaaggaagagcgattgccgcaagacaattgattgcggcagtgtttttgcgcctgtgcgggacaggccgccgcgcggagaattgcggtcgcggcaaagacggaacttgtgccgcggacgtttggaaaacgagaaaaaatggaagctatcaaatttgaaaacgtatatttttcatacgacgaaggggagaaggactccttttccctaaacgggatcgatctctccgtgcaggaaggggaatttttagccgttttagggcataacggcagcggaaaatccactttggcgaggctcgtggacggtctgttgtcgccttcttcgggaaaaatcacggtgcttggcatagacgcctgcgacggcaaaaatatcttcgaagtgcgcaaaaacgtcggcatcgtctttcaaaaccccgacaatcagacggtggcttccatcgtcgaggacgacatcgcgttcggaccggagaacatcggcgtgccccgcgaagaaatcggggaacgcatcgcgtttgccctcgacgcggtgggaatgtcggaatttcggcattccacgccc

SEQ ID NO: 2121 - DNA, 1555 bp, Unknown
  16S sequences of unknown bacteria
ttcggggactcaccctatcagtgcttctcctccttcgccgggaacccctacctgatcgacctggacgacctctgccgcgacggcctgctgaagcgagaagaatacgcacccctcgactggggccgcgacccgggccgggtcgactacggtctgctctatcgccagcgctttgcagtcctggcgtccgccacgcgccgcgcccaggaacgcttcccccaagaatacgccgcctactgcaaggcccaggccgcctggctgccggactacgcccttttatggccttaaaagactatcagaacggcgtatcctgggaccgctggcccgagcccctgcgccgccgggcccccgacgccctgcgccgcgcccgggggctattggccccgcagattgccttctggcagggggtgcagttcctctttgcccgccagtggtccgccctgcgccgcgaagctgccgaccgcggcattcgtctcatcggcgacctgcccatctacaccgcctatgacagcgccgatgtctgggccgcgccggacctcttccagctgggccctgacctgcgcccgacgtccgtcgccgggtgcccgccggacgcgttttcccccaccggccagctctggggcaaccccctctacgactggccccgcatggccagggatcattacgcctggtggcagcggcggcttgcccatcaatttgcctggttcgatgaggtccggctggaccatttccgcggcttttccgcctactacgccatccctgcaggcgaccgggatgccaccggcgggacctggcagcccggccccggccttgcattctttgacgccatgcgccgcgccctgggccctctccccctcatcgccgaggacctgggtctgctgacgccggacgtttacgatcttctggaagccacgggctttcccggcatgaaaattctccaattcgcctttgacgacgaagctttccagtccgactacctcccccaccgctacgaccgccgctgtgtcgtctacaccggcacccacgacaacgacacgacctgcggctggctccgcaccgccccgccggagacccgcgcccgcgccgcagcctatctgcgcctgcacgacccggacggccccgtctgggggatgctccgcagcgcctgggccagcgtggcggacctggccatcgcaccgctgcaggacctcctggccttggattctgacgcccggatgaacacccccgctaccttaggcggcaactggacctggcgctgccccgccggcgccctcacccccactctcgccgcccgcctgcgccgggagatgacgatctacgggcgcctggcgtaaaacgcttcaaacgcgatccgcttcgctgggctctcgtttgaggggaatgcaccctgctgcgcgcataatttctgcgccttcagcgcggaaattccacagcgctgcatgggttcgactttgccaatcgcgctgcgcgctcttggagtctcacccacttgccgccggagaaaataattttgaccttatttgcgccgtgcgcggcgcaaactctgcgaggctttttt

SEQ ID NO: 2122 - DNA, 5664 bp, Unknown
  16S sequences of unknown bacteria
cctgtgccaataacttctacggcacaggctcttattatttgcgcagggttcaccccgacagggtggaaaaggatatctgcacctactgcggccagcgtcccggctttgactatgaggttgtgcgccggaatgggcacgacaatggaaaaggagggctgcgatgatgaattacccggacgttcctatctgggaaaaatataccttaaccattgaggaggcagcccgttatttccgtattggggaaaagaaactccgaaagctggcggaggaaaacccggacgcaagctggctcattatgaacggcaaccgtgtccaaatcaaacgccgtcagtttgaaaaggtaatagactctctcgatgtgatctgaaatcgcacatttgcaccgggccgtgattgcggtataatatggatgtatctcgtatcaaggctcattccggggcggaaaggagctgcatactatgtcagaaaaacggcgcgataacagaggccgcattttaagaaccggagagagccagagaaaagacgggagatacgcatttaagtacacggacgcatacgggaagccccaatttgtctatgcctggaaactggtgcccacagacaaaacgcctgcgggcaagcgggatgataaatccctgcgggagaaagaaaaggaaatccgcagggatatagacgacgggatcgacaccattggcaaaaagataacggtatgccagctctacgccaagcacaccgcattgaaaaagaatgtcaagtacggcaccgaaaaggcccgaaaaaactttctgaagctgctgggtgacgatcccctcggttcccaaagcattgaagatgtgaagccgtccgacgccaaagcctgggccatccgcatgagcgagaaagggtacagctaccagaccataaaaaaccaccagcgctccttgctggcggccttttacacggcggtggaggacaactacatccgaaaaaatcctttccggtttgccatgaacacggtgattgaggatgaccgggaggaaaaaatcatccttaccccagaacaggaagaaagcctcattgcctttgcacagggcgacccggtttattccaagtatgcggatgaactcatcatcctctcagagacgggtgtgcggatttcagagctttgcggtttcaccactcacctggatttcaaaaaccgtgccatcctggtagaccaccagcttttgcgcgacgctgaaataggcttctatattgaaacgccgaaaaccaaaagcggcgtccggcagctccacatgagcgagaaagcctacgaagccttccggcgcatactcaaacggcgcggcaaggtggagacgatcacggtggatggctacacggatttcctgttcctcaaccgggacggtttacccaagacggcggccaactacaatgccatgattaaagggcttgtgaagaagtataacaagctccataaggagcagcttcccaaaatcacagcccacactttccggcataatttctgtacgaggatggccaatgccggtatgaaccccaaagccttgcagtacatcatgggccatgcgaacatcaccatgacattaggctattacgcccatgcgtcctttgaatcggccaaggccgagatggagcgtatcgaggctgaaaaggcagcgccagcctcaatagctgcgtagtagtaaaggccaggtttactacccctctactacttttagcggcaatttcatgccgggacttgccactatatgcgtattgttctcccataaagcaaatggcgaaaaagcccataaatacaggctttgccgccatttgccgagttacatagggttaggtctaaaaattgtttcgagattaaattcaaacaggtaaaatctgctgaggggtttttgaaaaatctttgtaaaatctttgttatacagccttcgtttctttacacaaattttacataaaatatgaatttaaatatgccgctgtctcttccccgacggaaaatgtcatttccaggccggcgattttcagcgtaacatacggaagactccgatagacacagatccggcagatttctttcatctcccggtcttccgcccgctgtccgagtttcagagtttccgtctgccgcaggcaaaatattccggatttttccgctccctccggaagaaccgcttttttccagtctgagatccgcagctcttctgtaaaagaggcgatttcctcctcgctgcggagcacctgaggagtctcgtccgtcccttccggcagcactgcgatctcctgcgacttgagaaggctttcccctatagaaaaaacctccggctcagaagacgccgcgccgcctccctgacagccgcacagaatcaaaaccagaaccgcggctgcagccgccaaaatccctttgtgtctgttctctttttgtaacatttgatctccgaatcccttcattttattttctcctttcgatatatttcattcatgaccaaaagccggtacgcccggagaatccccgtgaggtaaatgcacagaaaaattccgattcccgccagaaccatccccgccgccagtaagagatcatctatagacgctcccgctcccggagcgagaagcggcatcagcaacagaccggtggaaatcagaacaatgcccgttagattggcgagatgagcctttttctgctgctgcgcataactcaaagtcacctgccgtttcacttgttcatcgaaaatcagcggttgtttccacattttccggtatggatcacctgcaagccagactgatgcagacagcacgatggaagcggtaagacatacggcgaacagaagcatggcaaattcggcgttgcaaaaagagaacgacagccctgcgataaagataccggtggccccgccggtcttcttccactttgcccgctgaaacagaagaaaagcctctgcggttcctctgcttatatacagtccctgccgccgtccggcatccatcggaccggcgccgccgaaactctcaccgcccgaagacctctcacatttccgtacttcttccggttttatccctccggcatttttctccagcccctccgccggggcgttttcatcatccagaagatagtccagcgtcacgtgaaacagtttgctgatcctaatcattttttccgtttccggatagccgcggtccgtctcccatttgctcaccgcctgccgcgatacgccaagctgctccgcaaacgattcctgcgaaagacccgcttctcttctcagcttctgaattttttctccgaacgtcacgtttcccctcctcagacatcacatgctccatacaggcggtcaccttctgcacgatgccagtatatcacaatcataaaaaagagctataaaaatacggttgcaattccgtaattccgacgcaactttgagttgcagcgaaaaataacagcaaaaatttcggaatccgccgacagcggctcagcctattctgcttccatctcggagaatcggatttacacagcagcggattcctttccttattatagcatgtcccccgttctccgttcccgtcttcctcagacttacaattcccttacgatttccttaaaaccggttccgaatgaattcatccgctgaaaaatatagtaaaatagaagcatcgttcaaaagggccggaagggaggcagaaaaacatgacatcagcatacaattcatccgacagcatccatcagcagacacactacggcggcgggcatcgaaaaagaagacctcagcggagccgtctcagccgaaaagacaaatttctgatcgcgctgatcgtcatcgccgtcctgggaaaatttctcctctctttcggcataccgggaaaagccgacgcggactttctgaaaaaagtgacggtcccggaatggatcagcgtacagctgatcgatgtggacggagcctccagaagaggaaaagaactgaaagaattcaacgatatcgtcgtacactatgtgggaaatccaggcaccaccgctcagcagaatcgagactacttcaattcttctgactccaatgtgagttcacatttcgtcatcgggctggaaggagagattattcagtgcgtccctctctgggaaatctcctctgccagcaaccacagaaactccgataccatctccatcgaagtctgccatccggacagcaccggacagttcaccgatgcgtcccgccggtcgctgatccgtctgtgcgcctggctctgccgtacaggagacctcagcagcagtcatatcatccgccattatgacgtcaccggcaaacgctgtcccctctactatgtagatcacgaggatcagtggaaaaaattaaaaaaagagatacaaaaagaattgtagacagagatacagatcaggggatgccgcagcggcatcccctgatctgtatcttttatcttatcttcctccggatctgaccttcatcgaatcccgccggcatatccggttttaccggtctctatctgtcatccagaatctctccgtcgatggaaatcgtaacgacgcgcagaggaatctgtctgccgctggcaaacagagcttcttttacggcatattccatcccgccgcagcacggcacctccatacgggtcagagtgatgctctgaatatcattttcgataaaaatcttcgtcaatttctcagcgtagtccaccggatccaatttcggacaacccaccagagtcactttctctttcataaactcattgtgaaaatttccgtaagcgtaggcggtacagtccgcagcgaccagaagatcagctccggcgaaaaaacctgcgttgaccggcgctaactgaatctgcaccggccacatggtgagctgactcttcaccggcgctccgcagcagacctccgcatcagctttatccgaatcatgcaggatcgtgcgttcctgcgaacctgcgcagccgcagaaggacgcttcctcttttgcctgttttctcgagagtatatgcgcctgcactgcctcttcgtcataagcggccgcttctctctcgatgattctgatagcatctgccggacaggccggcaggcagtctcccagaccgtcgcaatagtcgtcgcggatcagtttcgccactccgtcaaccatcacgatggcgccttcatgacaggcctccgcacaccgaccgcagccgatacaagcttcttcctttatttcaacgatttttctgatcatctctatacctccgtccgataaaccaccggcatcaaagagaaaactcatccctgacgccgaactttttacggactcattgtaatatacttttcggggaaagtctgttggaatcccaacaaaaagcgagaaaacggtctgatttccgaaacaaccgaaaatcagaccgtatcgcgatgtccctgccgcctgcacagatctgcataatgttttttcctgccggcaccggtccgcttctttccgataacatgcggaggagagagctattctcacatgatcggaagatacctgaaaatcaggctttccctacggcccataaatttttgatctgagatgcaattctgtcataaggccaggatctctcgcttctcgctctgctgttgggatcgtttacgagaaatccgctatcgtcatatccgcgaatgagaatgtagtgcccctctgtcgtaaaatctcattcgcggatatgacg

SEQ ID NO: 2123 - DNA, 4540 bp, Unknown
  16S sequences of unknown bacteria
atgttttttgagttcttccatgttgttgatctcctcattctggtgtgatagttagcaagcctggctctccagaaatattggtaaatcattggtaaaactgaggttgaaacacaggaagtgcttgatttacaagcgttttttcacgtccggtaaatcctgccgtggcacacaaatagtattttcgtcattttttctacagtgctcccccagttcacaaagacgtatcatacaagttttttcagttcacatgcaaagcaatcgccgacagggatttgtacccttcacaaattctgcagcttttcccacagcggttcctccggcgtcactggatagactttggccagaagcccgccccgcagattcggcacaccctgttcagcgtccgcgttccagtcctcatcgggcaggatcagggcatcattgaaatacatggctccggaaagtccgttctcccatcccggcttccactcgggaatccaccagccatgaggcacgcgcacagtgccttccggctgcacggcgtcacacttcacccgcaaaaccatacgaccgtgggtggtttccagccagacccaccggccatcctccgctccagatcgcaccgcatcgtttggatgcaaataggcttccgggcatggatctatgcggcgcaggcttttgatctggcgcagatttgtcagataatttgccttatcccgcagcccaacgaacaccgtcagcggatactgctctgccaacgccgctgcgttgcgcggtgtctgagccgcttccttatagtaaggcagcggatcgcagcccagctgttcaagcaccgtgctgtacagctcaattttccccgtgggcgtggcaaaaccggtttccagcggattaacctgcgccgcatcgcccaggaacatggcgccttccacatctttccaacgtttccccccgcgggaaacccggtaatccagcagcgcctcgtcatccggccaaggaaaataagactgcaggcccatccgatccgccagccctttgagcagtgcatacaggctgcggcattcgccccgtggctgaagcacctgctgctgcaccatggcgccgccagcgccgtcctgattcatcagcgccgggcgctccaggaaatagtccgccggcagaacataatccgccagctgcgccgtgggtgtcagccagtgatcaaacaccacaatcagctcctgacgcatcaggccttccaaaatgccctgctgattcacataacccatcagcgcattgctgcccaagttcagcagcgcgcgcacgggataaggctgatccgtgcgcatagcgcggaataccgccgcgggattagccataaaactggcctcaagatccagccattcgatgccgtatacccgtttcacagcagcgcgcaaaggctcatagccccggtaagagagcagcggatagcgatccgctcctaactgtttttccttttgttcctgggaaagcatttcatgcagttccagctgtgacacattgaccaacgcaggttcggggctctgcagctgttcacacttccccacaaagccacagatgctgaccagcaaatcctcacagcggatgccggatgtactgttcacctgcatatccagaattggcccccagggaatcacggacggtcccgctgtagcaaacagccgcgcagcggccgcgatctgctgcgcatcacatccggtgatagcagccaccttttccagcgaatactcctgcagcctctctctcagctgtggaaaaccataggtataacgggccacaaactctttgtcgtatagttcttcctccacaatcacgcgcaaaaaacccagcagcatggccgtatcggtgccatagcgcagcggcagatgaatgtccgcccgccaggcgttttccgacttgcgtggatccagaacaatcagttttgcgccccgcgccagagctgcatccagctgcgccgcctggcccgcccagttcccccgatggggattgtggcccaccagaaggatgcagttggctgacgacagatcctcggcaatcgaagtgccgaaagtggcacggtgcacctgcagcgtatttccctcgcacatatgcagacccgaaataaagttgggcgagccgatcaggttcataaagcgccggatcataccctggtcgccgctgacattacccatcagtgatgaaacagcaacgctctctgggccgtatgttccgatgatctgccgcagccgcgcagcaatctcgtccagcgcctgatcccaggaaataggcacccaccgctgcgccccccgcgtccccacgtttttcatcgggtgcagaatacggtcgggatgattgatatgttctttccagctgtgggccttaaaacagatggctttcgggtcttcatagggctccagcccctgcaatacgccacccacaacattggctttcagcggacaataattgtcacacaccgtacagatcacatgtttcgtctctgcattttttccccgttgcaccatagtttctcctccctattcgttcaaaattccagctgatccagaagcgcttccagcgccgcgacgccgtcttcgcccagccggtgttccacatccgcctgcgccgcgcgccaaagcggacgggcctgctccaaaaggctccgccccgccccggtcagtgtcaatgcccggctacgccgccctggttctgccgcatccgtcacccaatgccgagccagcacaggcttgagcgtgcgcaccagggtcgttcgctccaactccatctcttcggccagtacactgacactgaccggctccagccgttccagatgcgccaacagagaatactgccccaccgtcagccccacaggcgccagcgccgcgtcgtactgctccgtaacccgactggccgcccggcgcagctgaatgcaataacacgtgccgcttctacgtcttttctctgccacaactgctttacctccacattgtgtatatacacgaataatacatatattttcccctcccgtcaagcgttccctgtggtctttcaaaaattcggcaaaatgctgaaacgcacgaaccgcccgccggaaacacagcaaatgcctttccggcggacggcagaaagggccggcagcggaaatgccgcctcaccctttgatgcttattcgattccagagccggactggcaggagcgccagaaggcctcgatctgcgtgcgatccgcccgcacgcttccctgcaggaacgtatcctcccggccgccgccgcggccgttcagcgcttcgttcagcgctttgcccaaagggcgcagatttccttcctgcgccgccagagcatactgatatcccgtgtcctcggcaccggagaacaccaacactgtgccgccgcaggtttccttcacggcgtctgccaaacggcgcacaccgtctgcattcagctcctcctcaaacaggagtgtatcgccctggccgctctgctgctgtgctaaaacttcaaagcgcttctgctccagcgcaacacaccgcttccgggcagcgtcccgctcttccagcagccggcgcaccgcctcagctgtatgcagcggccgcgcggacaggaccgcggaaatcatacggttctgctgctgcactgtatccagataatgataggcccgccggcctgccgcatactccacccgcacaccgccgcgcagccgcgtcacagacaaaattttgatcagccccactgcgccggtatgctccacatgagtgccgcagcaggcgcagacgtcaatccccggaatggtaacaatgcgcaccggccccgtcagggcctttttgctgcggtaatccagccgggccaaggtgctgtcatccggccaggaggcttccaccggcagatccatccacaccgcctcattggccacccgctccatttcaaacaaagccgattcgtccaaaacgccgttcaggtcaataaacgtgctctcttttcccatgtggaaacccacgttgtccaggccatagcgccggtgaatcacaccagtgagaatatggtcggcggtatgctgctgggcataatcaaaccggcgggccaaatccacctgcccccgcacctccgtgcccggcagcaacggctgctccagccgatgcagaatgcagcccttccgctcctgcacatcgagcacctccaaccgctccagcgtcccccggtcacagggctgtccgccgccctcaggatagaacgccgtgcggtccaacacaacatcccagccatcctttgcctcacggcattccagcacagtcgctgtaaaggaacttaacttgccattactgtaatacagtttttccgtttccattcaaaatccgcctcacttttcggctcgaacctcatggtattttgtaatattttgtcattttatttcatatagcaatcattcttcgctttgcaaaaaccctcgccctctgcagtacactcagcgcacaacaggcaaaagggggactatgtccccctttttttatgcttcacatagcttttccttcgccaccgccagcatcagtttaatgcggttttcctgattcacc

SEQ ID NO: 2124 - DNA, 32759 bp, Unknown
  16S sequences of unknown bacteria
atctacgatatccgtgttttcataggcaatggcaatcgcatcatattcaaatccctgatagcttccatgagattcagggctggcaaaaacaagcatctgagattgtcccggaactgctgcattcgttatgatatcatttccatgccagatctcatctgcaagattttcctgtaatccaagatacccggtctcacctgccgccgtcttatagtttccgtcagctgacagaaaatagaaatataaaaaacccgcttcctcctgcgctttttctatataatcacggatttctctttcaccggaggtatcctgcagatactcaccccacatatggagatacgtcaggttcttatttgccagttcctttaacatcgtatcagactgatgaaaaacctccgtcagatgagaaacgctttcctcataaacagtttttgacacaaactcaaaatataggaaccccatcaaagcgatccctatgaaggaaacacaaaagatcgccgccattaagcgtttgcccgtattgcgatttttaacatccattcttctcacctcagagtcatgtagtcttcaggctctgcgagaatggcatcaccctccgaaacatatccgatccaggtatcttctacagcggtatcgcctccggtaaatacaacctgatcatctgtcggataagcttccatgtgttttggtatcgcaaggcaggttaccgtaaaagtatcatcatcctgaactttttttccatcctttgtaaccttactcagtgtataaccatcatccgtttctctgatctccacagaaataccactgaccacaggcagagaaccacggttaaacggaatgaagcctccctggtaaccttctacaaagtttctgaccgtctctttcagctcagccccgctcatcttgcagctgtaagccgaaagatcgtttggcataatcatgtcgcccgccatcttttctgtatactctgccttcaatacgcttcccgtaaagctgttccctgttgcgatcagcacatccgtcccataaatgccacgcagagtgtttgccatcacagaataggcagcgttacccccgctgctatggaagcggttggaataggcattctgagaatccaaaactggattctcagaggtggattcttcctcaagaagctgggcgttgaatgactgataggcctgctctgcatcgtattcacctgagatcatcttagaaaccacatcctttgataccgcgaaaaagtcatttgacgcaatgcggatatacatatggttctcttcgaccacagacttgacatccttcagatattccgtaagacgaatatccacatcctggctgtagcttaagagatcctgcccatcataaatgatcctgttctgtgcatcatcggaaagcattacgttcagcaccttcattgctttctgacgacgtgtctcgtcctgcgtcagatcacggttcaaagccacctggaaatacggtgtggtcatcagccacttttcgccgttttcctggaagaatggcagaaaagctgtgttaatgccctgatcctgaaacatttttacaccggaagagctgccgaagtacatggcaagcttaccgcttttatacatctcagtcacatcatcataattcagatccagatcatcctcgctcagccctgtatcctcaatgaactgctccatacgttcaaaagcctccggccagacggtgccatccagaccttctttctttgtattatccgggtcactgtaggcggtacgccacttgcgtccggccgcagatgacagctctgttgcagacagcccctgcagcgtttccatacaggtataatcataatgataatctgcagtaaatccacggatccccacctcgtcaaatgcccggcaggcagaaacgaagctttcgtaatcggttggcagaggaatatcatactcttcaaaaagatccttgttcactataaatccatgcgcgtccgcacataccggaagccagttaacgcttccatcctcattcataaaattgttgaggtatgtgtcatagacagcacctgccgcattggttgtggaaagatccatcaggctgtccttcagcggacttgcatcatgcagcgaaaaccggcagcaggttataatatccggcaatccgccgttttcattcagaaaccggtagaaatccagatcattgttgcctactacaaactcaatattgatatccggaagctgttcctggatgtacggtgcatatttttcatacaggttcgtgctccacaaatacacggtgagtgtgtctgcatcttccttttccgcacgcttcccgccacagcctgacagaaagactatggctgccaccatcatcaaaagtacagacaaggctctgctccgttttttctttttcataattctccctctttctgcaattgcttgccaatcggatattcgcaatccgtccctgcagctctgctgacagggcctagcttcgcagcttattgctttgcgcaattgaagcaggggcttgcttgattcggttaaataagactcaggtcttccttcttacattgaaatccatccgaacgcatttgccacagagctcagcagaataatcgctgcaaagatcgggcacagccagcggatcataaaattgaaaatctgttttcgcttaaaggtgccttcgccatgcagcacctcctcctcgatctttttcacaccaatgacgcgggatatgagcagacaggtcgcaatcgctgcgatcggcatcatgaccgaattcgtcaggaaatcaaagaaatcgaggaactgcataccgatgagcttcaccccgccgagcacgccatagccaagtgacgataaggtaccgagggcgagcataatcacacccacgatcacagtcgccttcttccggctccatctgagttcatcctgaaatgtcgagaccgcgctctccgtcagcgcaatggagctcgtcaccgccgcacagaacacaagcaggaaaaacaggataccgacgaatgtgccaagtcccatactcgcaaacaccttcggaatcgtgataaacatcaatgccggccctgcctgcagggtatccggatcgccgccggaaaatgcaaagaccgccggaatgatcatgagtcctgccatgatcgcaatcgccgtgtcaaaaatctccacatttttcgtcgaaccctcaatcgaaatatccttcttcatataagaaccgaaggtcacgagaattcccatcgcaatcgataaggagtagaacatctgccccattgcggccacaacggtcatccacgaaaaattcgccggattcggcacgagaaaatactttactccttcaagtgctcccggtctcgtcacagaataaacagcgatgatgaccgacagcacgacgagcaccggcatcatcagcctggacacccgctccactccgttgcggacacctgcataaatgaccgccagcgtgcacagggaaaaaatgataaagcacagctctgtggacataccgtctgcaataaacgtactaaaatagccctcttccgccagctgcgtgccgtgtcccagtacgtattccgccagatatttgataacccagccgccaatgacggaataatacggcacgatcagcaccgggataatcgcattgatccagccaccggccgacagccaggaggactttccgaacgaggcaaacgccccgaccggactttttttcgtcatacgtcccagcgcggtctctgccacgatcattgtgtagccaaaggtcaatgccagaatgatatagatcagcaggaaaattcctccgccgtactttgccgccagataggggaatctccagatgtttccgagcccgaccgacgcgcctgccgccgacagtacgaagccgagcttcccggaaaaggtacttcttttttctttgttttccatttctcttctctcagtcttttcttattccatgggcatttgcagcttagtgctccgcgcacttgaacgcagataagcattcaagcaggaacagagctttctgcaaaaaaacccgaagttgtttttagtataacagaattttcactgtgatacaattacaattcagacattctttatctgatgatgccagggttaagcggatattcgcaatccgcttcgctacttgcaggatcataagggatcctcccgcaaacgggtctctccttatgatatgtcataaccgaatgctgctttgcagcttatcaagagtggcttgtaccactcctgggacccgccaaacatgagaaagtagcgatttacgtagtaaatcagcggatttcgaatgtttgcagaattgcgagagctgcttcgcagcggagcaattcgcaggcgtcagttgtagtcaaaatattatgcataaaatgcgaagcaatccgtgtaccattttttacccaaaaatggatactacttctattttaatatccatatatggatattttccagttgacaattgcaatttcggatgctaatatggatatacaaaccactgatgatcgctctgcgcagttgaagcggggacttgtctgatttgggccaaagtccggaaaggagttcgtatgacactggaagaaatgaagcaacgcaaaaaggaactggggtatacatacgcaaggctctcggagctgtccggcgtacctctgagtaccgtccagaaaatctttggcggggcgacgacagctccgcgctatgacacgatgctggcgctggagagtctgcttgtaccggcaccttcgcagactgcatctgcatccgctgatacagcatcccatcccggctcatatgaggagcatgcggctgcattttcggaagaagagttgagccacgccggacaggtcggggagagcggcacatcctatcaggttaaacgtcagggtgagtataccctgaccgactattatcagatcccagacgagcggcgggtcgagctgatcgacggcgtgatctatgatatgtccgcaccgggctgcgaccaccagctcattgccggtctcattcacgcacggcttctcgcacacgtcagttcccgaaagggcacctgtctccccatgatctccccggtcgatgtgcagctcgactgcgatgagaagacgatggtacagccggatgtcgtggttgtctgcgaccgcagcaaggtcatccgccgctgtatctacggcgcgccggatctcgtcatcgagattctttctccctccacgcgcaggaaggatgtcacgatcaagctgaataaatatatagctgccggtgtccgtgaatactggatcatcgatcctgaccagtgccgggtgctcgtctatgatttttctgccgcgatctatccggtcatctatggcttcgacgcaaaaatccccgtcgccatatgggacggggactgtgtcattgattttcaggaggtctatgattatattcatttcctgtatgagaaagatccgaatccgccgcagtgatactccgcaccggccgtttctcttccatctctgttgccttacaccttatacatttgctgagcggatcctgcacagccattgcggtgtatacaatgccagcagccggttccacatccgcacaacagccggacggctaaatacggaaatcatgccgatactcagaagtccaaacagaaggagcacactcagccctccgtcctcgacatgctcatagatgccgcagaacatcagaatatcccggaaaatgcgatgcagcatatagaccggcatcgtattctgcccgactgccgatatccgcgtctttcgctgcggcacaaaaaacaacagcgcccaggaaagaatgcaggctgccagcagaagtatcagccgcacgagcaatccacttctgacattttccagctcataataggagaagttttcatataccatgctcagcggatcttccagccgttgtccgaataccagaatccccactgcaagaagtcctgccatcggaacaacggctcttcgatatctgttctgcagcagccgctgcattgtctcacgctccatataatatccaagatagaaaaacggcccgaataccatgatccgtgacagacacaaaaaatccccgatttcctgaaagaatccggctccaagcgacagcaccagcgacagtcccaaaacaagcgccggacatcgtccgtgtactgccggaatcgtaaggtaccatgcgatcattgcaaacagataccagggcgctccgctttgcgaaaaaaggtttatctgcgagaaggcctggtatccgctgatggcatatacgagctgaatcgccacaacaaagaccaagtatgcctttcccagatacagaagcttccggtaattgtaccggccgttcttataaaatgtctttgcaaaatacccggacacaaatacaaacaggggcatatggaatacataaatcagccgctttactacaaccagaaagctctctccgtgaatcggcagtaacagatgcccaagtacgaccaaaaacatcagcactgcctttacattatcaaaaaaataatctctctcttttgtcataatcatacatcctcatttatcgcagatgtattatataacttcttttttatatgtcaagatccagcttctgcaattgttgtgtcctcgcttctgcaattcgggctgctctgctttcctgtgtgaattgctacagcatggttccttatttccggatcagctccagcagctctgccttcagctgcggtgcgcagcccagaatatctgcatttttcagataaggaagcgcaccaccctcccagtctgagatctcaccacccgcttcggtcaggataatcgatccggcggaatagtcccatggcttcaggttgcgctccagatacgcctcgacgcgcccgcaggcgatatagcacagatccagctccgctgatccggtgcggcggaagtccgccgaatgcaggaacagttttttaaatacggcaaagttttcctctgtgtactgctccttctcatacggacacggaccgaatgcgatcactgcatctttcagctcccggtcatgtgcgaccgtgatccgtttcccgttcagccacgccccgccgccaagcgacgcatggaacagctcatccatgaacggattatatacggctccaaacgtgatctctccattttcatagtacccaagcgccaccgcgctcagcttcatatcatggatcagattcgttgtcccgtcgatcgggtcaaggatccagtattttccttccttcacaaatccggtattcacctgctcctcggccagcatccgcacatccgggaaacgctctgccagctcccgcttcagaaactcctgcaccgccacgtctacatttgtcacatagtcggctgcaccctttacggtgacctctgccttctcctgctctgaaagaatcagattctttgtgttgctcaccagcgccagcacttcaatttgttcttctgcattcagcatattcatttctcctcgtatggttctcgctctgttcagtcatttttatagctccttttcatagtataacattttcttttttcttttaccagaaaagagacaagcccgttttcatctgcccataaaagtacaaactctccttgccatcctcacaccacagcatatataatataaccacagactgatctgacaggaggtacagctatgggcagttttcttaatcccggaaccattgaatttgaagaggctttaaactctgaaatttatatagataaaagcggactgatcgaaataaccaatgccgttctccggacacagcagaagtttatgtgtatcagtcgtccccgtcgttttggaaaatctatggccgcaaatatgctctctgcctactatgatcgaagcgtaaactctgagcatctatttcgccatttgcgtattcatggtattccttcctttcaggaacacctgaatcagtatgacgtaataaaaatcaacatgcaggattttttaagctccacgcacagtgttcatgaaatgctgaaaaaactgcaaaaatatttaatctttgacctgcaggaacagtatccgcatgtgcggctgagggatgaaacagattttgtacaggttatgaaagatgtcttttcctatactaaatgtccgtttatcattttaatcgatgaatgggattgtctttttcgtgaataccgagaggataaagaaacgcaacgacaatatctggatttcctgcgcaactggctgaaggacaagtcgtacatcgccctggcctatatgactggtattcttccgatcaagaaatatggtacacattctgctctaaatatgtttacagaatattctatgacggatcccggcgatctggctgaattttttggttttacagaaagcgaggttgccacattatgtcagaaatatagcatgaattttgacgaagccaaagcctggtacaacggatatcaacttatctcacacagcaaggccagcgaccatgcctattctatgtacagcccaaaatccgtagtagaatccatgctccgtcacaaattcgggccatattggaatcagacggaaacctatgaagccttaaaggtctatatccagatgaatatggatggactgaaagactcgatcattgaaatgctcgcaggcagcaatgtaccagtcaatacggaaacatttagcaatgatatgactacctttgcatccaaagatgatgtactgactttgcttgtccacctcggctatctgacttaccacagcaccacagaatccgttgccattccaaaccgtgaggtctccaaagaatatgtcaatgcaatcagcacaatggattggcctgaggtcatccgttccattcaggcgtcaagagaacttctaaatgcactttggcgtcagaacagtgacgcagttgccgccggtatcgatcaggctcatcaggaaatttctattttacaatataacgatgaaaattctttgagctgtacgatcagcctcgcattttattttgcccgggaatattacaccattgtgcgggagcttccttctggaaaaggttttgcggatctgtgctttcttccacgtaaatcacatatcgacaaacccgctgctgtcatagagttaaagtgggagcagtctgcagaaggtgccatcgagcagatcaggcgtcagcaatatattcagtctctcaaagactatcacggaaatcttctgcttgtcggtatcaactacgatcgaaagacaaaaaagcatacctgtaaaattgaaaaactaacgtatccaatcggataacgagccagggcggtaagcgttcttcgcttaccgccctgatcttttaataatattctgctttccgatgctgctccggaatctttccttaatatttcttctgctcctacgcctccgtaatcacatcttcccgcttcttccgctccttcttcatgataataaagaagtccaccgtgatgtagaccgttgcggcaatccaggctgcctgatcggtgaagcaggcagcggtgaagccgtataccgggatgacgaagagtcccatgacggtacgtgcaatcatctcggtcagtccggcgaacatcgcagagccgctgtgtcccagtccctgtacgccgctgcggagaatgccgaggattgccagcagataatagaaccacgcaaggcatcggatatacttatatgcataggaaataacctctgcctcgcctgcatctacaaagatgccgaccatccagtcaccccagataatcatcgctgctcctgccagaaggctgtagatcacgccgatcacgatcatctgccagacgcccttatagatccgatcgatcttgcgtgcgccgaggttctggccgcagaaggtcgcactcgtattggatagcgcatcatagggcgacatcgtaaactgcttgaccttcatacccgccgtaaaggccgcaacgaccgtcgagccgagtgtattgaccgcactctgcaggatgacgcttccgattgctgtgatggaaaactgcagtcccatcgggacacccataccgagcagaatcttcatccggtgagaggaaagcttctcctcctgccgctccagcttcaggatcgcaaagcgttttttcatataaaggacacagcagatgccggaaatggcctgtgcaacgatcgtggagatagctgcgccctctacgcccattccaaagaccagaatacataccagatcaccgatgacattaatgaccgttgagatgacaaggaacaaaaaaggacttttgctatctccgagggagcgcaggatgccggccgccagattgtaaagcacggtaaatgggattccgataaagataataaccagatacaaatacgcaccgtctaagatgttctccggcgtgcggatcagaatcaggatctgtctgcaaaacagtgccgtcaccaccgcaattgcgatagaaataccggccgcaagcaccgatgcatttacgacataccggcgcatcagagagtattcttttgcgccaaaggtctgcgcgaccgggatggcaaacccgccgcacagccccatgcaaaaaccaaggatcagaaaattcagcgagctgctcgctcccaccgatgccaacgcatcaatccccagcgtctttcctacgataacagaatctgccagattataaagctgctggaacaaattgcccagcagcagcggaaatgcaaaatataaaatctgtttgagggaattcccctcggtcaagcttttttccatttctttctttttctctctttctccctctcagaattgatctactccgcactattgctatttataccaaataactgctttgcagcttctcagccacccagatgcatcccgaccagcaacacgccgacaagcccatagtatgtcacgaccgccacgagatcgtttaccgtcgtgatcagcggacccgaagcaaccgccggatcgactttgatcttgtggaaaaacatcgggatgatcgtaccgatcaggctcgaaatgatcatcgccagaaacagcgccagacctacacagccggcaaccgtaaaggaatatccgtaatccagtccttttgcaaagtgcagataaaagcctacacatacaaacgtcagtgtgccaagtaaaaatccgtttgctccgcctacccgcatttcctttaatacaaactgaagcttctgctttccggaaatgttctcatccatcagcacacgaattgtgacggccagtgactgtgtgccgacattgccggccatatccagaatcagcgactggaagcacatgacgatcgccacctgtgcgacgattgcctcgaaaatgccgaccacactggaaacaaccagtccgaggccaagcagtaaaaccagccatggcatacgctttttcatactctgaagaagcgtttcatgcagatcctcctccgcggtcagacctgccagctttgcgtaatcatcacccatctcgtcgtcgactgcttcgatcagatcgtccgctgtgatcgctccgatgatctcgtcgtcgtcattgagcaccgggatggaatcctccgcatagtctttcagctgttcgatcttatctgagatcttcgcggtagcccggacactcggataactcttactgacgatgctctccagcggcacatagtcgcgtgcaatgatcagatccttcagctccatggctcctgcatattttccatgtgaatcttcaatataaattgtgttgatattatcattctcatgtgcctgacgcacgaccgagcgcatcgcttccttgatcgtataggtctccggaattgacacgtagttcgtcgtcatgatactgccgatctcatctgaatcaaaggatttgatcagtcggatatcttcggatgactcatcgtccatcatggacatcagctgctgtctctgatcctcattctcgatgtcttccagtgcatcgaccgcgtcatcggcgtccatgttttccaggacatccgctgcttcctcgagcggcagctcatccagatattcggatacatcatcaatataagtaaagacttccgacagccgctctaccccaagaatccggtaaagacgctctctcgtctccttatctatcagcggcagtacgtccgcaatatcattttcatggtaatcatccagtgcgtcccgaatctgctgatccgattgcccgctgcagataatttccagaatttcttcggttggtgtgagttcttttacttcattcgtttccatgtccttctgcctccattctttctcacatcatgagcacagcagttcagacgctgccgtcccgtgctcattagtttcggtatcttatactccaccattaaagcggacattcgcagtcgctttgcaatctgcgttcagaaaatgggtataaaaataccatcacccggtcttttcggcgatggcaaatggaaacgatatagaaattgtacacaaaaaagctacagttccttacggagtgtaactactgcattccatatcatccatgtgccgccgttccataatcgaccatgactgtctgaactgtccataatgacactcctttccatgtaaagtccgcggatcgctccgcttcgtgcttctattttgcatcgggataatattttccctgttcagttatactacccgacaaaaaaaatgtcaaacctttttccctgtaaaacgggtaaaaataaagtaaaacaggagccgtcacgcaactgcataacaacccctgcccttcctttttctcatatagaaatcctgcagccttctgcttatcgtaagatcagcaaagatccttcagcatcaggtgctcgccgattccatccgtcagcgcattcggaatgattccgacctcgtagtaaccgttcgccttataaaattcgaacgcttttacattgaaatcgctgaccgtcagagatgcttttcttcttccatcctcgcggcccatctgctcgaactgctccagaagccatgctcctacgccctgccctctgaattccttttttacacacaggagcgccagataatggtactcattcgtaaagccattccggctgatgaccatgagtccggccctttccccttttgaggtctctgcaaaatagaggcgtcccttcccgtcatccggaaaataagcacggacataatcctctgtccggtaatcgttcgcaaaataacgctcgtacaagacggagtcttttgcaatttcctcgcaggcccggatatccttataatatccctgcttcagatgcaaattcatagttttctccttactggcactatgacgactctccttagccgttctgaccgcctccgacctgtccggctgccggccattacgcttcagggaatcgcttgactattctgcccagttagccggatatacggtgtaaacgtagcggcatttgtcctttgtctggaagtgaatatggcttcccttcgggatgtagatgatatcgcccgggcctccggaaacgattctgccatcgatctcgatctcaagggttccctcgagtacgatgtcgtactcatcataggtgagcgtccactcaaagctggtgtgatccagttccatcacgccacagcccatgcgcggagcctcttccaaggtaacgacatcctttaatgccacgccatcctgttcaaacggctcacattttacggtagaagtcttaattccgatgattccgctcggatcaatgtgtttctcaaatccgcagtcagatgctttcttctcacttgcggctgactctactacttttgtaataatctcacgaatcagttcttcactaatattcataatgtctgtattcctttccgatcctgactctatttacagcccggcattttagcatgttctgcctcctcccgggctgtagattcattctcttttcctgcctgagcttactcaggctgtcagtttcttcgcctgctcttattttgcggatttaatcttgctaagaagcttcggagcaaggagatttgctacgatcagagctgtgataccagctaccagcttaccgatgataaccggagtaaccatagcctggtctacaccagcggtgaatccaaggtggtcaccaaatacgaatgctgcagatactgcaaatgctacgttgaggagcttacccttcgggtccatctcgcccaggatattaaacatagcgatgttgtttgcaaggtttgctaccatgccggcagatgcctgctcgttgattccaagtgctccaccgagcttcttcagtacgccgccgaaggtacgtgtaatccactcaaccatcgggaatgcaccgatcagaacaataccgatctggccgcaggtcagaagaccgctgtcaagaggagaaagacctgtcacttcatcctttattgccattacgtcgaacagcgggaacatgattcctgtgatctgctcgaatactgcgattgctgtgaaaacggtaataacaactgtaacgcctgtaccaaatacattgaagccgttgatcatctttgccggtgcgaaccacagaccgataacgatcagagctgcgataatgataaccggaatcaggttctgaagaatggttcctacaccaatcttatactcggtcattgcgctcattgccacaccaccaacgatacatccgatcggaacggtaatcagaccagccagaacacctgcgcccagatatgaacggtcgtccttggagataattccaagtgctaccggaattgtaaatacgattgtcggtcccatcatggttccgagaatcagtcctgcgaatttaccgattgccacattgtcgcctgccagctccattgccagcgggtaaccgcccatgtcacatgcaagcagtgttgttgcgaacatggaagaatctgcaccgaataaattgtagatcggcttaataaccggtcctaagatcgttgcgagtaccggtgctgctgctactactccggccatggagatcgccagcggtccaatcgcgttgaagccctcttcgaacttctcaccgtagccctttttgtttccacgaatcttgtcaattgctcctaccagcatgaagatcatcatgatcatcataatgacagagttaattgagatattgtgcacccagtctgaaatgctgtttgtaaatacgctcattgttgctcctttccctgaaccccacacttatgtccctcattttgcaggattactcagtcacgtttttttctattcagttttaaagcagcgaattgaataatgtcttggacggacgcgggatcactgtggtgcctaccaacagctcgctgccgcgggaagctgcttctactgctgccttcaccgctcccacatcacctgtcagggtgacataaccctttcctccgatggcgtagccaatatgtacctccagcagcgtcacatttgcagccttcgctgccacgtctgccgctgtgatcgcggatgccactgagaaaaactccagtacaccgactgctccgtaccccggtacctgtgtagtcccgctcatagcaggaatcagcgacggatgtacgttcggaagcataagtgtgtctacgacacattctccgccccgaagcattccctctttcatggatgcacggacatctcccgtttctcctccgatcaggatcagatactttccgggacatactgtggacgaacggagtaattgaatctgtgctgccttgaccatataatcacaggtctcaatgcctctggcgatgctgttcagctccaccataccaattgccaggcccatatcctcactcctttctgcacgttatgcgtgcacctttatccgtaatctcttcgatcactccatctacgctggaatgaatgttggcagaaagcccttctgcagcggctgcgatgagctcaccctttgcaacggtctctcctgcctgtttcacagcgactgccggtcgcccgatgtgctgtgaaaacgggataaatacggtatccactgtcagttcctcgcatgtcttcggatgttttccataatactggcttaaattcagccttgccaccagacggttcgtcggggtcttccgctcctgcacgaactctcttgcgtgagcctccgggttcttcggcacctgaatgcctctctttcgaaactccgctttgaaataatcgttgaccttacgcggagaaagccccatgggacaggcgaacatctcacacacgccgcagctgcagcagttcgctgcctctccgtacatgcgcagatactcttcattgtccgtgatcgtcggttcaagccacagcccgcgcatcatcaaattcggatggatctgatgaccgatcagatatctcggacaaagctctgtacacattttgcactgaagacaggcactcttggtctgtttccgaaccgtctccatcggaagggatgccttccggaacagataatgatccttcggaagtaccagaatgttaccggtcgtcttggtcaccactgcctgctccatcgccgcctgttcggtcagctgctttcccatcatcggtccgcccataatcagtgcgaaatccgaaacggtcgggtgcgctgcctttacacactccagcaccggagtgccgatcggtacgcgcagctggatgggatgctctacctctccgactacggaaagatatttctctgtgacagcctttccttccagagcatctgcaatgttcagtaccgtgcccacattatcaactacacatccaacatcggatggaagcccccgctccggtacgcatctgcctgttacctgctgaatcagtgtctgctcatcgcctgccggataaaaatatccaagctcaaagatctccacgtcgctgttctgctcacggatcgccaccttaagtgctgcaatttctttttcatatgcaccctttaaggcaataaccttcttcgaagcgccgatcgcctctgcgatctgcggaatcgtgcggataatccggtctgcaaatgtgcggcacaggtatttgtctgtctcgatcagcggctcacactcagcggcattcacaataaaatattctacgtttgtattcagcttcacatgggtcgggaagccggcgcctccggcgcccacaactcctgcagcctttaccatttctatcaggttcattggcaaccctcttttctctcatgattcaggtcaaagaaccgaccggtcaatctccagatcatccacgattcctactaccgtcgcatccaccggaatggatacgtcaccggctgcatttctcgcagagcttccgcctacaataataacggtctcaccgactccggctccgatcgtatcagcggcaaccaagggtgatttgtctactgtttcatccagtacatcgagtggctttacaaggagcagcttcagtcctgagagcttctcctcttttcttgtcgcccaaatatttcctatcacctttgcaacctgcatatttattctcctttgctcttgtatcactcaccatctgacgggttccatcggactgctgtgagtgatacgcaagctgccctgtcgctcattactcacgaaccagtcgaatatttcttgctgatgctgcatcttttgcaagtgcagttaaaatatttctttctgttatacgaattacttttacaccgtcgcgattagcttcaatgatatcacgctcggtaatcacttttttggaaaatgtgatttctttttccggttccggttcttccgccggtgccggcgctgcttccggtgcctcaggcgccgtctcctgcgccgtcaccttctcgccgcatgtatctgcgccgcctgcctcttccttttgctgctccggtgctgcttcgcaggagttctctcctaaaatgcagtcctccagctctgccagcgggcagatcttcagtccgaaggatacaagctttgtcagctgtgcctgcagcatgcactggtaggagccaagcccacctaccggatacttgtaaagctccacctcttctcttggcacgtaaagctttttccccatgagaagtgcctgcgctgcaagctttgtatatgacgtatcggtaataccggatgccagcttgcacatcgcttctgtcgtcagattaaacagaactactgcctctatcccgtccaaggtcgtctcgccttcattcagaagggcacagccggtacggtacttttccttaatccgcggactctccagcagcttatggcagtctgtgccatgctcctgcgtcagaaccagcagaccaggaagcggtgcagcagctgatgcaagcgactgcatcagttctgtctcggtgacggtctcaccggccgctgccagcttttccatcacacgggaaagaatctgctcaaccatttcatttctttccaccatttctcctttcttctgaattacccttcagaaaggatacaatttctcgcaattccagccggtgttaccagaaacgggttcgccggcttgaccgtatggataccggtgaccttctcaaagattccctcaatcccggtcagacaggtcgtaccgccgcaaagataaatcgtatcgatctttgacggatcgacatatttgcggacgatcgttgccatcttctcgatcaccggccgcacgaccggaaggatctctttatgtctggcataatcctgcttgattgcttctgcttctgcaaaggatacatgatagttcccggccagcaccagtgagaggtgcgtaccgccggtcggctcatcctcgatctgtacgaccttcccgtcgtggaggatcgcaagtccggtcgtaccgccgccgatatcgacgacaactccgtccgaaatctgatagatggcatttgcagcggtcggctcatcaacgacatttgttacctcaaagccggcggactccgctacatactggtgtgtccgcgtgctggattccgttcctgcaggcatggcaatggcacaatcaatgagctcctcgcccagacgctcctccagcttttccttcagttcccggacaatcctgcatgccccgctgtaatctacaactacaccatctcgaagcacactcgccgcctgcttttcacaggccaccggctggtcattttcatccagtactacaagtacaatataggcagttcccagatccagaccggtcttgaggcgttttccttcgtgaggaagtaccttcttctcggactcctccaccttgctcatatacgcattgacacgctgcaaatccatcatatatccttaactccttttgtttatttgcttcgccctacaccttcggtctcaatcttgcggatgatccgtcccagtgtaaaaccacttaccgaagcggcatttgcctcatcgaaatcgatgtgcatccggcaggaaaaattcttgctgacgcggatgattacatcattgaagatcaccggacggtcgctgaatacttctaccgcgacacgctccttatccttcaggttcattttcacagaatctgcttctgtgacatgaatgtggttatgggcgatgatcactccttccttcacttccagtgtcccgcatggaccctgaatcgtgatcgagccggaaccggcgatgtcgccggattcccttaccggtgctgtgactccaagggccacacaatcgctctttgagagttctacctgtgtggcactgcgaaccggccctaataccgctacccgctccatgctcttctttggcccgatcagcgtcacgcgctgctcggagaggaactggccaggctgagataacgggcgcttcggctcgagctttgcaccttttccaaacagtacctccacatcttcctgtgtaaggtgtacgtgtttggccgatacctcaatttccacaaatccagccatatggacggcatccacaacagctgctgtcagatctctcattcatttcctccgtcttcgctgtaccagcctgccagatgacggcacatcatgatgtgcagtgcactggataagcgattcagctcttctatgatatctgtccggatatacttcttcccgtcatggaaggcctggcatgcagccacctccgtctcacggattgaggtacgcagcttgttcagcattgcatactcggtacccattgtataatccggcagaaccatctgcttgatattgtaatacttcattgggttatgagactgtgcacgaagctcttcgtgggtcaggccgatgaccgcatccaccttcatctcttcgtccagcacctcacatttcatcatctcccgcaaatccttcagaatatctccgagatcattcaggagtgttgcgctgccgccggctgcctggatcatcgcctgcgccagtaccacgtcagcctgaagtgcatccagcttgccgcggaacaggatacgaggatgatccttgcataccagcttgtttccaaagagctgagtcatgtgctccggcttttcataataatatgcatttgtctcataatccacatatttgggtttcggtacagttacctgcaccgggatctctacttcctccggcggcggaacctcagtcgccacaacatgcggacggcctgtcggctccggcttctttggcgcctcctttttctcttccggcgccggttcctcagccttctgtaccggcgccttcagctggtgcgtataggtatatccgccttccttttcgacgcggatcttacgctgctgaaggtattcccgggctgccggtgtgagaatctttccctgggggatcacatacacctccggctggctgcttcgaagttcattgcgaaggaaatcttccgtgattgctctcacgtattatccctcctcccgtaggtcattgacaagtcagcgactcattatttgtttacagacggaaggatgtactctacctcttcgtgcggtctcgggattacgtgtacggagatcagctcgcctacgcgctctgctgctgccgctcctgcatccgttgctgcctttactgctcctacgtcgccgcgtaccataacggtaaccagtccgccgcctacgtgctctttaccgatcagagtaacgtttgctgcctttaccattgcatctgctgcctcgatggaagcaaccagtccctttgtctcgatcattccaagtgcctgtgtgatagccatattaaacctcatttctgcgctgtgcgcctgttattcttatgattgattattcctgaacgttaatcttcggaagaatgtactctacttcctcatgcggtctcgggattacgtgtacggagatcagctcgcctacgcgctctgctgctgccgctcctgcatccgttgctgcctttactgctcctacgtcgccgcgtaccataacggtaaccagtccgccgcctacgtgctctttaccgatcagagtaacgtttgctgcctttaccattgcatctgctgcctcgatggaagcaaccagtccctttgtctcgatcattccaagtgcctgtgtgatagccatattcgtggtctcccttcttaatatattaagcggatattcgcaatccgcttcgctacttgctcataaccgaatagctgcttcgcagcttatcaggagtggcttgtaccactcctgatacaagcaagtcccaacccactgcttattgctttacgcaattgaagcaggggacttgcttgatacggttaagatgttggggtcaaaaggtattttgcccccgatttctgtcttcaccggacagcctctttgggactgcgccggtgaacgtcctgcattaataattacgtaatcttgaaattacgctctttacgatctcgtctacgtcgatctcgctcagatccatcgtctctttgcatacaccgtcggtgcaatccgggatctgtgccttgatgtcttcaagctctctctgaccatatgcgacataacggtagttcagcagctgaagcggtcctacgttttcagaggtagcgcttccgcctactgcgccgcagccaagagtcaatgccggctgaaggttcgtggtagctccgattccgccaagtgcgcttggggtatttaccataatacgggatgccggtacgcgctttgcgaagtaatccaccatcttatcatccttggtatgcatggagaatgtgtgtcctgcgccctcatagtaaagaatggtgcagaccttctcgcatacgtcgatgtaatctttacctgtatagaagcccatgatcggtccaagcttctcgttggaatatggatggccacggcctacgccggtctcctttgcaacaagtactctcgcgtctgccggtaccttatccaggtgagccagcgatgcgatcgtttttacgctcttacctacgatctccggattcatcgtgccgtttgcccgaaggataaagcgaccgagctgctctctctcctgttcgtcgaggaaatatgcgccctggcgctccatctctgcctgtactgcctctgccatgtcctcatcacagatgatagactgctcggaagcacagatcgtaccattatcaaaggtctcagaatccatgatccgctttactgccagaggaaggtcgcaggtcttctccagatatgccggaccatttcccggtcctacaccgattgccggtgttccggatgaatatgctgcctttaccattgcggaaccgcctgttgcaaggatcagagcgatgtctctgtggtgcatcagggtgctggtcgcctccatggtcgggatgctgatgcaggatacgagattttcattggcaccagcctctgcgatcgcctgacggatgacctttacggtctccatgatagcgcgcagtgcggtcggatgcggggaaaatacaattgcgtttcctgacttaattgcgatttctgatttataaaatgcagtggaggtcgggttcgtggacgggatcagtcctgcgataactcctaccggaactgcaatcttgcgaagtcccttcgcatcgtccctctcgatctcaccaatcgtcttcatatctttgatatgctcatagacgccgcggctcgcgaatacgttctttacgaccttatcgctgactacaccaaatccggtgtcctcctgagccatctgtgcaaggcgctttgcgtttctcacacctgcatctgcgattgacttgacgatccgatcgacctgagcctggtccatacgggcaagttcccgctgagcttctttggcagattctaccagctcacgaacttcctgcatggacattagatctttgtctatcaatttcataatggcctgttctcctgttctaattcattctgtcataacctgttgtctgtcactgtctcgcctgaaaatccaggatcttttcaataagctcctgcttcttcgcgaagcggatatctgattttgtcatattatccactccaagcttccgtgcaagctcccgaagctttacaacggacatggaggaaagaaagccaggcttataaactttggtcgggatctttcccggtacagcttccaccgtcacttccggctcattgagtgcttccgcaggctccacgggagatgcttctgcttcccctgattcctccggctgctcttcgctggccctagtctcttccggtttggctgcttctgtttcctccggaacctccgtgcctgtctcctttactttctctgacgcctcatgctccggcacagctgcagcttcttctatggtgacttccgtctctttgacttcagctgctgcctgctctgtctgtacgggctcttcttcctccgcgtcagaatcatcttcgggggcttttggagctgcgccgggatccgggtctgtcagaatccattccagctcttcatgtggtcttgggatcacatgaatggaaatcagctctccgacccgttccgctgccgctgctcctgcatcgaccgctgctttcacagcgcccacgtcgccgcggaccatgactgtcaccaggccgccaccgacctcttctttgcgggtcagggtgacatttgccgcctttaccatggcatccgccgcctcaatggcggctaccaggccacgggtttcaatcatgcctaatgcgttcatactataaagcctccgttatgttctccgaagcttactcgatcggacggtcagcaacggcctctactgcatatgcaaatgcatcgcatgcagccttgcaggcactctggctaccggtcagaagcgcgccgccaaagttggtctctgaaggcggagcatacagtacacagcattttacgtctgctgccttcagtgcagcatcgacgccgaacattgcctcaagcggcggtgcgatcaggtatgcgatagcctcgccttccttgattccgcagccctcagacaggtaagaacctgttctggaaatgcagtgtgcatagtagcagatggtatcatcctcgtttgcagaaacgaagtggcatacattctcgatcatatcaacagctgcctcaagaccagcctttgcttcagccgggttcggagctgccaggataccgatgatctcaccggcaagctttgtgtttgcatttgctgcgccggcgtaaaagctcttcgcgtaaacaacttcgcagtcagccttcttggtagcctcgtcaagtgcagtataggtaacatcatcgcagtcagcggtgagcagagccagggacttgtgctccggcttcagattcagctgttttgccatgtctgcagatacattcgggatcaggcgggtcgccaggacctttgccggtaacggatctcttttcatgataaaaacctccttttaactttaaatcaaagcttcagttctgttccgctgaccttgcgctcaagcatgatcttgatgatctctgcaatgtgtgcaccagcctctgccggaacggttcctgcgctgtggatattggaaagtacggtacgtcttgcctccggcataccaacggtagccttgtaagcgatgtatgcggacatggatgttgcggtaatcagacccggtctctcaccgatcagtgtgcatacaacatctgcacctgtaatttcgctgatttcatcctcgactgctacacggccgtattttacgaagaacggtgtgccgtaatcgatcttgtagctgtcaagaccctgcagaatagccgggagaaggtcaccgatgtttgctgccactgctgcggaggaaagtccgtctgcaacgtagatctgtacggtcgggttctttttgcatttctctttgatcgtctcaactgcttccggagagagcttacgtccaagatccggacgggtcagatacgtatccttgctgtcgcactgtgtctgtacgatgaaaaggccctgatcctttacaaactcttcgtctacgtcattgaagactgcatcctgtgctgcagagtgtgctgcacggaactccagctgcgggagagtcttatatcttgcgcctgctttgccgataccaagacggcacggtgcgagcaccttctgctctgcatacgcctctccgtttaccggattctctacaaggtactgcttgcggatgtcgatctctgtgatatcctgcaggcatccgtcttcgattacggacggctcaagctctacgcccttcttcgggatcttcaggctgatgccctcagatgctgctgccttcggagctgctgcctctgtcgctgctgctactgcagccgttgtcttttcgtctgaggaaacattcatttcctgtaatacctgctcgataattgcttttaaatcctttgcttccatggaactgtcccctccttccttatctcatgaatacagacgcgtcgcctgcaagcttggtcagtttaccattctctgagaagcccatcttctcgagccactggtcgaactccttgatcggacgaagaccaaatacctcacgaagagctgctgcctcatgaaatccggtacactgatacatcagcatacagtcatcgccttccggaacgcccatgatgtagttgcagcctgcagctacgagcagagttgccaggttctcgatatcattctgatctgccttcatgtggttcgtgtagcatgcgtcacatcccatcggaacaccggtcagcttgcccatgaagtgatcctcaagacctgcacgggtaacctgcttggaatcgtacagatactccggtccgatgaatcctactactgtatttacaaggaacggctggaaacgcttagcaaagccatagcatcttgcctccatggtaacctggtcccatccgttgtgtgcttcagatgaaagctcagatccctggccggtctcgaagtacataacgttcgggccggtagcggtggaattggtcagcattgtctgacggccttcctccagcatcgctgcagtcagtccgaatgcctcattacccttctgggaaccggcgatggactggaacatcaggtcaagcggagcaccgaaacgctgagctgcctctgtctgcgtggtaacgtgtgccagtacacagatctgggtcggaacttcccacttgttcttgaactcgtcaaacatcttcaggatacgtgcaacgctctctacagagtcgtctaccgggttcagaccgataactgcgtcgccgcagccaagggaaaggccttccataacggaagcaatgataccctttggatcgtcggtcgtgtggttcggctgcagacgggaagagaatgttcccggaaggccgatcgttgtattacaatgtgcggatacgcgcatcttctttgctgcgtagatcaggtccaggttgctcataagcttgcagacacctgcaacgatctcagatgtaatacccttggatgctctgcggatcatctccggtgttgtggagacatccagcagccactcacggaactctgctacagtccagttcttcatagtattgaagatctgctcatttacatcatcctgaatgattctggtaacctcatcctcttcatacggaaccgccggattgtttctcagatcattcagcgtcagatttgaaagaacatattttgctgctactctttcctctgcagtttctgcggcgatacctgccagtttatcgcctgatttttcctcgtttgccttagccattacttctcttactgatttgaattcatatacatggccgaacagctttgtctttaaaatcattcaatatcacctctttctatgtattaaacaccaacgttttgttgacaaccggaagcacctgtcctccgacaagcggctctccgatgtcgagatagtctccgctcgatgtgtggatccgatcgatacagatgaccggcttctcgtgatgcagctttacattgagcgcatttccgagcacttttccgatgtcgttctccacaactacgatcagcggatactcactctcaatcacctcctcagccccttttataatcgcatcagccaactcctggattcccttaaagctggtacgcttctgacctaaaaaggcaatcgccacatgctccagctttccttcggaacggaacatcggaagttgcgatttaatcgcctcttcaaatgtattaagatcttcctcgtccacggcagataccttgaggaccggaatgttcttaatcggaagataacttttgtcgtagcgaatcgtacttccgcttacgtctgtggcatgcgttccggctccgactactgtggcgcggatcgtctccttcgcccggtacagggtcagtccggaaagctccttctgtgcacgtatcgccctgccaagcagtacgccgatgtctccatatcggaacggatcggcatcctcggcattatagacacagtcggccacgccgccggaatacgtcacagcgagcagtttaggctcttgcgggagcatggcaccgtcattcgtatacaatgccttatgtgcctcatctgccggaagcaggtgaagtgatttggcaagctcatctgccatcaggcagcagatcctgtacagcttatcctcgtctgcacggtcgccgaccgcaatcgtgatcccgtgatcctcggcaagcttctttgtcttatggaagatgtacgaaatcttcccgtctgcgatcttgatcagacggccgccgatatccagacagcagacgccgcggagtgtgcccttctgatagacggcgatgttcgtcgtgccgcctccgacatccagattcgccaccgcagtgcggtgttcctcggaaatagtatccgtaccggcacctctggctgccagcacagactccagatccggaccggccgtcgccaccacgaaatctcccgcaaaatccgagagtgcttcaagcacctcgtttgcattctgcttccgtgcggtctcaccggtaataataactgctccggtcgagagatccgccggtgtcatgcctgcggcttcatactcgtcttttacaatcttctttaccgcctccgcgtcaatctccgttgcggaacgaagcggtgtaaaataaatcttgctacggtatattacttctttatcaacaatcgatacacgcgggacattatagctgcccgccacattttccacaacaatccggctgaataccagctgtgtggtagaagtaccgatgtcaatacctatactctttatttcctgtctcattccagcctcccggtaattcgctttgtctgtctgcttccgcacagcaggctgactgcgccccatccggccatgaacgggtacgccttactacaggatgtgcagatcccgaaccagctgttccactccctctcctgtcaccgcactggtcacatagagggtaccggctccggcatccttcaaatacttctttgcgcgctcaatctgttcttcatctgccagatctgccttggtaataatccccacgcacggcttccctgcaaacatactgcaaaacagcggaggaaacatcgtccctccctcggtcgcatcctgtaccatcaggataatatccgcatctgcggaagtcacaatcagtgcaccacggaatcctctccgctccagatactcgcccggtgtatcgatcatatttttgttgatcacctgcaccgtctgcgttttgtagtagtgaagctcctcgttgttgatccgctggcacagagtcgtcttcccggcggtcgaccggccgatcagaatgatgcgctttttcttttcttcctttgatgtctcattgctcatgttttcgtcaccggtgcctttgcaaatcccatccggtcacagagtacagccatcacgtccctgatcgccacctctacagctgcgacatctccggtaatgacaagagagccattaaagcggtctacaaacccgaccttgatatctgcggatttgctcgcgatatccgcggcaatcatagcgccctcactcggtgtgatcgtcatgatgccgatcgctccctctgcatcgatcagtccgagctttccatacagatccttatccggactggcgatgacatgcgctaacgtcacctgcttaccaggaacgaactcctgtatgattcgctcttttccttcaaactctgacattcaggtcctccatttacggaagcttacctataaaagccttgcggtaaatttccttgatatcctctaccgtcaccggctgaggattcgtagccgtgcagcgatccgcaagcgctgctgctgccatctcgtcgagctccgcctcgaactgttcctttgtcacacccgccgcctcgatcgtgcacggcatgttcatcttcttgatgaaggtacgtgcggtccggatcatgttcagtgcgctctgacgaacactgctcgtatccagacgaagcagtctcgaaatctgtgcataacgctttgccgtcggcgtaagctgctctgcacagcctgcgttaaagctcatgacatacggaagaagaataccgtttgcccttccgtgcgggatgtggaatttccctcccatcgcgtgtgccataccgtgattcaacccaaggcccgcatttgaaaatgcaacacctgccaggcaggacgcgttgtgcatgccctgacgtgccttcgcatcattcgggttcttatagactgccatgaggtagtggttaacgagcttgattgccttttctgcgcaggcatcggaaaaatcatttctgcctgtggagacaaatgcctctaccgcatgtgtgaacacgtcgattccggtgtctgccgtcacagaaggcggtgcactcattacgagctgtgcatcaagcacggccacatccggaagcaggctgtcatcaatcagcgggtacttgatacctttggtcttatcggtgatgactgcaaaacggctgacctctgagcctgtaccactcgtcgtcggaatcgcaacaaactcgatattcttgttcgtattgcccgtcttcttcgcgataaatacaatagcctttgccgcatcaatagcagctcctccgccgaggcagatcaccgtatccggatcaaactccgtaatctttgctgtaccggcagtgaccattccgatatccggctcgccggcgatgtcggaaaagacctgccattccacacctgccctgttcagcttatctgtcacataagacacctttccactctgcgccataaagctgtctgtgacaacaaacgcttttttcatgccggctgtgagggaatccagaccatcacccatgataattctggtccttaatccaaactgttccataagtgctcctttctgaaaattttaattatgtaggaaggatgcaatcgccacattgtattccggaagtccctgcttctgccacagaagcggaatcccgagaacctcctcggcgatccggccaagatcaaatccgagaccggaataagaaaatcgcatctcctttggatgcctgcaaagctttccttctgccctggcacactgcggacacagttcgcagccccccgccatgatcgtcatggaaccgggaaactctgcctccagggcaagcaatgcatgcagcatctgcttttttgccgctccatatgtcttacggcgcatctcctctgtacgctccggcgaggtaagtgccgcgatcctgactgcctcgtcataaagaaccttcagcccgatcacctgtacaaaggaataagctcctgcaatccgctccacctgcggcataccgggcggacaggcccagttttttccgtactgcggacatgcactgcacagcggaacaaaccgctccggctggcaatagcgcgaaatccaatccggaacacgcagggtctgtacctgtacttctacctgatacatgaaaatcctcctgtctgttcgtatcatacggacatttagtatgtatccgcggactgccccaagacgcaatacagccgcagaaattgcggcttcatgtgcgtaatatgcgaacgcggatacatatgtgattgtggaatacggacgtcctgtctgacagaactgaaaaatccgaaggcacctgatgttcaatcaaggtgtcttcggataaccacggactactttgtccagtcttacagaacacacataaattgaactggcaggctccgatccatgtgtactctgatgctaaataaacataagagagaggtgatactgtgatcgccgtcttgtgagcacacataaaaccggatcgcctgatgagacgctcctgcaagctactgccatgcagcagctgccctgcacactcccggtcccggggagctgtttacgtgcgttatatacaggcaggtcttctgactctggcatccgacacagctgcttctcttctcaggaacctctcctaatgacttccaagcaacggctactccaacacagcaacggccttgtacgggattctcacccgtttcccttttcacctgcaccgatgtgcagacacctgtataccaattcggttttctatgcctaggataccattgctgagcacggaagtcaagtataagtcgagtaaatatatctaatttctatcgacaaaatttcatcatttatgtcagtttaaccagatgctcaattgtgtgccatctgttctcccgctatttatctatattttgctataatttcatacatattttgccaaaacctgtcagacatctttccgaacagtttctgagcagtttttgagcagttccgatcctttttgagcatgcttccgacgctgccgcgtgctcacgaaaggctttgcagcctgccatccacaatttccactatccgtccggcattctgtgccacggaaagatcatgcgtgatcatgacaatcgtattgcccatctcatgcagccggtgaaacagtctgagcacctctttcccgctcgcctgatcgagcgcaccggtaggctcatctgcaagcagcagcgccggattcccgacaagcgccctcgcaatcgccacgcgctgctgctgtccgccggagagctcgcgcggcctgtgatgactccggatctttgtcagctcctgctcataggtgatttccaccagctgtgtccctcgtcttcttatttattagttttcctgcgcgatccgccgtgccacatacacgccgctcgcggatgcatgggacagagagtgggtcacgccgcttccgtcaccgataatatagagtcccttgtacgggctctccagatgctcatcaatgtccacttccatattgtagaattttacttccacgccgtagagcagcgtgtcatcatttgccgtacccggagcgatcttatcaagcgcatagatcatctcgataattccgtccagaattcgctttggcagcaccagactcaggtcacccggtgtcgctgcgagtgtcgggcgtaccatgccctctgcgattcgcttcgcattacttcttctgccgcggaccagatcgccgaaccgctgtacaatgacaccgccgccaagcatgttcgaaaggcgcgcgatgctctcaccgtatccgttgctgtccttaaacggctctgagaaatgctttgccacgagcagtgcaaagttcgtattctctgtctgcttatcggagccttca

SEQ ID NO: 2125 - DNA, 12765 bp, Unknown
  16S sequences of unknown bacteria
gcgcctgagccgggacgacgagttacagggcgagagcaattccatatccaaccaagagttaatatgtaaagggttgtttctgccacctaatacatatgactgcggctcatttgtggtgaattgaaaagcagttgtaagaaaggagtcaaaaagccttataaccgctggaaatcaacacaaaaggagctgaattttatgaaaactatctttgaagaaatgggcggtacataccgtcaagtgggatattatttcattcccaacattactttgccggatgacggcgaatatcagataggcaaatacgggcgtatgcgccgcagctatctgaaaaagtaccgtaaaatactctacaacaactatgtgctggagggaacgctgttcaagcatttagctgaaatcgatcaagtctgcaacgagcgcattgaaaacatcgtttcagctatggcaaagcaggaaggcgtaactgaagcgttcaaagcggctgatcaaatagaatgggtgcgccgtatgaacagtatccgtaaccgtgcggaagaaatcgttctgcacgaattggtatatgatctgtaaacctgatacaaaagccccacacttctgacaataaaatcggaagcgtggggtttcctgatttattttgtttgtttgctgttttcttcgatatttgccacaagacggtcgaaatcactctgatatgttctgtcctgcaaaacacggaatttttcaaattcactttctgcaaacgcctttgcgatggcagcggtcaccttgcctttgtcatgtaaaatatcttcttcgttgaactggaggaacgcatccaaacgattaacccaatcctgcatatacatgatatttcctcgccgtgcctgtctttcggcatagtccagatacattgtcacgatctcattcagatttatcatttcttcttcgttcaagtagtttttggcgattgaaacatcagacttgcgaatacgcccctgcggagcatttttccaagttgtcaagcccatgtttggtttcgtgctatcggctcgtccataaacaatctcagccgccgtatgatgagtgacagcgtaatgaagcttattctgtactgtggcaaaaaactcttttgtaacaggactgttcacatcatagtcagcactgcactgggagtaaatgtccgtgattttttgataaaaacggcgctcgctggagcgaatatcacgaatacgctccaactgttcctcaaaatagtccttaccaaagaggttttctggttctctcagtcgtgcatcgtccatcacatagcctttaataataaattcttttaatactcgatttgcccaaatgcggaacatcgtagcctttttagaattaacacggtatccgacagcaataatggcatccagattgtaatagcttgtattgtaccgcttgccgtctgccgcagttgtttccattttggaaacaactgcttcttcctgcaattcgccggatgcaaaaatatttttcaaatgttttgaaatagccgccttttgcacttcaaataattctgccatctttgcctgcgtcagccacaagttttcctgatataaaaggatttcaacccgaacttcaccattatcagttttataaaacaggatttcccttgtttcataaggagttagcccatattcttcgttcatatccattccattcccttcctattcttcacttttgtttctcgctctgcttttgtaaacattatgcttgttcttgcactgcgggctgcaaaatacagcacttggtctgcttgcgacaaaagctttggtacaatgcctgcaaagcttaatcgggttttcgctgtcggtcagcataaagctgaacatcatctgaactccaagcatgagagagtgaaaatcccaaataatcgtcggcttatccaaaagggctatatgataagttggagcgatgccgccaaatgccgccatgctctgctgcatcatctgccgggtttcatcgttcagtgtatcataatcctcataataaaggaaactgttgatataggtaaacgcccagtcgatgaactgctgttttatccattcatatcgctccgcatattcccgctgaaagctcatgttgaccgccatcggcttatctgtcatggtcaaagccagtgccatcataacacggtcattttggatgttccacatggactcgataccacgcttgatcacatccaatttgtcaaatggaaagaacagtgccagatatttttccgtggacatagtttcttttttgataaagtggtttttcggcagatacaccgcctcatattccataaagtttggtgtggtaggtaacgcagtcatcagtccaaacaagccgtatttcaccgcaaattgctggatagccttctgaatttcggcatccggctttttgctcatacccatgcgtcctatgttgatggcatccaatacaattttctgatactctgccagcggatcataaatactcggttgcgccgttttggtgggcgtgagatacagagttccgtcctctgccgccttccattcatattcactataccgcacccaattagaactggtgcgttcaaaaaggttcttcattttctcacccctgtttccaatcactgataccatatttggataaaagctcttttgcctgttccataccgctttccgtaatatataccgatttggaacgggacggatgatttccctgccggatatagtctgcatcgtccaattcgttcagtatatcaaaatcgtagcctttccatgcataaaaatcggttgcttcgtgaaacttttctctctgtgtaaagcgggagaggtataacagcatcagtgttaattccctcattgcttcttctgcttttatatttcccatatcagtctattcctcacttcatattgtaacctgaataactctgttttatattatcgattatacgatttctattcccctgaatcaatctccattctggattcttctaaaaaatctttctccaataaggtcattggctgttgcttttctaccttatccaaaagtgcaggaagcagcttttttcgtatctttttgagcatcgtgccacgcaccttgcggatgttccggtcgctttgattccgtattttagcgatccttattgagctaaacaaccggacagcacagagaaagagcagctctttgtgttcctcagtcaattcccagagaattttggataggtattcttccgttacaagttcatgtatatcgtaaggacagtagaaaattgcgtcaatgaaatcaccttttcgtatctgcttttccagcacatcatttagcgtatccggaaaaaagagttcattggcagatgccccgtaatcaagaggaacatcatcgccgcttctgctgagttcatgatagcgttccctacgctcccgattagcgtccagcctgtcccaccatgcaatcacattttcaaactcccgctgtgttctggcggaatcctccaatcgtgcaagggcttctgcccgcagttctcgtttgagcttcttacgctccagttcttcctcgtcagtaccatcctcaaagggatgttcctcggcgtcggcttccagttcttcgatgagctgtttttcttttgtaatctgccgtctgacctgttcggataattcggtttcttcggtatctgtatcattgtcagcaagaacaacttggttcttccgcttccttcgcttcttttcgggaagatcgtcagcgggttcttcttcctcatcgtcccaaagggcgttttcattttcttcgtcatcgactatgtaatcggaatcgtccgcttcatattcatcttcatagtcagtatcttcttcataaaaaccgtcatgttcatatcgttcgggatcgtcaaacaccgcagacacctcccttcaaaaatatttttgaaatttttttggattctccataaaaacagttccgctaagtaccctgtatttctcctataagtgaggatgtaacctattttgcctgttattagattactttcgacactgaatgaaaggaggaaaccgcctatgtcaaacaattatcgtgagctgacgggcagggagaagcagcggatcaagaagctggttacttctctctgtgccaactacgacaaagagtacggctgcctgccattggattgtgactgtccaatgttgggtatctgctttaccaacagcgcactatgcagatatttccgcaagtctgtcctgccggaagatgcaggattggaagccgtattcacgcaaatatcgaccactcattgtaaacaatgcggcaagccgttcccaactgacggaaaacgggtgtactgctcacagcgctgtgccgaagaagctcgccgtaagcagacagcagcaagggtgcgtaagtatcgggagaaacaacaacagatgtaacgcttttgccctcggaaagccttgtgccgcaaggcttttttgagggcatttctgtattggcagggtgtgaataccttttgctcgattttaaccatgcaaatggttacaccgtgccggaactaaacctattatacgaaaaaacaatgaacatttcaacacggaggtaactgcctatggcaaaaaacgagaacagtaatttttcttatatgactcgccgcattggcggcaccacctataaagttaaagtagtattcagtgatacagagaaggaaacgatggaggataaaattttacggatgattcgcaatgaaacggttacaactggcggaacttgtggtataatagattcaccacaaatgagccgacagtctgaaaggagcgcatcatgagcgtaaaacagactgaaggaaaaatcacagctttatatgaaaggctgtcccgtgatgatgaccagactggtgatagcaacagtattgtcaatcagaaaaaataccttgaaagctatgcccatcagaaaggttatacgaactgtcagcactataccgatgacggttggagtggaggaaattttgagcgtcccgcttggaaacagcttattgcagacatcgaagcgggcaaagttgctcatgtcattgtaaaagatatgagcagggcggggcgtgattatctgcaaacaggcttttacacggaggtattcttccgtcagcatcatgttcactttgtggcgattgccaacagcgtggacagcgacgatcagaacagcaatgagtttgccccgttcctcaacattatgaacgagtggtatcttcgtgatttgagccgcaagcagaaaacagcgatccgtgtgaaaggcgaatccggcaagcctaccaccaactgtgccatttatggctacaagaaaatgccgggtgataagtacagttggtatatcgatgaggaagccgctgcggttgtccgccgcattttccggctgaccatcgagggaaacggtccttatgacatcgcccgtatcctctatgacgataaggtggaaactcctgcggtctacgccgcaaagcaggggcgtggcgtctggaaaagtaaagaggaatttcccaacccttataactggagtggttatatcgttgggcagattctctccaagcccgaatatatggggcatacggtcaatttccgttctcacaagcagtcctacaaggacaaaaatccggttatgaatccgcaggaggactggctaatttttgagaacacccacgaagcgattgtagataaggaaatgtgggagcttgcacagaaactgcgaaagacaccgagacgccacgatacgcttggcgaagccaatccgctgactggacttttgttctgtgctgactgcggagcgaaaatgaccaatcaccgttccaaaggcggtacgaagagcaatccctatccctctgatttttatgattgctccgcctacacattggcacatcaaaagcgcactcatgcttgcagcggtcactatattcggacaaaagcggtcagagagcttgttttggaaaccatccgaacagccagcgcctttgccatcgccaatcaggatgagtttatgaaaaaggtgcgttctgcttctcaaatcagacaggcggaagtcgcaaaggataccaaacgcaagttgaacaaagaccgtaggcgtattgccgagcttgataccattatcaaaaagctctacgaatcttttgccattgggcgcattaccgatgagcgctttgatactctgcttgcagaatacgaagcggagcagaaagctcttgtcacatctgtatcggatgcagaatcgcatctgtcctcttttgaggaagatactgaccgtgcggagcagttcctttcactggcaaagaagtacaccgacttttccgaactgactactccaatgatcaatgagtttattgaaaaaatcattgtccacgccccggaaaagattgacggggatcgggtgcaggaggttgagatttatctgaaatttatcggacggtttgaactgcccgaaccggatctgacaccggaggagatcaagcggcaggaacagcttcgcagacaccgcatcaagagccgggaacgctaccaaaaaatcaaggctggtgagcacgcagttggtcagccatttcagctaatctgtaaatgctgtggtgaagaatttgaatccaagcggtcaaatactctgttttgcagtccgaagtgccgtactaaattttaccgtcaggaagcagcggaaaaccgaaagcgggaatgtgtctgcgagaactgcggaaaaacttttaccgctacacggagagatgtaaaatactgttgtgatgattgcaggacggaagcaaaccgcaggatgcagaaagaacgcaatgttgcgaagcaaataaaaaagaacgaaccagtattgcttgatgccccgcctattaaagaaaacgggcaaaaacagaaaacagcataataaatgacgctgaaggcgacttgtgagaataaaatctcatgagccgccttctttgcgttttcagccggatacggcagaaaggaataaaacctatgacagaaaatgaaaagaagcttttacaggcgaagcacagattggaagaagccgagatgcgtgaccgacagaaagagcgaaaagcacggacacggcggctggttcaggaaggtgcgattttagagaaagcattaccgcagacaacacagatgactttggaacagttggaggattttttatgcgaagtattcaaaccaatccgatgatttttatgagcgaccggctatcggtcgctttttctttttcccgaagggcgcacttactcaccacctgcaaagcaggcggtggtatccctcccgttggtcgggctcgtgcgctcttcacgaactgtctttcagacagttctccagagggggcaggcaatgtcgcaagcgaacattccctgtgcagtcggctctatatttgctctatcagcaaaacgatgaggtggcatattgccaccccatctcgccgcctgcctgcgaaaacctgccactggcagcttttacgcagttatgggtatcgcattctcggcgacacccattttctcttttcaaaagagaaacagaaagaaaggacggtgaagccaaatggcaatctatcatctggaagcaaaaatagtcagccgtggtgcagggcgaagtgcagtcgctgcggcagcgtatttaagttgttctaaaatactgaatgactatgacgggattcagcacgattacacccgtaaaaaaggtcttgcctggcaggaggtgttcctaccagagtttgccccatcagaatggaaagaacggagcgtgctttggaacgccgtggaagaaaatgaaaagacaaaagacagccgccttgcccgtgaatttgtggtcgctttgccgattgagctgaacgaaacacagtgggaaaagctgctgtctgattttatttctggaacctttgtagatgatggtatgtgtgcggatgtggcaattcatgatccatatcctcccggtcacaatccccatgctcatatcatgctgacagtgcgcccgttagatgaaaaaggaaactggaaatataagacacagaaggaatatctctgtgtgaaaaatggagaggaacaaggatttactgcggatgagtttaagacggcacagacagagggatgggaaaagcaataccagtataaggtaggaaagaaaaaggtttatatgactgcttctgctgctgaagaaaaaggctatgaacgggtatcgaaatatcccaaaagcacgaaatacggcagacaaaatcctattgctgagcgttggaacagcgaagaacaacttgttttatggagagcagcgtgggcggatgtaacgaaccgccatttggagcgtgctggacacaaagaacgcattgaccaccgcagccatgcagatcgaggcttgagcgaacagcccaccattcacgagggtgtggttgcaagagcattggagaaaaagggaattgtttctgaccgctgtgagttaaatcgtcagattaaggcagacaatgcgttgctccgtgagctgaaagcaacggtcaagaagttgattcaggtagttaaagcatctgttcctgctcttgcagaagcaatggagtccttacgggcgaacatggttattttttgctatcagattcgctatgccggttttggaaagcacaaattatcggaaagcctgaatgtgctgaagcccgacttagagcgatattccgtactggtacagcagattaaaaatacgaccaaagaacggaaaacgctgcttacagaaaagaaagcgacaccattttatcagtttgttgctcataatgatttggcaaaacagattgccgaactgacggaagatttagaagaactgagatccgaaaagacgatgctcctcagttcatttgattgtagtgaggatactggaattgctgaggttaaaaagagtgtttcggctatggaggaaaatttgaaacggctgacaaagcaggaagaaaaatatgctgctgagttggaggaggccttaaagcagttctcagaattaaaggagcaggcaaaaaatgtggattcggcagaactctcagaacagcggatcgtcttacagggagagaagattcaatctgccacttccaagatcaaagcggcatatggagaaaaatttgatccgcttatcctgtttgacagcaagcgtgatgtttctgaattattgggggaaaaaacagaagcacgctctattcaagaacacctgaagcaaaaacagcagccagaaaagcagcagaaaaaagccaaatacaaagagcaggagcggtaaaacactgcttcaataataagagaaaacctttgtacaattctttttatgctttattttggcaggaagttgcattataatatacgcaaatggaaaataccaaaacaaggaggaacaggatatgggaattctaatctcagtaattaccattactctgctggtgctctgctatgtcaggatgtataaccgtctgaagcggctattcgtcaaggtgcaggaagggagtgcaggcatagatgttgctttggaaaaacgctacgatatgctgtcagaagaaattgaggcagtaaaaaagtatctgacgcatgagtatcagatctacaccgaagtcacatctacccgcgcggggaaagaactgaacgaaagcgtatttcaggaagagaaacaactgtctgaggaagcggtcaaagcgatcagcgagacgattgccgaacagcaaaagcagatggaaacaatctggcggcagttggaacagcagcgagggcaggatcattcttttggagcggaaacgccggggatgggggacgacgggctgatcggacatcaggtaagtctggatcggaaactcggcttgcttacttccgtccagcagggactcaccggggtcaactctgccatcaatgcactggctgagcaatacccaaccctttattcctatgcgtccatgcagcatttccagcaggatatttttgatgcagaggaacacttacaagcggcgagacggttgtacaactctaacgcatctttgtataaccagagaattaacacatttccctacctgcttttagcaaaacttcatggcatgaaagaagcgaagttctacactgtggaagaaaagaaaaaagactttaagctgcagttttaagaagaaaggggaaaagatgtatgaaaatggtggaacagaatatcagcggtgtcaagctggaacggttgcggcagaacgctgttaaaaaacataaaatcctgcggaaactgtttccggtatgcttgattttgtttataggattgacattggtaaaaaaccgatttttgtttgcctccatcagcgaatatggctttggagacccagcaactcagggggccttttggatgctggtaggaaacctgatgctcagcgtgatttttgcgggtgtcatttttggtttttactatatgctggtctataaaaaagcttatgacctcttttgtatcaatttcaaaaacaaatatgtgttggacactctccgacaactgccggatttttccgaattgcgctacaatgccggaggcggtctttcttatgaggaaatgaaccgtttaaagttaatccccggaggtcagtcggtcttttatcaatcgtcggatgaactgtccggcaagctggatggagttcccttccgggctgtcaatgtctgcactggcgaaaaagcttccgcaagaagctctacccccaaaattctgtttgagggacaggtcattgttttttcctgttttgataatcggaagatcagtgagggctttgtccaggtgttttccaaaaaagctctgtctaaactcagggaaaccagagtcccgctgccaattcagacagaaaacagtgtattcaacgaaaattttgcagtgtttgcagagaacgagcagaatgctttttacatcctgacaccccaggtgatggagcagattacagcttttcaggaagctatggaaggaaatgtttatctttccttttctgaaaaatccctgtatgtaacttgcagccagcttcgcaatccttttcatatttacatcgacatccctgttgaagaacagcgtcaaaagattgctggcgatacggcgattctccgcagtgcaaaggaaattctcatcagagccggacaaagcagtccgaaataagaaggcagtccctgaaaggaggaggatatcatatgggatgcatgattgtgttcgttatcctgcttgttattggaataggcatcctctgttttctgacaggggatatgacggcttttatcgccctggccgctactttagtcatagggcttggtcttgccggtattctgtatcatatctataaatcgaagcaaagacggatggagaagtataatcccctatcccctacattgcgctggatgaatgccgcagggtcgatcctgattgcagcaagtcaacatacaaattttcatctactggctggctggcggtacaataacgaatttgaccgggaaagtattaaaacaatgctgtgggattattggggcattcaaggacatgagacagctataaaggaaatgcgcagcctgatcgacgagggaatgcgtgccagctatcggaggaaaatggaactcttgtcgcataaatataaggatgctacagaagtccagctcattgaggaggcccgcaaaactaatccaaaagccgatgaagatagctacctgccgaaaatgctgacagcatggcggcgttatggggaaaatgccctgttaggctgggatatgggacgctgcgcatatatcacgcaatgttgctatctggcaggctacatcaatatgaaggaaatgttggatttgtgtgtagatgctgggacaaaggcgcaggctttttttcagaactgggaagaaatgatggagagctatcttctgggcggacaattttggaagcatgaggatcaaagcaatccaaactccatgacggcagaacgctggaagttatatgaacagctctggcaaggaagaaaacccttccagagctctccatacctcgctgtcccgttcgaccagcccctctccaaagaggttattaccaatgaatacggtattctgccggaataccaaaaatattataatcatggatagttcgtattcagttttggacatgggaaaggcgcggcttgctggccgcgctttggtggatggtgtttggttttccgtttctggctgaccaaagtgtccagaggttggaacggtgtaccatcagtcatttttttcctcccatccgccaaaacgccatttaaaattatcgggagaaatgaatgcgctgccacgacatatgtagtcatcgtctccatttatgtactgataactcttttgctctactttgtcgtaagtttcgctggaaagataatcgatatttgcacagacaaaatacctgcgctcttgaagcgcctctgtccatttctgcatatcctcgtccctttgattggcgtcttttgttgtataaacacaaacttgaacaagcgggtattcttctgatgtgcccagtagttccagcgcggatgtatctttcccataattcgatggacaatcgccatagctaataacaaataatttgcacttaccaaagataggttctgctatggggattaagatactttctaattcttgctttctcaaataaacgatgtaatcgtctttgtagtttttttcttcttcataccattccacatttacataaaaatctgaaaatcgtgtagattgaatacttccgtactctgtcgccacaaattcatcaccatatttctcaacgaggtattccagctttgggtctgtgcgggaatggtacatat

SEQ ID NO: 2126 - DNA, 8799 bp, Unknown
  16S sequences of unknown bacteria
aggcaggcaggataggataagtctgtccttttttggcgtttccggcagtatggagccgccgtataggggccgcaatgggcctctgcacggcggctttttgtgtgcaaaaaagggaacggctgaaggaggcagaatatgaaaaggaaattgatttgggcggcgttggtcgccgcgttgattatgctgctgggcgcggcggcgctggcggaggacgtttgcccgtattgcgggggtaaattgaccgtggggccgtgggaacctttcgggacagaatctcatagtcgagccatgctttgcgaagactgcggcggagaatgcaatcgagaataccaagcccattggggcggcacagcgacctgcatgagaggccgcatatgcgaggtgtgcggagcaacgtacggcatacccgacccatacgcccatgattacgagtggcaatcgaacggcgacgggacgcacaacgtaagctgttccaatccaggctgtacctatgctgagacgaacgtcgcgtgtttcggcggttcggcgacctgcacgcagcgggcggtgtgctctgcctgcggcggggaatacggcgatctggcggcgcacaactatgcaaatagctataagagcgccggagacggcacctattaccgcgcctgccagaacgccggttgcatggcgagggatggcggttactatctataccgcatcatccacagcggcggcgatggcggcggactctggtcctcgcaaaagtacagcaaggaagatacgtgtacactgtccatcttaagcaatgtaccgacctacgcgggccacaccttcctctattggcaggatgatgccggaaagcagtataccaagggggacagcatcacgctgaccagcgccagcacggatatttgggtgcgtgccgtgtatgaaaagatcgagacggagtgcgacaagtacggccatcttttcacctacaccccctatttccagcagcacaaggcgacttgcgaccgctgcggatatgagaccacggaaagccatgttctcaacgcggagcagacgcagtgcacaaaatgcggagcgtacaggtacagtctggtctttatctccggctttggcaatccccaatggggaagctcgacgtattccgcgaaagaaagctgtgacatcagtatcactacttccgtaccgatctgctccggcggcacgttcgaccattggacggatggaagcggtcagtacagagccggcgatgagtataccctgacggcaggaaatcccacggcgacgctttacgccgtattcagccatgagggcgcctgctccggcgacgccaacgcaaactgcacagagtacggcacgtgccagtattgccgcaagccgtatctcgatccggacaatcacagctttacggacaaggcttccgacgaattggccagtgatgccacctgcaccgaggccgcgaagtattacgtgcaatgcgaccgctgcggcgtggtgagcaagacagagacggttgccgtgggcgatccgctgaaccacagctttacggacaaggcttccgacaagctggccagcgcggccacctgcaccgaggccgcgaagtattatgtacagtgcgaccgctgctacgaggtgagcgatacggtcacggttgccgtgggcgatccgctgaaccacagctttacgaacaaggcttccgacgaactggccagcgtcgccacctgcaccgaggccgcgaagtattatgtacagtgcgaccgctgcgacgaagtgagcgatacggtcacggttgccgtgggcgaagccaagggccacgtcgaggtggcggttcccggcattgcgcccacctgcaccagcaccggcctgacagcgggcaagcgttgcgccgtatgcggcgaaatccttgtgaagcaaacgggactggctatgacggggcacgcttataaggcttccaccatcgcgcccacctgcacggagggcggctacacgaaatacacctgcgcgaattgcggggccggttataccacggatgaaacgaacgcgcgcggccactattacggggaatggacgcccagcgacggcgcgcacagcgccctttgccagcgcacgggctgcgaacacactcgtacagtggcgtgcgaatccttcgcctggcggctgttcgcgggagaggcggcgtatgatttcgccttctgccccgtgtgcggagaagtaaacgacggcacgcatctttcctgggtggaagaagccggggccgaagcgctgacgaaaaacctgccccggggcgaaatcgtgctgcgcgtgggcgcgctcgccaatggcgaggccgtcatgagcgtgggctttgagtacagcggcgaactgacccagcccgcgggcgaagtgaaagtcaccctccccgccgcgctgctggaagggtatacgctaacgctgctggaggcggacggttcggaaagcgagctccccttcgcggtcgaggacgaagaaatttccttcacgctggactttacgccggtggaggatgaggaacccgtccccgtccgtgtgatccgcctgattcctgtcgccggataatgcacgacttgccaggcggcgaaaccgcaaaacgcgcggtttcgccgcttattttttgccctttattggcgattgcggcggcaaatcatccgcaaaacaagccgaaaaccctctatcaaggttttcagcccttcaaatatggtataccacaaaatctcaatttatgccagcgaccgcggcacgcaaatgcgcgatttcttctgcccgttcctcaaaaggcgtgggcgtttctagaatcagcggcaacccggccacgcgctcttctcgcgcgatggccacaaacgcgtcccagccgatttgaccctcccccagccgcgcatgccgatccttgcggctgccaaggggattcatgctgtcgttgatatgaatggccttgagcctggcaaggccgatttcccgctcaaacgcgtccaacacagcgccgaaatcgcgcacgtcgtaccccgcgtcaaacacgtggcaggtatccagacacacgccaatgcgcacggaagatcccacccggtccatcacatagcgcagttgggcaaaatcgccgcacagctcgctccccttccccgccatggtctccaggagaatcgtggtttcgcatccttccggcacatttgcacgcaaaaattccaccaaccgatcgagtcccgcctcaatcccctgccccacatggcagccgggatgcaggttgtacatggcctgtgggaaagcctgcagtttttgtaagtcatcgcgaaacgcgtattgcgcgaattcctgggcgcgcgcatggattgcgcaagggttgagtgtatagggcgcgtgcgccacgaccacttcaatgtttcccgcgcgcattttttgcaaggcttgccgcatatccgcttcgtcgtatgcgcgaaccgctccgccgcgcggattgcgcgtgaaatactgaaaggtatccgccccgatggatagcgcccgttccaccattgcggtgtatccgcccgcggcgggaatatgacagccgattttcacgcccatattttgattttcctccactcgacgcattctcatatcaataatacccagaaattgtgcgcttgacaagtggcggtgcttcgtcgtataattttacaaaaatacaggaggcgcattcccatgcagcaatttcaaatgctgtttcccggcggcaaggccaaggcgcttacgctgagctatgacgacggcgtggaacaggatcttcacttgatcgaactgatgaagcaacacggcgtaaagggcacattcaacttgaactcctcgctttttgcgccggaaggcacggtctatcccgcgggtcaaatccaccgccgcatgtcgcgcgcgcagtgcagagaggcctatgacaacgaatattgcgaagtggcgttgcatggcgcgacgcattccttcctgcaagcgcagcccaccgccctggccatgcacgaaattatcaccgaccgcaggcagatggaagaaatgtatggccgcacgattcgcggaatggcgtatccatatggtacatattccgattctgtggtcgatatcctgcgccttgcgggcgtcgcctattgccgcacgacgcaatcgcacctgaatttccgcttgccagaggattacctgcgctggggcgcgacctgccaccacaaaaatgccgcgctgatggatctgtgcgacgctttcctcggagatgtgccgcgcaacgaatacccgcgtctgttctatttgtggggacattcctatgaatttgaagccgatggcaactggcaggtgatggaacaattcctgcaaaaaatgggcggacgcgaggaaatctggtatgccaccaacatcgagatctacgacgcgcaccaggcgttcaaccgcctgatcttctcttccaatgggaaactcgtgaccaatccttcgtattacccagtgtgggcgcgttgcgacggcgaaaccattcagatccccggcggagcgactgtgcggctgtaaagcggctgcatgcacaaaaaagtacaaaagaaaaaatgaggagacgaaaacatatggcaaagctaacgggtcttgcgcacatcggcgtatgcgtttcaaacatggatcgttcggtggctttttatcaggacgtgctcggcctcgcgctggaaaagcgcttcaccatggccaatggctcagaactcgcttttttgcgcgtgggcgattgcaccattgaactgatttgccgcccaggcggcaatgtacccagcgcgccgggccaggtagatcacatctgcttcgacgtatgcgatattgaacctttggtcgagcgcctgcgcgcgcaaggcgtatctttcctatccgaatctgtgtccaccatgcagggtggacttgcgggcatcaaaaacattttcctcaccggcccggatggcgaacgcatcgaatttttcgaccagtccggcgctaaggcttagttgcacatcggtagatgggcgctgtgttcctgcgcagcgcccccatttttgagggaggaagcgccatggtactccatatgatcggcaacgcgcatctcgatcctgcttggttttggcaatggacagagggataccacgaagccaaagcgaccttccgttccgcgttggatcggatgaacgaatatccggattttgttttcacctgttctgccgccgcgtactatgaatggatcgagcaggatgaaccagaaatgttcgcggagattcgccgccgcgtgcaggaaggccgctgggccattgtgggcggctggtggatccagccggattgcaacgcgccctgcggggaatcctttgcccggcaagggctcattgcgcagcgctatttccagagccggtttggcatgcgcgcgcacaccgcctacaatgtggatagcttcggccacaacggtatgctgccgcagatttttcgcctgagcgggatggagaattacgttttcatgcgccccatgaagcacgaaaagtctctgcccgccaacattttcctttgggaatcggcggatgggagccgcgttaaagccttccgcattcccatcgcctattgcacttgggaaccggagttgcgcgagcgcatggaggaatgcctgcgcgagatgccgccggaagcgcctgccgccatgggtttctatggcgtgggcaaccatggaggcggccccacaaaggaaaatatcgaatccatcttgcgctggaaagacgaaatgcagatggaattttcctctcccgaccgtttcttcgccaatgtatccgcggaggggctgcccgtggtgcgcggagaattgtttcaccacgccagcgggtgctatagtgtgcactctggcgtgaaaaagtggaaccgtcaggcggagaacgcgctgctggcagcggaaaaatggtgcgccatcgccgcaaaggtacttggccgcgcgtatcctgcggacgacttgcgccgcgcctggaagtgtgtgctgttcaaccagttccacgacatcctatccggcacctgcgcgccggaagcgtatgaagacgcgcgcaaccaatatggcgaggcgctttccctcgcccagcgcgcagccaactcggccatgcaggcgcttgcgtggcgcattcgcattccgcaggaagagcgcgcgcgccccattgtcgtattcaatccgcacgcctttgtcgccaagcttgccgtagaattgcaatcggccgacgcgcctggctgcgcgctgtttgatagcgagggacgagaaattccctggcagcgagcacagggcagcgccgcttcgaacggccgcattgcggcgctttttgaagcggaagttcccgcgctcggctatcggctgttcaccctgcggccttcccaggcagaagcgcatgcgcaggttccttcccaatctcttgtgttggaaaacgagtgtctgcgggcggaattttcgccggaaagcggtctgcttacaagtctgtacgataaacgaagcggtgaagcgctttccgccccttccctctgtcccgtggccatttgcgataccagcgatacctggtcgcacgccgtcacgcggttcgtcgaggaactgggccgcttccggttaatcagaattgcgcgcacggaggatgggccggttcgctcttccatccgcgcggaatttgcctggcgcaattctaccattgtgatgacccattcgctgtggcgcacagcggatcaactcagcgtgctgtgcgaagtgaattggcaagaacacgaaaccatgctcaaatgggaaatgcactgcgcgggcgacaccagcggtagcacggccgaaattccctttggctttgcgaagcggccaagcgatggagtggaatatcccatgcaaagctgggtgcggctgggcaatctgaccgtgatcaacgatgggaaatttgcttacgacgcgctggattcccgcctgcgcatcacgcttttgcgctcgccgcgctatgcgcaccacacgcctaaggtctgcacgccggaagagcactatccgtttatcgaccagggatggcaaaccatgcgttttgccctgtgccccgccgcgctttcccctatggaagcttcccggcgcggcatgctgctgaaccagccatattttgcgctgcatgaaacgttccatccagaaggcgcgcttcccaccagcgccagctttgccgaaacatccggcgcgctccttaccgcgctcaagtgcgcggaagacggtagcggagagcgaatcgttcatttatacgaggcaaatggggaaagcgccatcgccagcggcaatattctggggcatccattccggctttctctcgcgccccacgagattgccgccttacggttttctgaaagtggcgcttgccagcgcgtcgatttgctggaagaatcgctggaatgatctcagctggcagaaaatcgggcggttttcccgcgtaaagtgagacgtttggacaaaaattggcccgctggagcggcaaagcttctccagcggaccgtacgttatccacgctcttccatttcccgaaaacgcgcataataccgcaggccaaattcgcgcaacgcttttgcgcaaaagtgcaaattgtccggattgggcaaaaggccatccgccggcacgaaaccaatggcagcgttatgcgccgccaagtcctgcagggcctgattgacgaacacataattttttaaattgggatcttcagttctgtctgcaaggaaatcccccaagccgcccagcaggataggtgcttctggcaggcataaatccctccggaagccttgcaaaatcagggtgagccgctcttcatacagcggatagcgctccggcgtgcaatccccctcaccctggtgccaaaggatacctctcaacaaagacgtgcgctgcgcaagccgagcctgcattacggcatggtcgtacagtagcccgccaatttgccaatcttccaaacaagttccgccgtcagcacaagggatcaagcccacatccacttgtttttccttggcgtatgcgtccgcaaagctttccgccaacgatatcccagaaaatgatctgtcattattgacagggacatacatgggcagccatcttccgttgcgcagcaccttaatgtgcctattctggatcggctctacttcgctcgcaataccgcgccccgccatattggattggccgaccatgagaaacgcgtggatcatgaaatcctctcctcttcaagctactgcgcgcctgtgctgccaaagccgccgcggtttgcaccgtctaggtgatcgacttccacaaagcgcacgggttccatcttttgtacaatccgaaattggcaaatgcggtctcctttttcgagcaccgtatcgcgcatggccaaagccggaaagccccatacgtcgccatccccacaatacgcgttgtcgatcacgcccatatggttggtttgcaaaatcccccagcgcttaaatgtagagctgcgcggcacgacgtgcgcttcgtagccttctggtagcttcatagaaattcccagagagatgatgcggaactctcctgccttcatctccacgcgctctgccgcgcgcaaatcaatccaatcgccgccttccaccgcgcacaggcgcggtaggtcagcgtcgtgatagcgaatctgtatctccatcgtcatttcctctttgcaaaactggcgctccgcaggagcgccagtgcagcttgtcaaaaagtctttttgacaagctgatagacgagggagtaaactccccccaccactgccatccctaccagtttccgctaaaatcctacggattttcgggcgcggaaactgcaaggaagcgattttt

SEQ ID NO: 2127 - DNA, 20225 bp, Unknown
  16S sequences of unknown bacteria
tttgcacaaacgaaatgttttgaaagaaaaactccgcgagtccgtttcatccgtacttccgataactctgatagttgcggcgctgtgttttatattgattccgatagaaagcggacttatgctatcgtttctcgtcggcgccgttatgataataggcggaatggctctttttaccatcggttcggacgtctccatgacgcagataggttcacatatcggcggcgcaatgacccgttcacgtcggctgtggctgatacttgccgtaagttttgttatcggcgttataataaccgttgcagaacccgatttgcaggtgcttgcgaagaatgttccgagcatagacaaaaacattctgataatcaccgttgcggcgggagtgggattttttctcgttgtcagtatgctccgaatacttttcggcttttctcttaaatggctttttatagtattctatattgcactatttgctcttgcggcatttgccgacaaagaatttctttcggttgcgtttgattcgggcggggtcacgacaggacccatgacggttcctttcataatggctctcggtgtcggcgtcgctgccacaagaagcgataaaaaggcaaaagacgacagtttcggtctggtcgcgctttgctcgataggtccaattctgtccgtcctgattctcagttttatttacagcggcggagcggaagaatccacactcgcggtcaattctttttcgcatacggtagctcttggttgggagtatctgcgagaacttcccgcatatatgggcgaagtctctctggctcttcttccgatagtagctttctttctgatttttcaggtcgtttccctgcatataaagaaaaaaccttttataaatatcttgataggcattgtctttacttatgtcgggcttgtcctgtttatgaccggcgtcaatgtcggctttcaatcgcttgggtatgtactcggcgcggagattgtaaattccgggtttaagtatctgcttgtcccgcttgcgatacttatgggctggttcatcatcaacgcagagcctgcggttcatgttttgaacaaacaggtcgaggaattgagcgcgggtgcaatatccgcaaaagcgatgggacttagtttgtccgttgccgtctctgcggcaatggggctttccatggttcgtgtattgacgggaatttccgtgatgtggtttcttattccgggatatgcgacggcgcttattctttcgtttttcgtgccgcagacttttacggcgatagcctttgactcgggcggcgtagcgtcaggaccgatgacggcaacatttatgctcccgtttgcaatgggtgcgtgttcggcgctcggcggcaatgtcatgacagacgcattcgggcttgtcgcccttgttgcaatgatgccgcttataaccgttcaggtgatgggcgcgatatccgttttcaagagccgcaggggaaaggtcgagtctttcgaacccgtttacgcagacgagggcgttatcgaactgtgggaggtcgcctgatatggaactttattgtgttataagcataacggacagaattgccgccgccgatattctccgaatttgtcacgatctcgacctttcgtttacgctgacaaatctcgggcgaggaaccgcgacaagcgaacatttgaatctgaatgatttggaaagcagcgaaaaaactgtggtcagcgcctttgcggacggcgaggacatgagaaaaatgttgcgtctcgcaaaaatccgactttttatggatattcccggcaacggaataatgatggcgattcccgtaaagagcgtaggcggaacaaaaacgctttcatttctgacaaacggaaaacaaccggaaggaggcattcccgaaatgaaatttgaaaacgaacttattgttgttattctcaacgagggatattccgataccgttatggacgcggcgcgtgccgcaggcgcaggagggggaactgttcttcacgcaaaagggacaggacacaaaaaggcggtaaaattcttcggagtctctcttgctgaggaaaaagatatgatttacatcgtctcacccgcttcaaggaaagcaaaaataatgaacgcgatagaaaaggcggcgggaacggagaccgacgcgggcgcattttgtttttctcttcccatatcggaggttgcgggacttcgaaaatttgacggagaaacggacggcgagtgattacccgaagatcggattgttttttgcgagcagttttccgtgttcgtgcagatattccgctttgatgtggcacggttccgcatattcgttcagttcgattataagtttttttgcttcgctcggaagcccctcgacttctatataagcataaaaataaccgtccgtttcgtatatctcgtttttgacaatgacttcggaaaacttggaaaaaactttcctgctgtcaagcaatgcgtcaaccgtttcaaacttcattatctgatacatatactcttttgcgtcgtttttcggtatctttgaaatgaagatggttatgcttcctgtaatacagttccgcgcttctataaggatccgtgaatttcgggaatcaaaacctatttctcttttggcttcgagaattattctttcgcaaaaacggcgggtgtttgcatcgtcgcagttcatagtctcgtatgttataccgtatttcaactggtcgtcggcatcgaccgtgaccttgattttcgattcgtttatctgctctatgtacattgcgtttacctccgtcatcgttcatattatcattatataaaaaattttgtttagtgacaatgaataaaaaaatgcacggttgacaattttgtgcatatatggtaaaatacagaataaatattatataatacagtacaattcgcagggggcgttgaatatatgaaaataacagttgtcggttgcggcagatggggctcgtgcatcgcatggtatcttgacagaaacggtcatgatgttaccgttttcggagaagaggacgcaccgacttatgtagggtttaaagaaaacagaacaaacggcgttgtgacttttcccgaaagcatacaccttacggcagaccttgacgatgcgctgaacggtgcggaaaccgtcgttatctctattccgtcacagaatctgcgtacttttatgcagaccgcaaaagcacacgatatcggaaacaagacgttcgttctttgtatgaaaggtatcgaggtcgagacgggaaaacttcttcatgaggtcgtggaagaatatctgccgaaaacttcttctcttgccgtgtgggtcggtcccggacacgtccaggaatttgttgcgggacatccgaactgtatggttatagacagttttgataaagacgtgaccgcaaaactcatttcagagttttcaagcgatttgatacgcttttattacggcacagatatgataggcacggagataggctccgcagtcaaaaacgttatcggcattgcggcgggtattcttgacgggcttaaccgttcttctcttaaaggtgcgcttatgtcccgcagcactttcgaggtcgcaaggcttatgaaagcaatgggtgcaaatccgttttcttcgttcggactttgtcacctcggcgattttgaggcaacagtcttttcggaatattcgcacaacaggcagtacggagaatcccttgttaccggttgtgaaacgttcggtctggcggaggggtattataccgttgccgcggttaagaaacttgcggaaaaatataatgtggatatgcctatatgcgaagccgtttacgacgttatctataacggcgccgatgtcaaagactccatttcaaaacttttctcacgcagtcaaaaagaagagtttattatctgaatctgaaaatgttacgccgtccgcaaaaagcggacggcgcggtatgaaatcttcttacggttacaaaaaatttgcaatttaccccttgcatttcaatgaaaactgtgatattatatataggctgaattgaaacggcaaaaccgaatatgcgcttgtagctcagctggatagagtgactggctacgaaccagtaggtcgggggttcgagtcccttcaagcgcgccataaacaaatatccctgcacgaaagtgcggggatatttgtttttggtatgaaatcaaggggactcgaaccctgagagggtaaaatgcgtaaagaaaacaattcggggaattgttttcagcattttgatccgagcattatatgcgaggaggtggcgacgcaaacgaagagaaacggcgtcgtcccttcaaacgcgccaaaacaaatatccctgcacgaaagtgcggggatatttgtttttggtatgaaatcaaggggactcgaaccctgagagggtaaaatgcgttttacgccgtctctcaaaaagtaaccgttatttcgcaaaaaaacgattgacaaagttatatgtatatagtaaaatgtttacagtagctatatacccctttgcatggttttatctcggaggcataatgaaaaagagttggaaaaaaatcgcggccgtttttttgcttgttgcggtcgcattgagttgttttgtattttccgcaaatgcacggtctgcggcaacgtacagtgaaacagatattgaaaatcaaaactatgaaacaaatgatacggcaaatttttcgctcgggaaaacggggcttctcgattctcttgcacaacttcgcgtaaaaacggacagactttcggaaacgtcggaaattcgttttattgcgcctatcgacagtctgaattacgaaagcgcgggttttgaacttacggtgaatgggctgtcacgaaccgtttatgtgaaatacgcatatccggaagtcgttttcggaaacggcagttttaaggcgtccgagatttgtgtcggttcaaagtattttatcacatacgctttgacggacattccgcagtcggaattttataccgagatttcggttcgttcttttgtttccgatactgacggaaactttgttttcggagaatcggtttcaaaaaaagtctccgattggtttgagaacggaatatctcttgtttccgcaccgaacagaaccgtttattacaaagacggcgaacttgatgtttcaggcgcaaagattgaggatatcgtttcgggagacatcatagatgttgaatcttcgatgatttcagacgcggatttttcgacggttggcgaaaaaacggttacggtcaattatctgggcatggagactcaatttaccgtatccgttatagagaaaacaaaagattttagcattaacggcacattcaattcgcatatggtgcttcaacgcaatgcgaataccccgattttcgggctcggttccgacggagatattgtaactgtatcgttcggagaacaaacaaaacagggaactgtcgaaaacggcaagtggcaaattgcgcttgacccgatgattgcaaacgcagaaccgcaatcattggtcgtgaaatcctccgcagacggaaatactgtggtatatgatgatattcttgtcggtgatgtctggcttgcttcgggacagtcaaatatgtttttgcgtgtcggagatctttttccgtatgcatacgacaaagacccctacggcgatttcggaataatagagcaacagtatattgttatgaacctttatgattcttttcatgagaatgcgaacaatcctctcgttcgttcatgctggcaatggccgggacatgaaaatatcaaatcaaatcatacttcccaaaccccgtatgatgacattctgtcacgtttggaatgggtcgcatgcgataacagcgatcccgatcttctcgaccttcaaagcgcttacgccgtaagttttgcgcttaatattcaaaaagaaataggcgtgccggtaggcgttgtttgcagctcgcagggtggaaccacaataaaagaatggcttcctattgacagctcttcaacgtcaggtatcaaatactacatggacggcaataattttaagggcaattattacaattcaaaaattgcgccgatgatgccgtttgctttcagaggtattctttggtggcagggggaatccgacgctctcaaagcgggttattccgaattcagttcgtttgctcttgatgaagatgtggacagatacggcgaatatctcgaaaaacttgtttccacatatcgcggcgggtttacttcatgcgttgacggcaaaatgccgtttatacaatctgccatagtttattgtaacgtctcgggcaatattgatttgcgcgatgcatggaaactgttccatgacagacaacttgcgggcaattatacaaaaaatatcgaagatgcgtataccgtaaatctgtggaaatactgggttttcggtcaggctgacaatatccacccgccgagaaagtgggattgcggtgtcgcggctgcggaagttgcgataactaacttttataataattgaaaatcttcggaagacgattcttccgttaataatgtaaatcaaaatcaggaggaaagtttcatggacatcaaagaaattctttcaaaggtagaccacactatcctcgcgcccgacgcaacttgggagcaggtcaaacaggtttgtgatgatgctatcaagtatcacaccgcgtcggtttgtatttcgccgagatttgtcaaacaggcaaaagagtacgtcggcgacaaaatgaaagtctgcacggttatctcgttcccgaaaggcgacgacccgcttgaagaaaaggttaaagagaccgatcaggcggtaaaagacggcgcagacgaacttgacatggttatcaatgtcggattgctgaaagcaaagaaatacgatgaagtcaagaacgaaattgacgaagtcgaggccgcgtgcaggggcaaacttctcaaagttatcatcgagacatgtcttcttaccgatgacgaaataatcaagatgtgtcacatcgtgtccgacactaaagccgcatacatcaaaacttcaacaggcttctcgacaggcggtgcgacccccgaagcggtaaaactcatggttgaaaatgttggaccttatacaaaagtcaaggcggcaggcggcataaagacgcttgaagacgccgaaatgtatatcaaactcggcgcgtcccgtctcggcacttcaagagttgttgccattgtcaaacagcaggaggcagaggcgaagaaaaaatgaaaagagtatttttgatcgttcttgacagcgtcggagcggggtttctgcccgatgcggcttcattcggagacgagggcgcaaatactcttaaaacggtctccgcttcgccgtttttcaaagcggacaatatgcgttctctcggtcttggcaatattgacgggcttgattttcttgttcccgtcgaaaatcctcacggcgcatacggaaagatagcggaagcgtccgcaggcaaggacacgaccataggacattgggaaatcgcaggcgttatatcgaaaacgcctctgccgacatatcccaacggctttccgaaagaagttcttgatgaattttcaaaacagaccggcaggggagttctgtgtaacaaaccgtattcgggaacggaagtcataaaggattacggtgaagagcatcttaaaacgggggctcttatcgtatacacgtctgcggacagcgtttttcagatagccgcgcacgaagatcttgtgccgcccgaaaaactttatgaatactgtcgtatcgcaagaaagattctgacaggaaaacacggcgtcggacgagttatcgcccgcccgtttataggcaaacccggttcgtttacaagaaccgcaaaccgtcatgatttttcgatagacccgcctgcgcccacgctgcttgatgcgatttcgggtgtcggcaaagatgttatagcagtcggaaaaatcaccgacatatttaataaaaagggtgttacggaaagtatattcacacacggaaatgctgagggcatgcaagtaactcttgacctcggcgaccgcgattttgacggactttgctttgtcaatcttgttgatttcgatatgctctacggtcacagaaacgatattgagggctatgcgaaagctctgacggcgttcgatacatggctgccgtcattcctacaaaaactcggtgacgaagatatgctgtttatcacagcagatcacggttgtgaccccggttatccgacaaccgaccacacccgcgaatatattccgctgctcgtttacggcaaacacgttgctcccgccaatctcggtgtcggttcaacgtattcttccattgctgcgacaatagcggaatatctcggcgtggatttcaaacccgtaggcaaaagttttttgtcaaaaatcaataagtagtattcaattattaccgaaagggctgtctgcggacggctctttcgttttttgaggtcgtaaaaaccgaaaaaaatgtaaaatgttgagtttttctcggtatgcgcttgaaaaatgtataatattatgttataataaccaagtccgtgattatgcggataaaaaataacacacatcctgtgcgctttcgggtaggtgcggctgatttttgtcgtccccgtcaggcagggtggaggaaaaaacctcaggaggaaaagtatcatggcagtagtttcaatgaaacagttgctcgaagcaggtgttcacttcggacaccagaccagaagatggaaccccaaaatggcggaatacatcttcaccgaaagaaacggcatttacatcatcgaccttcagaagaccgttaaaaaggttgaagaagcgtatatgtttgttcgtgacgtggctgaagcaggcgacagcgttcttttcgtaggaacgaaaaagcaggctcaggaatccattaaggaagaagccgaaagagtcggaatgtactatgtaaattcccgttggctcggcggtatgcttaccaactttgcgactatcaagacccgtatcgagcgtcttgcgcagcttcgcaaaatggaagaggacggcacgttcaatcttcttcccaagaaagaagttgttaaacttaaccttgaaatcgagaaacttgaaaaatacctcggcggtattaaggaaatgaagaaacttcccggcgctcttttcatcgttgacccgagaaaagaaagaaatgccgttgcggaagcaagaaaacttcatattcccatagttgctatcgttgataccaactgcgaccccgatgaaatcgactatgttatccccggcaacgacgacgctatccgtgcggtaaaacttatcgcgggcattatggcgaacgcaattctcgagggtaaacagggcgagcagttcgacgttcccgcaaaggaagacgccgaaactgcggctgaataatttcagggaggattaaatattatggcagttactatttccgccaaacaggtcaacgaactcagacagagaaccggcgttggtctgatgaagtgcaaagaagctctcgtaaagaccgagggcgatatggaagaggctgtaactcttctccgcgagcaggggcttgcggctgctgacaaaaaggcaaacagaatcgctgccgaaggcgcgatcgcaatatacaacggcgctgacgttaccgctatggttgaagttaactccgagaccgacttcgttgcaaagaacgaaaagttcaccactttcgcaaacaccattgcggaagttgttgcaaaagaaaatccggctgaccttgacgctcttatggcttgtgcttaccccggttttgacggttccattgaagacaagagaaaagaaatgattcttgttatcggtgaaaacatgaacgtcagaagatttgtaagaatcgaaggcaactgtgcttcttacatccatgaccatggcaagatcggcgttgttgtcaaatttgataaagaatttgacgctgactgcggcaaaaaggttgcaatgcaggttgcttccatgagcccgagattcgttgacagaacccaggttcccgctgctgaactcgagcatgagacagagatagttatcgcgcagatcaagaacgatcccaaaaatgcgaagaaacccgaaaatattatcagagacaagatggttcccggaaaacttgagaagttcttcggcgaagcttgccttgttgaccaggagttcttcattgatgacagtctcaaagtaggtcagtatgttgcttccaaaggcgatgcgaaaatcgttgatttcgttcgctatgaaagaggcgagggaatgcagaagagagaagacgacttcgcggcagaagttgcgaagatggcttccaagtaatttttctgtaaacagaatataaggacaatgaagtcccatgtcggaaacggcgtgggactttttgcataaggaatcaaaatgtttaattgtcaaggcaaaataattgatactcatacgcatatttatcccgaaaaaattgctgcaaaggcaaccgccgcagtaggtgctttttatgattatcccatggagagcatcggaacggcggaaacgctgaaagaacatatgcaaaaggcgggtgtctgcaaatcattcattttgagtgttgcaaccgttccgaagcaggttcgcgggataaacgatttcttgatagcgacggttaaaaacaatcccgatatatttgttccgttcggaaccgttcatctcgatatggaaaatatcgaagacgaacttgaatatatcagaaaaaacggcatattcggcttaaaattccaccctgattttcagaaattcgcggtagatgaccctcgaatggacgttgtatacgaatatgcgcagacttacagaatgcctattgtttttcatgcgggggacaagaggtatcattattcaaacccgttgcaactgcgcaaggttatagaccgttttcccgacctgatagcgattgccgcgcattttggcggttacagcgaatgggaatccgcttacgagtatttgtgcggaacgaattattattttgacacatcaagcactctcggtatgatgtcggacttttctcttccgaaaaaaatgatagcaaagcatgacgaaaacaggattctgttcgcgtcggatttcccgatgtggactcccgaatatgaactgacgaatatcgaaaaactcggactttcgcaggatttgacggagaaaattctctataaaaatgctttaagtctcatttctcgcgccaaatagtcatttttcgcgcttaaaatcagacaatattttttcattatgagtggtagaatatttatgtaatattctgccgctcattttttgtttacggagatgaaaaaatatgggaagaaaaaatctgataactcaaatcgtgctggcactcgttgttgtcgggctttatgtgttgagcggttttctgtgttccggcagtacggacgcggacaagccgttgacccccgataatcccacgaataattcggctaaacaaatttcacaggggaacagcgatttttccgaaaacgatgaacaatataaatatgttttttcgcgtttggaagcacaggacgcagatccagataagacctgtccgagggacaagtattctcttcctctgcctgaaacggagcgttccgagtctttcaaagcgcttgtcgctcccgttaccgaaaaacaatcgtggaaagactttaacgacacggtttttataggagattcagttactctcggtctgcaaaaattcgtgaccgaaaagcgacaggcggaaacagattacttcggcaatgcaaagtttataagcgtcggcagttacggtgcggcaacagcggttgctcctgcgggagaagaaagcatacatcgttatttcaacggagtaagaacaccgccgcaggatatatgctcgtcatacggcgcaaaaaaggtatatatttgcctcggactgaatgatgtcggacaattttccgtcgatgaatatatcgcaaattacaagatacttgtcgagaatttaagaaaagcgattcccgatgtcaaaattgcgattcagtcgataactccgataacgctttacggagaaaaacaagtattgtataatgcaaaaatcgacgaatacaacgaaaatcttgccgctttcgcaaaggaagcaaactgtgcctttcttgatattgcagatgtgctcaaagacagcaacggctatcttgcaacttcactttcaagcgacgattattgtcatttgatgcccgaagcgtatgaacgctgggtcgattatcttttatatcatggggtgaaacaatgaaaaaagttctgattattctgttttgttcgttaatgctttgttcttgttcaaattcaggcaaaaacgtgagtttgaccgcaatgagtgacgacgttgttacgctttctgtcggttttgtgcaagttccgaaaagcgagattccgtcatatttcaatctgtcggaggctgatttcgatgcgtgtgccgtttttgtcagcctgtcgggcgagcgagccgatgaaatagccgtttttaaggcttatgacgaatcggggctggtaaatatcgtgtctgcggtcaatgcgcatttgcgtgaacagcgctccgcttttcgcgattacgtcccgtcggagtttgcaaaattggaaaaaaccgtagttcggacggacggtttgtactgttattattgcgtgagtgaagatgatgatgtaaagcaacttttgtcacggtatttttcttgacaatggctctgttttgttgtattatatagtggtgaaacggaggattttgccatgtatgacagaacagaatatataagacctttcagaaagggaaatacggttctcaatgagaccgctcttgtagtcgaatatcccgggattacggattccgacggaaatataacgataacgcttttgtatgacatcgaaaaggttatctcggtgactgatttcggcggtaagaaaatatatgaagagggaacggattggtttgtcctcgacggaaaactgataatcccgaaaaattcttctatgccgcgtgttccgtggtctgtatacaaccctcaggaagcgccgaacgacggtcttaatgcgcatttttccgagggcggttatattctttatacagagggaactcttcttgttgaccgacagatagccgttacatacgagcatgccgtaaacgaaagcgtgtacaaacccgtcattctccctcataaattgccgcgtcttgcacagaatctgaaagagcaaaaacctcttacagtcgctttttggggagacagcataaccgttggatgcaactgctcaaaaatgcttgaaatcgagccttttatgccgtcgtgggctgaaatggtctgcgatactcttcgcgaagactacggttgcgacgtaacttccgtgaataaggcagtcggcggaacccgtgtcgaatgggggctttcggagtttgataacgcatggaaagatgtggcaaatgttgatcttttcgttatagctttcggcggaaacaacggtcctgaaaccactcccgaagagtttgaaaacatagttgaagagataagcaaaaaggtttgggctaaataccccgaatgtgaaatcgtgaccgtttccgtttgtcagggcaaccattatgcgcaggatgtgaaatgccaccacgaacgtctcaaaaaactttatgaacttgccgacagatacggttcaaaattgaccgttgttccgatgaccgcacttcatgccgaaacgcttgaacgcaaaaagtattgggatatgacggcaaataacataaatcacccgaacgatatgcttatccgtatgtacgcacagactttttcggaagtatttgcctcagcggaataaaaaacgtttatcacggatatactgttctcataaaactttcgggagaacggcaacgatgataaaaggcagaaaaaagagcgtttacattattaaaaatacaggcagcagactttttgaagaggcgatattcattgtcaaaaaagacgctccgcacgtttcggattatacgctgaaacaggaagccgaaaaagttatagttgaaaaaacatcgtattatattaaaaaagcgcttcgtaaaaaatgattttaggggagtttcaaaatgataaagcacgttgttatgtggaagttcaagccgggaaaagaagttgaaatgaaacgttttctcgatgcattggaatcattgcgcggacaaattgacgttattcgttcgatggaaataggtgtcaattcctacgggaaagataactgtgatgcggttctgattatgactttcgattctttcgaagatcttgaaacatataagaatgacccacgtcatgttgctgcttcgtctctctgtaaagaaatccgagaagcccgccacgccgttgattttgaaatataatttcagataaaaaatatcgggaaccgctttttctgcggttcccgttgcgttttttgtttatatttcggctgaattaaactatctgattatttccgacacgtctttaagtccgtgttgcgtggttataactacaacttcgtccccaagttccatggtatcgttaccgtctggaattatcgttgaattttttctgatgacagcgcctataagcaggtcttttttaagcgaaaggtctttcagcggtttgccgatgaaatcggctgcttttttgaccttgaaagcaatagcttcgacctttccctccgcgagtttgtaaagcgtttcaactccgcttccgcgcgcgttttcttttgatcttacaaattgcagtattctgtccgctgtgagcaatttcggcattataatgctgtctattcccgaatctttcagtattcccgaataactcggctgatcggtcacggcaattattttggcacagccgagcgcttttgcgtgcattgccataataacgttttcttcgtctgtttctgtcagcgatacaaacgcatcggcgcttccgacatctgcggatttaagaacttctttatccgtcgggtctgcatttacgatgtttatcttatcgtatgccgcacggagtttttcaaccagacggggacttttttctattactgttatattgatgtccagggcttgaagcgactttatcagataatgcggtattctgccgccgcccgctatcgttacggcttttatcggctttttctttgcgctcaaaagcccgaaaaacgaaattatgctctgtgtgtcagccgcaagcgcgattctgtctcccgcctgcaagcaggtcgcacctgtgggaatgaatacctcgttttctctttcgacgaagcatatcagaactttgactttatatttgccgtaaatatcggacagcggaagatcgacaagtgaactttcctgcggaatagtgtattcgacaaggttaagaagcccgtttgaaaaactttcaatttttgccgcggagggaaatctgacaatccccgatatctcttccgccgcggaattgtcggggttgatcgaaaatgtaagcccgaattcattgtgcataaatacaatttgcgaagaatattcggggttgcgcaggcgtgctacggtatattttgcgccgagttttttgcctatgacgcaggctatgacgttgagttcgtcatgcggggaagccgcaatgagtacatctgcattttctatgccggcttcacgcaatatctcgatgcaggcgccgttgccttttatgaccttgtacggcaggtcttgcggcagagaagccatgacttcgcttctgttttctattaccgttacgtcattgttgtcctgcgcaaggttttccgcgatggcggaacccactttgccgtgacctatgataagaactttcatttcttgtttttctcctgtgagcgctgcccgcgttgtatacgctgtgttggcagacatagtttttgatgtcgccattatatcactttttatgccgaatgtcaaacaagacggcgatatttcggaatgtcttccgctttttgcctgaaagaaaacaagggacgaccgaagaacggtcgtcccgatatttgtttttgctgttgattacaggtatttctgaatcttcggcgttgcaagggaaatatccatgctgaccgtgatgaagaagtcgattccgtccgcgatcgcttcgagttcgtcaaggaacgtttcaagttcttcaacgttgtcggaacgacaaatctttgttatggagtcaacaaaaatttcggttatatcatagtttgatgctctgagtcctccgatgaagccgaagaacatatcgtagtcgttgataccgtattcgtcagtgcttataagtcttactttcgggtcgatctcgtatctgagtttgtcatctctttcaagacagataacgcttccttccgcagttttagcaacggaatttacggtggaaataagttcctttgtcttgcctgttcctttgagacccattacaagtttgatcatgtggatgcactccttttcggataatattgatgttgcgcaaccccgtattccttacggaaatcatacgggatactgttgttttttctcttgctttaattatagcatagcgacgctttcatttcaatacgtcggtgacaatttcttgaagtttgttgaaactgtataacacttttgccataattatagcaaattttccaactctgcttttttgtcttcgtagccgggcttgccgagcagtgcaaacatattgctcttgtacatctgaacgccgggctggtcaaacggatttacgccgagaacgtatgcggaaattccgcaagccttttcatagaagtatataagttgtcccatggtgaactcattcattccgtcaagttcgagaaccacgctcggaacgccgccctgtgcgtgtgcaagaacagtgccctggaacgccttttcattgacaaactgcatatttttgcctgcaacgaagttcagtccgtctgcattggactcttcaaacggaatttcctggtcgagttttgcattcttgacccagataacggattcatacatgttgcgaagtccctgctgaacgtactgcccgagcgagtgaaggtcggtggagaatatcatcgaagcggggaagagacctttgccgtctttgccttcgctttctccgaaaagttgctttatccattcgccgaagcaccacatatacggctcgtatgcaacggttatttccgtggttctgctctttctgagaagaatgtttctgacagccgcaaatttgtagcagtcattcttttcaatatcggggtcggcatacgtcttgtgcgcgtcctgtgctccctgcatgagtttgtctatgtcaatgcctgcgcaagcaatgggaagaagtccgacagcggtaagtacagaatatctgcctccgacatcgtcgggaacaacgaacgtttcgtaaccctctgcgtccgccagttctttaagagtgccctttgctttgtccgtggtagcgtaaattctgccctttgcgccctctttgccgtatttcttttcaagcatttctttaagaacgcggaacgctatggcgggttccgtcgtcgtgcccgatttggatatcacgttaacgctgaaatccttgccttcgcaaagcgaaagaacttcacggaagtaggtggaagaaatgctgttgccgaggaagtatatctcgggcgtattttttttgagattgttgtaaagagggctttttattgcttcgataacggctctcgctccgagatacgaaccgcctattccgacaacgagaagcacatcggaatcggaaatgatcttctgcgcgctctttttaatgcgggcaaattcctctttgtcgtaatctacgggcagatcgacccaacccgtgaaatccgaaccgagaccggatttgttggtgagcatttcatgagcagctcttacctgcggcgctattgcggcaaattcgttttcgccgacaaaacctttgaggtaagaagtgttgagtttgattgacataataaaaactccttttgagattaagttattctattgaaaaatccgaagcgtcgaaatccattgacaactcggcgcttttcggagttctttttaacgggtcgtatacgaattttttgcagttgtattttctttttatgtatccgtatttatcacagacaacaccgtcttcatcgcagagaagtgtgcctcttttgcaatattcgcagttttgttcgataccttttccgaagactttcatgtcgattctccgttccgaaggtcgcgcacgcgcgacaaacaatatattattttatagtttatcacattccgctccgtttttcaacctgcaatccgaacaaaatatcgaaataattttcgaacagaagatcgtatgttaaaatttttaggaaacattacggttatatatttacaaataaagacttttgtattataataaagaataatcaaaacacaagcagagcacggaggataagcggtgtcggcaaaaaacaggatactgtccgaggaagagatggaagagcagaaagaatataccgaaagggtaggtcgtatttctgcggaatttgaacagacgcacggaagaaaaccgagatttttttccgccacatacggttgtcagcaaaatgagaacgataccgaacgtctcgacggaatgctgcttcaaatggggtacgaatatacggaagacaaagaccttgccgacctgattctttttaacacatgcgctgttcgtgaacacgccgaaacaaaagttttcggaaatgtcggtgcacttgtcaaaaacaaaagagaaaatcccgatcttaaaatttgcctttgcggatgtatgatgacgcaacctcatattgcagagcagataaaaacaaagtacaggcacgtcaatcttgttttcggaacgcacgcgctttatcgcttccccgaaaatctttaccgtattcttacgggcggaaaacgtgtgtttgacgtaacttcggaagacgggcgcgtagcggaaggacttcccattcgccgcagagacaaagtaaaggcatgggtctcgataatgtccggctgcaacaatttttgctcatattgcatagtgccttatgttcgcggacgcgaaagaagccgccgacccgaaaacgttcttgaagaagttcgcggacttgttgccgagggatataaagagataacgctgctcgggcaaaacgtcaattcgtattgcaaagaccttgatatcggttatgatttttccgacctgcttcgggacataaataagattgacggagattttaccgttaagtttatgacctcgcatccgaaagacgcaacggaaaaacttattgacacgatagcggaatgcgacaagatatgcaaacatctgcatctgcctgttcagagcggcagcgacgccgttttgaaaaagatgaacagacattacacttcggaaaaatatttttcgctgatagattatgcaaaaaagaaaattcccgatgttgcgttgacaagcgatattattgtcggatttcccggtgaaacggaggacgattttctcgctacgcttgatttgataagcaaagtggagtataacggactttatacgttcatctattcacctcgaaagggaacgcctgcggcggaaatgaaagaccagataccgcaggacgttaaaaaagagcgttttaaccgtctgcttgccgtgcagaacgaaatcagcacaaagaaaaattccgcattcgtcggaaaagtctttgaggctgttgtagacggatttgccgagaattcggaaaccgccatgctcgcaagaacgtcaaacaataccatcgtaaagtttgagacggacggaaaaacttttaaagagggcgacaaggtgcgtctgaaaggcattcgttgtgccaactgggcggtatacgccgaactgacggattagtttataaaaaattattcaaataaaacggagagtgtttattatggcagacgtaagagaacttgcaagacaactcggagaagcggtcgttaccgacgaaaaattcgttgcgcttcaatcggcgcaggctgaatacgacaacgatgccgaacttcaacaacttattcaagagttcaatcttcaaaaaatgaatgttatgcaggaaatgcagaaaggtgaagagaagaacgaagaaaaactcaaagaacaccaagacaaaatgagagagacctatacaaagattatgtccgatcccgttatggacaagtatatgaccgcaaaagaggaagcggacgcatttgttaacgagatttacggcatactcaattttgcgattacgggagaagaacccggcggttgttccggttcctgcgaaacctgcggcggctgccattaagcgttttaaatttaaaaagtcaaaatgaaagagga

SEQ ID NO: 2128 - DNA, 3526 bp, Unknown
  16S sequences of unknown bacteria
ggcttcggactgcggtagccctttcagggctgtcctcgccctcggtgcttcgcacccttttttgcggcctgccccgctttgcgtcgcaggcttcggactgcggtagccctttcagggctgtcctcgccctcggtgcttcgcacggcggccaaaccctgtgctttgcttgtgctcggccttccttggtcgcgggtctctggataacaatgtattctttcttacaatcccatcagccgccgcagggtctccagcggaattttccacacgccgccctgcttttccagcgtcagcggccatgcctccagggcggtggacgcgccgtccgtcagcagggaagcgtctacattcagggcggcacgttcgccgttgaccatcccggcggtcagcgtgtagtccgacaggctgggggccgcgtcgatctccgcccggaactgctctggcaccggcaggtcctccgccacggtgaaatcgtagatcgtatcaaaatcccggcttcgccatgcttccatcagcagggcggcggtgttgtacgggctcagcagcaggctttcgtcccggctcagcgggtcggcggggccctgttccccggtcaggtaataactccgatccagccggatggcggcgctctctcccccgtcgatcaaaatctgcacccgggtgtagggcagattctccatcaccgtgtccgcaatgctggccatggccagccggcggcggacaggggcttcctccgcccagaactcgtccgagcgccagccgtctggaatgccgtcccgcagcagggaattggtcagggtgatgaacagcatatcaccgctggcggtgacttccttcagccctacgtcctctcccagcacccggcggagattcatctccccggcggacggcccggccagcagcgcacgcacaagcgccgcttcgctgctttcgtcctttcggacggtcagcgtgcggctttcccccgccagcatggaataatccagatagcggaaatacagcaccacatcccacgaagcggcgttgtcctccgcggcggtggcggcgtgaaggcgctgctccacgcctggcagcggcgtggcctcggcctgtaccagcggattcgccgcccgggtgcaggagcacagcagcccgcacagcgccgccagaagaaccgccagcattccccggcgctttcgatttcctttcataaacgtctctccttggctcatccctgatggatgggcagttccacggtaaaagtggaacccctgccttcttcgctttccacggacacgctgccgccgtgcatcagcaccatctggtgcacgatgctcaggcccagacccgtgccgccggtctcccggctgcgggccttgtccacccggtagaagcggtcgaagatatgagcctgatcctcccggggaatgccggggccgttgtcggtgacggtcatcaccgcgtcccggccggagcggatcagccgcaccttgatggcgccgccctcctgcgtatacttgatggcgttttccatcaggttgtacaccacctgcgtcagtttggcgcagtcggcgtacatttcgcagcggtcgttcagggccagcttcaattcctgatgatggctctcggccacgggctggagccggtgagccgtatcggtgatcacctgcgccagactgaaggtggtgcggttcaggcgcatggccttcgagtccatgctcaccagcgtcagaaggtcgctgatgatgctgttcagccggtcgatctccttattgatgtcggtcaggaactcggtacgcatctccgcgtccatttccggttgatagatgatgttttccagcaggatcttcatggtggccagcggcgttttcagctcgtggctggcgttggagacgaactgattgcggctggtatccagcatctgcagcttttcggacatggtattgaacgtctcgctgagccgccgcagctcgccggagccctttaccggcacccgcacggacaggtcgccgtgtcccatgcgctggatgctcttggtcagggacacgataggccgggtcagcactcgggagaagatcagcgcgatcaccatggccgccgccgccgcgatgaggaagtacgccaccatccgggtctgcagggaggacaggcggtccatcatttcctgcaccggggaggaatacagcagcacgccctgcaccacgccgtctgccgtcagcgcggaggtgcaataagccacccattccgcgttgggatcgtaaggccgcagccattgcagccagctgttctccccgccgttatcgtccagccggtgaacgccgtagtccgacgcgctgcccatggacaaaaccgacaccacctccggcagctccagccgggagccgttcagctcgcagaaggtatccagctgcaccttgccgctctgatccagcagcatcagccgtccgcccaattcgcccccggcggattccagcagctgctgggccttttccatatcccgttcggcgtacagcggccccaactccgccgccagcttatcggcggcggcgtgatcctgccgcatcctgtcgctgaacaaagaatcgcccaccagcccgatgagggaggtcgctaccagatagtagctgacccccacgatgagcaggaaggcgagcatgatcttccatcggatggaagaaaaggcatgtttagtccttgtcggtgaaatagtaacccactccccatttggtgaagataaattcgggctgggcgggattgcgttcgatcttctcgcgaagccgacggatatggacgtccacggtgcgggcgtcgccggtgtagtcgtacttccacacggtttccagcagggactcccggctgaacaccttgccccggttattgacgaacacctgcagcaggtcgaactccttggcggtcaggcggacttcgtttccgcccagcgtgacggagcggttgacggagttgatctccatatcgtggacgcggatggtgcggcgcacgtcgttctggctggacgcggcggtacggcgcaggatggtcttgatgcgggccttgacctcaaggatattgaagggcttggtcatatagtcgtccgcgccgtattccagccccagaattttgtcgatctgttcacccttggcggtcagcatgatgatgggtacattgctgtgttcccggatccgctggcacacggtgatgccgtccaccttgggcagcatcacgtccagcagaatgaagtcataatggcctgcaaagaacttggtcagcgcttcgtcgccgtcagcggcggaatccgtctcgaagccttcttgttccagcgtatatttcaaacccttaacaatcaggggctcatcgtcaacaaggaggatgcgtttcgccatgggaaattctttcctttctgcagtgctttgccttgaaaagacttatttacagccttgtttacattgtaaaactaattatgaaaaaaatcaagtagattgcaacaatttcttcacaatttcaggggtagtacccctgaccccggactgcgcgccatgggcgcgcaggggcg

SEQ ID NO: 2129 - DNA, 2736 bp, Unknown
  16S sequences of unknown bacteria
taataaagttattccccacggaacataatcattccgaaaaggtggagtcgctgaggattccactcaaaggggaggtcgcagcgcttggcaagctcgcccgcgtcgatgcagtaggcggacatacagcttacgcgctggtcgggcatggggcagggctcgccggctttgcgcttgcagggcttgcagatggggcaggggccgtagcccacggcgaaaacgtcgaagccctccttgcggagagagtcgcggaagcggcgaacggcggcgccgtgcttggccttggaggtgagcacctcaggggtgccgtagcccggaatttcccacagggactggagcacaagtgcctcccttgcggagtcgaggcgggcgcgcatttcgtccggggtgccgcagtccggcgggcaggcgtagttcgcgccgtagttgccgcagcggttgacctcgcagtatttcaggtattcggggttcgtgggaatttcggaaacggggaaccacacggcggtaaagccgaattcctccgcctgctttgcaattttttctttgtcgatattcataaaatcacctttgcttttttgtcgaacacgcctttgcgtgaaattacagtatagcacgcttttgagaaaagagcaagaaaaaagtctcaaacggagcggattttgtgctctgatatatacaattgacacagatggccttgatgatgtataatactatttaggaaaggaagcagcgctcctggtaacatttaccggagcttatgacgttagaaacgccgcagggcatttctatatattttaaaaaagaaggagaaaaaatatggaacaaactacaccgaaaggcgcaaccatgctgaaggtcacaggaatcctcatgatcattggcggcgcaatttccatcatcgtgagcatcctcgccattattggcatcgctgcaattgcatatctgtccgacggcagcgcatctcttggcctgctgtatgccagcggcgcactgctgactgtcagctccgttgctgagctgatcgccggtatcctcggtaccgcaaattgcaagaagcccgaaaaagcaaagacctgcctggcctggggcattgttgttgctgtgctcgctgttgcgggtatcatcctcaatgcgatcggcggcggcagcttcagcgtaatctctctcatcacgggtctcgttctcccggttctgtacatcatcggcgctgtgcagaacaagcagtaagctgcataaagcaaagcgctggccctgcgggctagtatcggagattcaaatagaaacagcagcctgcgggctgctgtttcttttgctctgtaggctccgcctacaaaacgcatggtattattgcatttttctattatcctagctgcaaaattgtctccacggcggcttgcaagtcggcggtcggcagctgttcggcggcaccgtcgtccattttctgggcgacggacgggtcgatcggcaggcgggccaggaccggcaggtggtactgcagggcgatctcgtcgatgtggctcttgccgaagatctcatgctgcttgccgcagtccgggcactggaaatagctgtagttctctaccaaccccagaacggggatctgcatcatattcgccatattgaccgccttggccacaatcatagagaccagctgctgaggcgacgtgacgatgatgacaccatcgaccggcagcgactggaagaccgtcagcggcacatcgccggtgccgggaggcatatcgacaaacagataatccacatcctcccagatgacctcgctccagaattgcttgaccgtcccagcgacgatggggccgcgccacaggacaggatccgtctcgttatccagcagcaaattgatggacatcacctgtgtcccattctccgtgagcgccggatataggccctcctcggatgcgccggagcaggcgtggacattgaacgccttggccatagacgggccggtgatatcggcgtccagaatgccgaccttgcggccgcgctgctgcatcgccatggccagcatcgccgtcacagtgctcttcccgacgccgccctttccggatacgacggcgatgacttttttcacattggaatggggattggcctgcgccagcaggctctccggctgctgcgcactgccgcagtttgagccgcagcttgagcagtttccattacatgcttcactcatggttctatctcctttatatgcttggtatgctttcacgcccggcctgctttgggtcaggttaccgattcccttgcattatagtgcccgcccggtggaatgtcaaccttcctccagggccatggccgccgtctcccaggcctccatcagggccagcagggtttcatccgcctgggctttttcttccagcagcgcgctgagcttctgataatccgcagccgcctcctggatctgggcctccaactccgccagctgcgcctcctgctgggcgatctgccgctctaagcggcgcacctgcttatccaactgcttgtccggcgtcctggggcgctctttcttctcctttttctcccgcttttcggcgctctgggcctgccgggccgctttttcgtgctccaggatcgcccggtatttcgtataaccgcagcggaaatcccgcactgcgccgtcctccagggaccacacccgcgtggcaaaccggtcgataaaataccggtcgtgggagacaaacagcagtgtcccgtcaaattcctccacggcgcactcgatcc

SEQ ID NO: 2130 - DNA, 12525 bp, Unknown
  16S sequences of unknown bacteria
ggtattgatcgcgccctcgcaggcgctggagccgcaggaaatgcccgcaccctcaaacgccgggcctgccgccgtggagcagcactccaggccgtccgccgtgcgcagccccatctcgccgttcgtgccgatatcgaccagcaggacattgtccgtcttgcggcagatgccggaggccagcaggctgcaggtgatatccgcgccgacataagccgagatgctccggggcagatagatctccgtcttcggcatcccgtccaggtgaaattcctgccaatcgccgaacagcgacagcggcgtgaacggcgcataggccaaagagcggggctccaggcccgcgaaaatatgcagcatcgtcgtgttgcccgtcacgcacagggcgcgaatctcgtcaagtgcaatgcccaccttctcgcacagctggccgcaaatcgcggcgatctgacgacggatgatctgacacaggggccggacagtatgctcattgcagtagacgatgcggctcaggacatcggcgccaaacatcttttgcttgttcatttcaccgacgacgcccaggggctccttgctgtcgtggcggaagagatagccgacgaccgtcgtcgtcccgatatcgacagcgacgccgtagccgctggaatagagcggctccagcgccgcgtcgtcagcagagtagtcgacggcgatctgctcattgccgccggaccggggcatcgtcacgctgcagtcacccaggaccgtggtaaagcaggccaagcgcatcgagtccgccgctgcgcccagcagcaggcgctcctgctcgtccatcgggctgaccgcgccggagacgatcacgcggcacttgccgcaggtgtggttgccattgcaggggaaggaggtggagacatccgcgtcctgcagtaccttcaagagattcgcgccggcggcgacctccgcgacactttgccgccccgcgtgggaaatcgtaacagtggccatactgattgctcctttatttttctatcgctgctttgccgctctcagcggcaaattcggaatcgttcttattataacagcccgccgcggtaaaatcaactgttctccggcggaaattccgcaggcgggaagaattgcgctgcccacgctgcctaccgccctattctaccgttttaccggaagggctgacccgttcactggtcgcttctctccctttcgaatgcgcacaagaaaaagcgatacacgtacgccccggtgccgaagcaccggggcgttttggtgtttttgcggcatgtgccgcttacgattgcaatgatcctgctgttaagacagcaaatcaaccgttttctgccggagctgcagcctcagccgggacatccgtctcggcctggggcgcttccgccggagcggggttcacctgcgaagcaggagtctgcgcagcttcggtctgggcctgcttttccggcgtcgtctccgcctgcttgtccatcagcttggtgaaccgcatgacgaaggctgcgacttctgcacgggtcgccgtgccccgcgggtccagattgttcttgcccttgccgtagatcagcttgctggcaacagcccaagacatggcgtctttggcgtagctgctgacctggcttgcatcagcaaagctagcgaagttcgcccgtgccgtcgtatccagcttcaggtaaccagcgaagcggtacaggaaggcggcgatctgctctctcgtgatggagtccttcggacggaacgtaccgtcgtcatacccggctacgatcttgttctccacagcccagttcagggcagcggcataccaggagttgggctcactgtccgtgaacggtgcccggccggtgttggtgtaatccggcttgcctgcgatgcgccagaggacggagaccagcatgcagcgctgcatcggatcattgggtgcaaacgtgttggaagaggtaccgctgaagtactggctctggtagacgaagtcgaccgcgtccagataccaggcattcggctccagatcaatgaagggcagattcgtgtcggaaatctcaccgcaggtggagcagacataatagacactgccatccgggcgagtaaacgcttcgaagtggtggcccaagggagcttcgtaattgtccgcataggtctcgccgcattcgcagcgcagcttgaagtggccgcggacggtgcaggtcgtggggacatcctccacgatggtgaccttatgggcaatgcccgtcttctcgtcgaagtggtgcacatccttcgccgtgaggccggtgcggaaccagcccgtcttgtagcgacccgccaggaagtacatgctgccgccgttcatgctgtccgtcgcccagccggtgtagcgggcgttggattcgccgcagacggagcaggccagggtcccagccgcgcggtcgtagacgtacttgtggccgtcgcgctcgcaggcggtggtgtggtgcatcgtgtagctgtcgacgaccgtgccatcgacgttatacgccgtgacggtcatgtcgttgccggaggtgctggcaacgagatagatggcgtcgtagttctggtcgatcgttgcaaagtggaagtcttcattgtcctccgcaatgtagctgctgctccgggacttttcgcccaggtcaccgcagatcatgtagaccgcgccgttttcgctgtcgaccttgccgccggtcaggggctcggtgcgggcataggcatggtcatggccggagaatacaaagtcgattcccgcttcatccacggctgccggaagggcgtcgtgatagttggcgctggagcccttggggttcgtgtagtaaggcggctggtggactgtcaggaccttccaggggcaatccgacttggctgcatcctggacaagccacttcgccgcagcttccaggtttgcgttgcagttaatgacagccatgtaaacattgccgtattccacggagtagaaatcctcgtccggcaggttgaacgccgtctcggcgtgctggccggagagatcgccgtagtactcatggttgcccatgacctggacgatgggatagcgggcaaattcctcggcaaacaggctctggatctcatcccagctgcccagttcgcccgcgttgtcgatatagtcgccggtctgcagaccgaaggtcgcgccggtgtccttgatctttgccgccagggtgcgcagggtcgcgatgtcctccgcatctgcttccgcattgccggagagctgggtgtctcccaggatgaagaaactggtgtcctgcttggcggtatctgtcgtgaattccgcgatctcggaccagtgaccgtccacgccgtcaccgacgcggtagcagtaggtcgtgccgggcttcaggccaatcatcgtggccgtgtttatctgcgaagcggcgttatcgccggtgaaggaatgtttcgtgcaggtgccgtcaacgctcgtaaagttatacttgccggaatcatacacgctcttttccacatactggacgaccgcggccttttccgtgtactccggcgcgctgaaccaggagacgcccatgcttgtcgccgggtccttgacggcattgaggcgcacgtttgtcggcgtgacctcgtcgctgcccatgccggtggtcgtgccattgtactggaaggacaggccgtcctccgccttggcatagatgcagaatttttcgccaacggtccggcagaagcggttcgtcaccaggatgccggagcggttcgtcgtgccgaccagctcatcctcctcgccgtcgcggaccagatagacctgcatcttcccgggcttggagccgtcggcctttgtcacatagatcttgccgttgccgccgacggtcatgatgtccgccgtgatgcggtaaggcgcctggatgctgacggatgcagcctcctgggcaaaggtcagggccgcctcgccgtcgcgatacgtaccggcctccacgctgtagactaggttcgtgccctggggcgtcgccgggtcgacgtggaaggtcaccgtcgccagcgcgccggatttgaccgcgccgctgatctccagattcagaatatcgccgtcgagggtgctcttgccggtgcttccggcggggaaggtgacagccggcgtgccgaagctcgtgttgaagcggatcttcgccgtgacgtcgctcagcttgtccgaaccggcggacgtgagggtcagggtgtagtccttgcccagctccgccgtctccttcccggtgaggacgacagcgccgtagctgctcttagcgtccttcacggtgaagtagcgggtggtcgtcgaaaggttgccgaagccgtcaatgacgttgagcgtcacgctgtgcgtgccgttgggcagggtcacagacgcggcggcttctttctcggtgctcttggtcagcgtctggcgctggccgtcgacatagatggccgtcttttccgtgttgatgccggtcgtgttgtcattgaccggatcctggaaggccgccgtgatatcgaccttgctgctggtcacaaccgtggagccgtctgccgcggcctccgtgccgttgagctgcagcgcggtgatctcggggttgtccatatcgtccacagtgtcgccatagacgaggcggaagttatcgaagtagatgctgcccttggcgaaatcgcccatggggatcttatcgccgttttcactggcgctgccgccggggatgaaggtcatcagaatcagcggcatgccgttgacaagcttcaagggatgctccggcgtgacgtactgggcatacggtgtcaggtccgcttcgcagtacatccagccgtcccagtaaatgccgttatactggatgctccggccctcctgggtcttgaaatgcaggtagccgcgcttgtagctgtcgctgttggcgtcataatacgcgatgttcgtccacagccagtagttgggtgtgccctccggggcgtagatccaaacgcccaggccggacggcgtgccgttaatctcatagcccgcgtagaggtccgtcttggcttcctcggacgtggagcagtagtagagatattcgttgacattccgatacccggggttcaggttcgtgtagtcgtagtccagccgcagggcatagtcgccgaagcggacctggccgcggtctgcgttcacgatctccgccgcagcggaattttcctgcatatagctggtgtgccaggtgaagaatgtgtacccggcactgccgaggatgtaggcagtcgggtcataggtcttgtcgtaaatattggagatgtactcaccgccgaaggtgaacgggccgcgcttggtgaccgtccccgggaggttcgtctcatcgttccagctgatgtaggtcagctccatgttctcgtcaccgaaggcgttgccgtagctggcgttgccccagtccgagttgccgaccttcagcagattgccttccgcgtccggttcaaagtcgaacaggaccgtcggcatccggccgatctccaaggagatagtgtccgtcatcacggtgctgtcggcctttttgtagctgaccgtgacggtggcgctgcgggtgtccttggccttgatggcagtgaaggtgttgccgtcgaatgtgccgatgtccgcaggcttctggtcagtggacgccggggtgatggtccagccaaagacatagccgcccagctccatggcgcgggtcttgtactttgccgtcaagcccagatcgctggactgcttgaacgagaggttcagagagcgggaggcaaaatagagctcgtccggctcctgcacctcgatcgctgtcgtaccgacgacctcgtcacctcgcatcagtttcaccgtgacggtgccgcaggtgccgttggactggaacaggccgctggcgtcgattgtgccataggccttgtcggacagcgcccatttgcagcccgccgggatctccgccgcatagccgccggcgtcgacgccgcttgccgtaaactgcaccttggccccggcaatgtagagcgcattgttgggctccagcaccgcgtggtcaaacttgccggtctgcttcgccgtcgagacgacaagcagcgacgaggcaacgacacgctccgcaccgtcggacgggtggttctgaatctccaggctgccgccgccgtggcgggaggcataggtcgcagagccgccgccatcgagatagatggacgtcacaacgccctgcgccttctgcatctgggcaatttcatagagcgtcaatccattggaaaccccctggcggccgtcggccataaacagaacgacggtgccatcggccttgataccgatggagttacggggagccttcaccgtcggatccaggtcatcgcagatttctccgtttttgacaagatagaacgcgccggagatggcttcctgcacatcatccgtcggggtaccggcgtcgcggatgacataggagccgtccttcaagaccgcgaaatacggctcataggccttgctgccgtcgtcatacaggcggcctgtctggatcaagttgccctccatgatgagatacccggtgcattggccggtctgcatattgtagtagtctgcgttaatggccgtgacaacggtgtcgccggtggcggcttcgtagcttttggcctgggacgtcgtcgttctaaggtcccatttcaggccgctttctgccagagctgcacggctcttcggggtgctgcccttggtatagtagctgccgtaggacgctttgaacgtcacctgggcgccgggcgagatcgtcgccatatagcccaggacttgattgctgccctcggcgttattcataatgacttgagattccgtcataccgggcgcaatgtcataatctgtctgcgagatcagcattttgtcctccggcagcggcacaggcgctgccttagccaatgcggcggggcagatgctgatgagcagtgcgcagatcagcagcagacacaagccgcagcgagccagcggtcgtttcgtctccttcatatcgtgagttcctccttttttcttccccgaaacagggagcttcaccagtctgattgtatcacattccccagatactgtcaacaaaggtccggatttcctgacgtttttcacattttttagtctcgtttttcaacacaatcacgaaaaaatcagcaaaaggcataaaatctccgagattttttctccctttcgccagaaagggtcacaagccaaaaagttatgcttgcgaatcctgcccgttttgctataatatataagtaatgccgtatgacgtttcgcacctgcgaacccgtcaagcggcgcaaaaccccaatgcaatgggagtgcaaaggaggaaagcctgccatttttggcatgcggaatgcttcatgaaaaaactcaaaggactttgggccaccgggctgctctgcctgctgctggcgtgcctgacgatcggcgtcaacgcgaaggagctccaattttcaaacttctatgcctacgccgaagctgacaataccgcgacgcggatcaacgccaccgtcgtcggcgatacgacgtatctcatcctgcccggcggaaaaacagcatcgcaggtcccgctgtatttttcgcttacggacccggacgctgccgtctccgccgctggtaccagctccgccaccgggctgcagagcggccaggcactggatttgcccgccctgtgcggcgggacgcgcacccaatacaccatcacgctccgggccaaatccggcagcgataccgcagtgcagaagatcgtcttccagacgaccgagggcgtcagcgccctgtttctcaccagtgacgacccggtcaaccagggccgcgcctgggtcgaggccagcgaagataaatccaacaaagccaccggcagcatgatcctgctggatgagaccggcagcacggtgaatgccggcaagctcaagcagatcaaaggccggggcaactccacctggaagggcgcgaaaaagccctaccagatcaagctggacaaaaaagccgacctgctctcgtccggcgacgccgccaacagcaacaagacctgggtcctgctcgccaactactttgacccctccctgctgcgcaacagcctcgcctttgacctggccggtgcaatgcagatggacccggccctgcagtaccgcccggtaagcctttactatgacggcgaataccggggcgcataccagctgtccgaaaaggtcgagattgccagcggccgcgtcgatatcaccgacctggagaagctgaacgaagaagccaacgccgccattgacgaccttgccaccctgccccttgcccaggcgacaacggccaacggcgcgacctaccgctacaccaccgggatgcagtccccggcggacatcaccggcggctacctgctggagatggattttgccacccgcgcccaggcagagctatgctacttcgtcacaaagcggggctattacgtcgtcgtcaagcgtcccgagtgctgcagccaggcggagatggattacatcgccagctattaccagacctacgaggacattctcttcaccggccagccacaaaacggcaagacgctgcaggattatgtcgacctcaccagcgcagcccagtgctatatcatcaacgagctctctaagaaccccgatgggttccacacctcttcctacttatataaagagaccggcgacggcccgatgcacatgggccccatctgggactatgacctaagcttcggcaccggcaccggcgccaacactgccgtctgcgccgacccggagggcttcttcgtcctgtatgacccgtacgtccgggcgctgtatcaaaacggcgacttccgcatggctgtgcagcaggaatacacccagaagaccgcaccgctgatctctaatgtgctctgcggcgccagcggcagtaccagcggttcgctgcaaagctttgccgattatctccgccagctggccccctccgtcgccgccaacgagctgatctggaacggcgatacctactacacggcccagcaccccggcggtaaaacctgggagacccagacggccttcctgcagaattacctgcaaaagcgcaacgcctggctgcaggatgcctacgccaaatggagcaaggacgaatacgagccgctgggcagctacgtcgacgtcccggagggcgcctggtatcacgacgccgtcgaaactgttacggcctatggcctgatgagcggccagggcaacggcgtcttttgccccgagggcaagacgacccgggcgcagaccgcccaggtgctctacgccatgtccggcgcagcccgcccggatatcacccagatcttcccggatgtcagcccggcagcgtggtacgccccgtgcgtccagtgggcatacagcaaccaggtcgtctccggctacccggacggcaccttccagccggaccggagcatcacccggcaggatatgatcgcgctgctctaccgcaacgccggttccccggctgtcagcgcccagctggcgggccgcttccgcgacagcgccagcatcagcagctacgcccgcaacgccatggattgggccgttgagaacaagctcatctccggctacaccgatggcacggtcctgcctctgaaccccatcacccgggcagaatttgccaccgtgatgcagcactactacgagctcatgcgctaagcgtaacccccaacgcggggaagcggcaccccttgccgcttccccgcgctttctttatggaagccgaactcgcacagcctgcaacgcaacgccaaaggccccactgcgaaaaccagcggggcctttggcatggattttcgataaaatcaaatacgaatcacagctcgctttgcggcagaacgccgtccttcgggcggcggccaaggatggagtattcgacccactcggcgatatttgtcgcgtggtcggcgatacgctcgagatatttggccaccatcaaaaggtcaatgcagtaagcgcccatggtgttgtccttgctgatgagcgcaatgacctcgtccttgatctggacaaaatactggtcgacgacatcgtcataggcgatgacctccccggccagggtcaggtcccggcggacaaaggcatcgatgctgcggttgaccattttaatggcctccgcggccatctgctccaggtgcagcttgtaatgtaccggcatgtccttgagatagaccgccagctccgcgatatccgatgcctggtcgccgatgcgctccatatcggagatcattttcagcgccgcggaaatatcccgcaggtcgctggccaccggctgctgcttcaaaagcagctgcaggcagagagattcgatctcccgctccagcttgtcgatctcgctatctgtctcctgctcctgggcgataagggcgtcattgcactcgcccagggcccggatggccaggccgatggcctgctggcagagctcgcccatctccaacattgcctcatgcagcttcttgagctgcatcaaatactgttcccgcattatccaaacctcccggaaatatagtcctccgtcttcttctgcgacggcatggtaaagatctgatcggtcgtgccgtattccaccagctcgcccagcaggaagaacgcggttcggtccgaaatacggacggcctgctgcatattatgcgtgaccatgatgacggtatagcgctgcttcagctctgcgatcaggtcctcaatcttggccgtggagatggggtccagcgcgctggtggattcgtccatcagcagaatatccggctccaccgccagagcccgggcaatgcacagccgctgctgctgcccgccggacaggcccagtgcgctggtcttgagtcggtcgcggacctcctcccaaatggctgcgctgcgcagggaacgctcaacgatttcgtccagctccgctctgcggcggatgccgtgggtccgggggccgtaggcgatgttatcataaatgctcatgggaaacggattggccttctggaacaccatgccgatctgcttgcgcagccaggtcacatccgtcgccgcgtgatacaggtccgtatcccggtagcggacctccccctggatgcgtacgccagggacgagatcgttcatccggttgagggtcttcaaaaaggtggatttcccgcagccggaggggccgatgagggccgtgatctggttggccgggatctccagattgatatcctgcagggcatggtggtctccataccacaggttcaggtgctttgcagtgataatggctggcattggttcatgctcccttcttctttttcagcttcttcccggccaggttcgctgcccggttcaggaagaacaccaggatcattaagatcgcggcaatggcaaaggccacgcccgtctcgccccgctcgctggcgtagatatacagggcgaccgtcagtgtcgccgatgaggattgcagcgattccgcgaagctgttcagcacgaggccgaagcccgcggtaaagagcagcgccgccgattcgccgacgatacgcccgatggccaggatgcagccagtgacgatgccgtcgacggcattgggcaggacgaccgtccggatcgtgtgccacttccctgcccccagagccagcgccccttcccggtaggcttgggggacggtctttaggctctcctgggtcgtccggatgatcgtcggcagaatcatgacgaccagcgtcaggccaccggccagaatgccctgctgcaggcccagcagttggatgaaaaacagcataccgaccaggccaaacaggatggacgggatgcccgtcagcgtctccgtcgcaaactcgatgatccgctttaaatgccgattctgggcgtactccgtcagatagatcgccgcgccgacgccgatgggcagcgccaggatcatggccacaaggataatgtacagggtgttaagaatattcggcagaatgccgatgctgtcggtcaaatagctgctctgggttgaaaggagcttccaggagatatgccccaggccgcgccagaaaatatacccgatgagaaacagcagcagcgcacaggtgatgacggcgctgccgtacatcaggccgcgcagcaccccgccgtagagccgccgccgcggtgagcgtctttgcatatcatttctccttccgcttgatgcacacatttaaaatcacattgatgagcataatgaacagaaacagcacaagcccgatggaaaacagggcctgccgctgcaggctgccataggccgcgtaggacatctccgacgcgatggccgtcgtcaggaaccggacggacttcaaaagccccggcatattggcaacgttcccggagaccatgatgatcgccatggcctcgccaatggcccggccgacgcccaggacgatggacgcggcgatgccgctcttggccgccgggagggagacgcggaaatacgtttccgtcttcgtcgcccccagggccagggacgccgcctcatactccggcggcaccgcccgcagcgccgtctccgaaacgctgatgatcgacggcaggatcataatggccagcaccacgaccgccgccagcagacaggcgccggacgagagcccaaacagccgctggatcgtcgggaccagcacgatc

SEQ ID NO: 2131 - DNA, 2990 bp, Unknown
  16S sequences of unknown bacteria
tggcacacgactttgcttgcaaagtgtagtgtgttatacgctctgtcggcgttgccgtaaaaatgccgttgccgccggatcgggcaagggcgttttcatcagcagacggggcgtatatgaaaacctttgtcccttgtcccacgccggactatgggaaaaagtgtcccaaacggatagccacattcacgaaaaggcaggtggatttttctcccaaaattgaaatgggcgggaagccattttaaggctttcccgccttgattacccattagcaaagacgggtgaggctgtcaacggcggcgctgaaagcgcgtttgggtggctttttgtttctgccactcccagcagatagtcgacggtcacgccataaaacttcgccagcttgattagggcatagtggctgatgtccttgaagtcctccgcttcgtaactacccagcgcagatttggagaggtgggtctgttccgcaagctgctccagcgtcagccctcgctccacacgcaggtctttcaatcgttcatgtatggatagttccacgctctcgctccttgtctgctcgataaactggaatgtatcgctctatgaaatcaattcttgagcgcaaaaagacaggcatagatgctttcttcacatccctgtttgcatcttttcaaacatctaaagacaggccagataacagtcccattacttaacttaacggcaatatttatttctccttgtgggtcgctatcatccgtgctccattttccaccatatagtttaatcgccgtttcgccaatatatgaacctaaactaaataaaatcataccgcgattttttgaaagcaaacctatttcggaattctgttcatcaaaaaatctatcaatttcttttatgctttctaaagaataatccgctttatagccggacgaattgagtgcttttgtcacccagtcggaagccaatggaatatcttcttcgagagtatcgttgcttttttcttgttaccattatctttcttcaagattttattgaggaatcccatgttgaccactccaattccgaaatattttcaaaacatattttaaaaagcttttcagcaaaagtaatttcattttccaagtcatctattactcattcagcatcaattaaataatcgaatgaataacttgaaccgacagtgaaatcaccatacggtggtagctttctacacttacacattaaacgtttggcttcaaaacacataaaatgtccctattcctttcaaatccctcgtaaaaccaaaatcaaagcatggtcaagatattcaaagatactacattccttgcaagcgatacagtcacccatgcgctcccgcttcgggagcatccgaaaagcgccctatcttctcttgaatcgccctatatgcttcacattctgcagttcgtatggaataccgtgttctcccgccatcgtcagcgcaaagtccagaaaatctccccatccatcggacagtacatccgagcggaggctgatcgttttctccgctgtccgcaggatcatccgggcgttctttttatcccacagcaggaggatggagcgcagctgtgtccacgggatgtcgtgggctatcccaaagctgaccacccgcagcaaacgccgggaataaaagaccttgcgccaggtcgagtggagaaaagagccgatgcacagcaggtcaagcccaaagagggtcaagagctcctggttcagctcacctctagcccagagggtttgcagcgtctggggttcgtccatagcccacaggtagaaaaacagaccggccatcaccgtgatcgccgccgggagcaggagcagcagataggcgatgggcgagcatttcagcacccggaaatcggtctcccaatcgtcgcgctgctgcttttgccgccagcgtcgccgggagagaaaatcccacagctcgaccgccaaaagcatggggatattcaccgcccccaaaaccagggaatagcgcaggatctcggatatattgtcctgccaccccatgggcaggcagatggcaatgttgatgagattggcgatcagcagaaaactaaggatcacagaaaggacctcggccgttgtggaatgcctgcgccgccctgttgcaggaggttccagaatatcgcccctgcgaatctgcttcgccctgcgtccgcggagtaccagccacacagccttgccgggctcggcggtgcgaacctccagcttcggtgtaaccaggatgctctccacgcgcagcttgatacgcttgccatcggtgcggttcaggcacagataatcgttcaccgatatgctgctgccctccaccacgccctctacggcagtgcaaaatccattcagctttttgaggttatgtaccaccagacgaaacctcgttccgtccatatgactaccaccaccaatctcgatttaccgttctgtttcttccattctaccacaattccgagagcgtggaaatagtgagttttctgggctgatttcctaccttatggatatatgggacgggcggtcatttaggtgtagacttgtcttagtacatcgatgagccgcaccttgaaaacagaatgaccgtccgaaaaggaatatctctcccggagaagcagcgcatttgcgtgccaaaggagaaatacgccgcaggaatgggggtggaaaacttttcggggagaacggcaaaaggaaagcaaaaacggagggaacacatgaaagataacccatataaacgacttccgcccttagagcgcaagccagacggatccttttaccgtatgaccccggcacagaggaaacaggcaaacgccctgatccgccgggagtgctgctaccatgaggaggggaattgtatcgcccttgacgatggggacgcccacacctgcccacagaccatttctttctcggtctgctgcaagtggttccgctggtcggtcttaccacaagccggaacgctggaagcggagattttccgggataaggacttgaaacgctgtgcggtctgc

SEQ ID NO: 2132 - DNA, 2310 bp, Unknown
  16S sequences of unknown bacteria
gtcagcaaagctgcagggatgaattgcgaatgtccgctttactcagtctggaagaaaagaaaaaggagaaaaacgatggataagaataaaatacttggaatggtagaccatacgctgctgaagcaggacgcgacctgggagcagatcagggaaattttggatgatggcatgacgtatcatacggcgtctgcttgcatcccggcttcctatgtaaagcaggcggcagagtatgtacagggcaagcttccgatctgcacggtcatcggatttccgaacggttacagtacgacggcagcgaaggtgttcgaggcagctgatgcagtaaagaacggtgcggatgaggttgacatggtcatcaatatcggctgggtcaaggatgggaaggatgcagagctggaagatgagattcgccagatccatgccgcgtgcaatggacatattctgaaggtgatcattgagacctgtctgctgacggaagaggagaagatccgtatgtgtgaaatcgtgacaagggcaggggcggaatttatcaagacctcgaccggcttctccgctgcaggagcaacctttgacgatgtggcactgatgaggaaacacgtcggagcaaatgtgaagatcaaggcggcagggggtatttcttcctttgatgatgcggaaaaattcattgggcttggtgcatcccgtcttggtacgagccggctggtgaagctgatgaaggcgtaagccggcgtggatgtttgttacggcaataaaacgatattaaggtcaaaagatgccttacggattgttccgtacttcgtactcccacaatcctgcccaatattcgcatatcgtgaagcttgcgctccacttttatgctcatatcggggcgggtcattaagccataaaaccactcctgtgcaagcacatcgtggtttcaggcttttgaccctggcgtcatcatgaataaaaaggaaaggatgagcagtatgaaaaaatataaacgtatctttgtgattgttatggattctctcgggatcggtgcggcggatgatgcggcggcatatggtgatgcaggtacggatacgctcggccatatcgcggagcgcagagagaaatttgttattccgaatcttcagaagatcggtatggcgaatctgcatccattaaagcaggtggctccggtggagcatccgcttggctactatatggaaatgaaggagcgcagtgccgggaaggatacgatgaccgggcactgggagctgatgggtctttacacgcagaagccctttcagacctttaccgagcatggcttcccgcaagggctgatcgatgagctggagaaacgcaccgggcacaaggttatcggaaataaaagtgcgagcggcactgcgattattgatgagcttggggaagaggagattgcgaccgggcatatgatcgtttacacttcggcggattctgtactgcagatttgcgggcaggaggaaacctttgatctgaaagagctttaccgctgctgtgagatcgcaagggagctgacccttcgtgatgaatggaaggtcggccgtgtcattgccagaccatatattggtaagaaaaagggcgaattcaaacgtactgcaaaccgtcatgactatgcgcttaagccatttggcaagacggcgctggatgctctgaaggcaggcggctatgatgtgatttccgtcggtaagatttttgatattttcgacggcgagggcctgaccgagtcgaacaaatctcagagctcagtacatggcatggagcagacgattgatattgcaaagcgtgactttaccggtctttgctttacaaatctggtcgattttgatgcgctctgggggcaccgccgtaatccggaggggtatgctcaggagatcgaaaagtttgacgtgaagtttggtgagctgctgcagcttctgaaggacgatgatctggttatcattacggcagatcacggcaacgatccgacctataccggaaccgaccacacgcgagagaaagtaccgttcctcgcctattcaccgtccatgcagggcagtggcagacttgagacatctgatacctttgcggcagtcggcgcgacgatcgcggacaattttgaggtggcgatgccggaggggacgctcggaacgtctgtattggggcagctgaagtaatctttttgaacgcagataagcattcccctgcttcaagtgcgcggagcactaagcggcgggtgagggggatgcttatgtcagtgggagttgaaagcgcccactgacagatcgcgaagcgactgcgttcatgagcaagtagcgaagcggattg

SEQ ID NO: 2133 - DNA, 8182 bp, Unknown
  16S sequences of unknown bacteria
gtggtacgcgagctgggttcagaacgtcgtgagacagttcggtccctatctgtcatgggcgtaggatatttgaggagagctgttcctagtacgagaggaccgggatggacgcaccgctggcgcaccagttgtcatgccaatggcacagctgggcaactatgtgcggaccggataaacgctgaaagcatctaagcgtgaagccgactccaagataagatatcccatagtgttaaactagtaagaccccttgtagactacgaggtagataggctgcgtgtgtaagcacggtaacgtgttcagcttggcagtactaataggtcgagggcttgaccataatttctttggtttggctctgtaatttcctatctgtttttctttattcagttttcagtgtacaaatgttgtattatgataagatttaagccttctttagaaggctttttttatttttacttattattgtatttatagttattacaaattagttattatgattgactatgaaagcaattttagttaaagtaataatgataaataaatattatttatttaagtttgtaaataaagatattataagcactattatccataatatcttagaaaaggtgattttatgatgaattcaattgaacaactggcccggtataactatagctatgaaggagaggcgataggagctgctattgctattattgtaattgtaatctttctagcaattgcagcaatattggcacaaatctttttaggtttggcagtttatcacgacgcaaaatccaaaggtaattccagctcaggaatgtggggtgttttgacaggtgtctttggatggatacccgctattatttatttatgcgtcagaaacagttcctctcaaagaattattcaatgtactacctgtggctttgcaatcccggcaagcgcgccaggttgtccaaattgtaatcatgcaaatccttttgcccaacagttttacggtccatttgtggaacaatctaaaaaacgagctaaaggtttcttaattgcagctatttgctgttatgcagcacttatcttgttaattattgcaattgtcgttattgttgctatattcgctggtaattattattactattattaatggagccttggaggtaaatgtaagagtacatttaccttttttcatctataatgaaaggattaaacacttatatgttggaagtttctcacttaacaaaaatatataaaaatctggtagcaaacggaaatttaacctttaccgttaatcccggagaaattgcggtcttattaggtccaaatggtgcaggtaaatccactgcaatcaaatgtatttcaggtttactgcgttttcagggagaaattaaaatttgtggttacccaaataaatcaattgatgcaaagcgtaattttgggtacattccggaaattcctgcaccgtatgaaaatttgacggttatggaacatttagaatttattggtcgtgcttatcaagtaagtgattgggaacaaaaagcaaaaatgttattaagccgatttgaaatgtctgataaaacagataaactggggaaagagttatccaaaggtatgcaacaaaaattaagtatctgttgtgcgttgttaccggaacccaaagtagttttatttgatgagccttttgtagggttagatccccatgcaataaaagaattaaaagctgttatgacggaattaagatacgatgaatgtgcagtattaatcagtactcatatgttggatagcgttgaggaattctgggataaagcgctaattatgcgaaacggtcaaatagcagcagtacgagaaagaaaagaaattgagcaaagcggagaagatcttgaaaagttattctttgaaattacggaaggaagaggagaaagtcaatgagtgcattgtgttatctttcccgtaagcagattaagaactttataaaagaattagctcataatccgggaaaactggttctgtatattatcttaattgcgggtatcagtgtatctgtgttttctcgatttttttctccggaggatgaagcattaaactttgttgctgatattagtttcttgcacggtggctacattggagcaatgcttttgattgcgctgccaattttattaagaggtttaaaatcaggcgctactttctttcgtatgagtgatgtgcattttttatttatagcacctatttctccaaaacttatattattttacggtttaattaagcagttaatggccagtgccttggtcactcttattttattggcatattcttctatgctgacgaatttatttggaatagaaatttggcaaattattgttttggcaataggagtcgccatcatgctatgtgcaatgcaggcgcttaccatgatgatttacagtttaacaaacggtaagaagaaactcattcaaattaccttagccattgtatttgcatgcgtgcttgccttacttgctatttatgtcattgagttttttgctaatggtgcagatatcaatagtgctatttcttctttaagctctccttacttagagtatgtgccaatgattggctggatgaagggcgctgtttttggttatctgttcggcaactatctcgcagcaggtatttatactgctctatttatagctgttataggtgcagccattgctatttttgcagtaaaagatttagatttttatgaagatgtacttcagtcaacggcccgagcagaccaagtaagaaaaaataaacgagaaggaaaaatggattttgggggaggaaaggtacgcgttacctctaccggaatcaaaaaaggctggggtgccaatgtgttgttttataaacatatgttggaaggaaaacgaagaaatagatttttcatcagtacccaagcgatttttttgtttttaattaatattatttttgttgttattttccgtatctcagcagaagggcaagtaacaccaaatttaattattggtatttctgcaatgtttagctgttacatacagtttttcttttctgtttccggggattggtctttggaattagataaaacaccaatttatttaattcctgccaatccgtttcaaaaattaatttgggctagcatgactaccattatccgtccttttatggaaggaattattatgtttgctattttatgtgctgtgttgcaagcaaatcctctgctggcttttgtttgtgcaattgtgtacggtacaacaggtctgctatatacagcatgcaatatcttatttcagaaattatttggaaaaacaaattctaatcgcggaccaatcatgtttatttatatgctatgtgtactattggtagctactcccggtattatttccagtattcttgtatggatttttgctacaggagttccctcttttgtaatagggcttccgtttatcggttggaccgtaggtgtttctgttctgattatatgcttgtgcagaaatatactagacaatgtagaatataataaataaaaatacaaaatattgtaatttaggtggattccctgttgaaatttttatatatctgtgatataataataccaatgaataaaatagttggtgttgattacaatgagggtccacctgttcccataccgaacacagaagttaagctcattagtgccgaagatacttggctggagacggcccgggacaataggaagatgccaacacatgaaagcaggtacccaatagggtatctgttttttatttattttgaaaaatatgatataaaaacataaaaaaagcttgcattttcttttaagatgtgataatatataaaagtcgccggaaacgggacaaactgaatagttggtgttgattacgatgagggtccacctgttcccataccgaacacagaagttaagctcattagtgccgaagatacttggctggagacggcccgggacaataggaagatgccaacatataaagcagatacccagtagggtatctgttttttttgtttttatgtgaagaaattaaacaaaatgtaatttttctttttttagactactattatcgtgaggataacaatgtcaaaaaggagagaaatgacatgaagaatgttgtaaaaagatttgaacaatatttaatggaggaagaaaaaagcaaaggtacaatcgaaaattatatcaggtctgtacatatgtttataaaatggataggggtaaaagaacatatttcacgccaggcagtcattgaatggaaaaactatctgcaaacgaaaggatattgcacggttactgtcaacgcgaagatagccgcattgaatcaatttttatcttttatgggtcgaaatgattgcagagtaaaattactaaaagtacagcatcgtgtatttcgggatcattctaaggaattaaacaagaatgagtacaaaaaattaattgatacagccgaaagtaaagcaaagcatcgtctttcactattaattcagacaatttgtgctacgggaatccgtgtttcggaagtaaaatatatcacagtcgcagctgctcaggcaggtaagacagaaattatattaaagggaaaggtacgtaccatcttattaccggggaaattatgccgtaaattaattcaatatgccaaaaaacaaaaaatcgcttccggtgaaatctttatcaccagaagcggtattggattgtcacgtaaacaaatatggtcggagatgaaaaccctttgtgttcaggccggtatagaggctacgaaagtttttccacacaatctaagacatttatttgctcgttgttactatcaagtatgtcatgatattgtaaaattggcagatatactcggacattcccatatagagactaccagaatctatttactttctacaggtacagaacaccaatatcaccttgaacgtttgcggcttgtaagctaaacggtttttattttccgaaaaaggacaaaaactgtattttgtccttaaattgtgtaaaacataaccacaaaggtcatatatcttcctatactatacacaataacagtcgtaatttcaagtttttaaattaattttttatattttttaaaaaaggctgaatgcaattttatattgtttcagtcttctctttatgcttttttaagataacagggaaaagagactttatattatatgattctaaggacaaaatacagtttttgtctaaaaggaatggaggtatctgaatcagaattcaatcggttgctgcattcacagttctgcaaaagtaatctgataaataaagcggtatctttcgagtggaaaacgtaaaatgtatacgtttatagtatttgtgcatcaaaaattttcaatagatatagggaggtaagaagaaaaatgaagaaatatttgaaaggcaaaaatgtactggcggcaatactatgtgcaactttgatgttaggtattgtcccatttactgtatttgctgcgaacacagatgagaatctttatacaaaaaatcaaatatcaacatcggttcaatacctaaatcaggaacgtacacaggccgaaattacatatagtgtaccaatagagccacaggaccctgtgaatgtaatttttttggtggatgcatctaaaaccggtgagaattctaaaaatgaagttgttgaactgattatgggtcatggtgacggcgttaatttaatgtataaatacggtacaaaaaataatgtcaatatcatttcctatgcaagtgatgttcaagaaaccggtttcatcaactcaaaggaagaattacaaaagtattccagcattgaaacaatgttaggagaagcaaacgaagcggttgcacttgaaaaggctgcttcagcagtgcagcaggcacatgaaatgaatggaaatcctacagtagttgtatgggcattgggaagcagttttaacaaagaagctgaagtggacgaacaattaaaggcattgaaccaagtattgagtgaaaatgatgcgtttatcacttatcaaatgacggatactccaagtgctactctccaaaattatgcaacaaagtttattcctgcaggagaaacagatgaaatttcggcagcatatgcttatacaacgggaagcgattatgagtggggtatgctgaatgaccttgaagccattgttcatgaccattatcaaaatgctgactttacattaaatttggcggatggccaaacaatgattacaagtattgatgaagtaaatgcgaaagcattaattttagggcagcgttggacaggttatgttgcggctgagataactgagaatggaaaaggcgttcaagtacatatggacaaattatgtagcggagatacgttattaattactgcaaaagtaacgttagacccaaatacagcaggtcctgaaacagtattcgagggacaagatattttgcttaaaaacagtatgtatgctgggttgtttgacgaaaagacaaatgatatcacacttcactttccggcggtagaattaaacaaaggagaacgaatgattacttatcgcttgggagatgatggaacagtatccggaagtgcgccgggaatacaaacagcggcttcgggcgaacctgttaccattgcttccgcagatggaatcagtaaaacaggctatacctttggtggctggattgttgcagagggagagcatgtaggagagcgttatgcagccaacgaagcaattgccatgccggattatgatttagtactggaacctgcgtggggatatgttggtgttgaagtggaagtaggccaggcagttgcccctgtcactcaaaatcaaattatggagataccgggtcaaatgcaggcgttggattttagccaaatatttgtaaatgacactaaaatcggtaatacagtacataccattacctttttagatgaattgttggagtatgtggaagacccaacaccaacggattcaaataaggtgattgtaaagggcagatctgaaattgtatacgcacgtaatataggtgctccaggaaacagtgtaattgcatatattgtagcggatcatcagaatggttatgatatgtatatcagtgcggaaggcggtgtaaaggcttcttccagatgcttaagtttatttgcagcatttgaccctgtttcccaaaaatatgtgctggatggctggaaccaaaatttacatactgtagattttaacaatcaatttgatacatctacggctacagaattgggaatgctattttacaattgtaccagtttaaaagaagtgaaaggcattgaaaatctagatgtttccaatgtcaccgtactacaaagcctattttatggatgttcctctttagtaagtatggatttaagcgcatgggatacttccagcgtaaccaatgccagctatctgtttgcaaattgtaccagtttgcaggatgtacagttgcattgggatcaaacagatactcaaaattttatcaccatacaaaatatgttccaaaaatgtaaaagtctggtttcgatggaagattccggcgtggaagattgggtactgccaaatgttactgaggcacgttctttcttctggcaatgtacaaatttgcaaacggttgatttatctaaatggaatccccaaaacattgtaaatctgcaatttttcttttatgagtgtcataacctccaaagttttcgtatggaaggttggaatgttccaactttaaaatcactgcagcaaacttttgcaaattgctatcagctagaggttatcgatttaagcagttggagcaatattaattctcttgatgatttatatgccgctttctctagttgttctaatttaaaaactttaaaaattcccaacataaaatcaggctataaagatatgtttttctggtgtacttttgactatttggacagtttgcagtacatggatatttcaggatgggtattagatggttcaaattcagttagcaccagcgagatatggggaaacagctggccatcgggtcaagtaaccattattgcagacaattgggaagtaactgcagatgatattttgacagatgcagaaaatctgaatttaatttggaatataggaacgaagagtttctccgctaattattggaatttaaataatacaagacaagacctatctgcagcaagtgattggttaatttcgaatattaccgaactaaaaggctggagcggattaagcggagtaacaagcatggaaggga

SEQ ID NO: 2134 - DNA, 12663 bp, Unknown
  16S sequences of unknown bacteria
aaaccggagacatgaatgggataaaaattatatcccgccgccggcacaagccgagattccataccggtctcgttacccacaaaatttataaccgcgtcggggtttcttgattttatataccccgcgacggcaatggcgggatttatgtgaccgccggtgcctccgcaggcaaaaagaatattcattttgattccacccttttcttgaccgagctttgccgtgagattgaaagcagcacacccatttgcgcaagcagcatgagcagcgccgttccgccgtagctgaaaaacggaaggcttatgccggtgttgggaattgtgtcggtgacaacaaggacgttgagcgccgcctgaagtcccacctggaaggttatgcccagagcaaggagaccgccgaaacggtcgggagcgcggcgggcaatggttattcccctccacacaagtacgcaaaaggcggcaagtattgcaacggcgccgataagcccgagttcttcgcacacaatggaaaagataaaatcgttgtgcggttcgggaacccacaggtatttctgtcttgactgaccgatacctcttccccaaaggccacccgagccgatagcatatatcgactgaatggtctgaaagccgtcgccctgagggtccgaccagggattaaaccaaacattgatacggtcggaagcatatgaaacaatgccggtagcaacgacgaggataaaacctccaacggcaacaccgccgccgagagccagccaacgaagtcttattccgcccacgatcataagaacggcgccgatgaaaaagacaagtacggtggccgaaaggtgcggctcctttattaaaagaacgcacacaaggccgagcaaaataacaaagggaagaattccttctttaaaggttttcattttttcctttttttgagcgataagataggaaaaaaggagtataacggcaaatttcgcaatttccgagggctgaaaattgaaggagccgaagcttatccagcgcttgacccccaaatcggcattcatgggaggtaaaatcagcactaccacaagcagcgccaccgatatgccgtaaacaatccacggcaagtggaatttcttaagccatctgtaatcaatgaaggaaattattatcataatcgccacgccgagcacggcaaacatggcctgatttgttataaatttatagctgttgccgttgtaataataatatgcataggcgtagcttgccgaaaagagcataacgagacccaccgtcagcagcagcataaccatgccgaaaaatgtcatgtccattttccctcttgaggtaatgtccttttttgactttttttcggcaacaacattatttatttgttgactctccggtgaaatcataagctcctcctaaaaagctacattccgaaatacacaagcaaaaacgctccgagacagcccaaaaaggtgacggccgaaaagacaagcacaatcttgttttcgctccagccgctcatttcaaagtggtggtgaatgggtgtcattttaaatatgcgtttttttgtctttttgaaatatgtaacctgaataatgaccgaaagcgcttcaaacagatagagaattcccgcaagaatgagaacgattgggtatcccgttccgaaagcaagcgccaccacaagacctccgaggaaaagcgagccggtatcgcccataaagaccttggcgggctttaaattccagcaaagaaaaccgcagcagcctccggcggcggcacaggcaagaacagaaagcgccctgttttgaagtattcccgaaattatcatgaaacataccgaaacaaccatggtaaccgagcttgccagcccgtctattccgtcggtcagattaacggcattgacaaatccgtatatgaaaagcagggcaatcggccaatatataagtcccgcgccgtgagaaacatccaccgtacccaaaaaaggtattttcgtgaaggtgtctcccgaaagggcaagacaagaaagatatgccgcagccacaagaagctgaagcagggttttttgcctcggggtaagaccgagattgcgttttttaacaaccttgatataatcgtcgataaatccgataaaaccgaaagacagcgccattaccgcgcctgcaatcatgcggacggtgaaaattctgtgctgaggggtcgtggaggtcagctgggcataaagaccgctgtcgccgcccacggcaagtgcaagagtaagcgtcagcacaattgacagcacaattccgattataaacattataccgcccattgtgggtgtgccctgctttgacttgtgccagttcgggccgatgtcaagaattgtctgaccgaatttaagcttgtgcagaaagggaacgattataaagcccaaaagagccgttgcaagaaaagccgttcccgccgcaacaatcgaatatactgtatccatttttcaacatccaatcaaagttttttaagcgtgtcggccacaatctcccgttcgtcgagatgaattgttttgtccttaaggacctgatatgtctcatggccttttcccgcaagaagaatcatgtctccgggctgcgcagtcaaaattgcgtgttcaacggcctttgcgcggtcggcaatggcctcgacgggcaccttgctgtccttcatgccttcgagaacgtcctttataatttcgtccgggtcctccgaacggggattatccgaggtcacaataaccttgtcggaattttcctcggcaagctttcccataatggggcgtttggtcttgtcgcgatcgcctccgcagccgaaaacggtcacaagacggcctttttttacctcgtttaaggtttccattatgtttagcagcccgtcgggagtgtgggcatagtcgataacgacggtaaaatcgcggtttgtgggaacgacctccgcgcgtcccttgaccttgggtccgagacaaagcgcgtcggtcacgcctgcaaaaggaagtcccagcgccacggcacaggttccggccgcaagagcattgtaaaccgaaaattcaccgggggttttaaatcttacccttccgataacgccgtcgcccttcatttcaaaatccactccgtcgaccctgtggcagatgttttgagccttgaaggtagtgttggcgcatttcaccgaataggtgtaaacgtcgcagtcgcaggcttcgataatgtcctcggcatatttatcgtcggcattgacaacagccttttcgcaaagactgaatatgcgtttcttgacattcagataattttccattgttttatgatagtcaagatgatcctgagtcagatttgtgaaaacacaggccgcataggtaaggccgtagactcttttcatgtcaatggcgtgggaggaaacctccatgacaacataatcacagtcggccgaaagcataagagaaaaaagagaatgaagctcataagggtcgggggtcgtgtttttggcgggcagcgtctcgtcgcctatcatgttctgaacggttccaataaggccgaccttgtgcccgaaatgctccaaaatggatttaagaacggtacaggtggtggttttgccgtttgttccggtcacaccgacgattttaagcttttttgcgggatttccgaaaaaggcggcgcacataagcgcataggcctttcttgtatcgtccacaacaagctggttttcaagacccacatcgtgttcgcagataacaaccgcggctccgttttgtgcggcggtctttgcaaatttgtgtccgtcggcagtcacgccgtttatacagacaaaggcgtcccccttatcaacctttcgggaatccttttttacatttgaaatttcaatatcggcaaattcagtatttgcggcctcagccaaaagttctttgagtttcataaaaatctcctaccctttaccttattctaccgtgtcggaatagcggaaatacaccgttataaccgaaccgtattcaacagatgcgcctgcgtcaacgctttgtttatagcacagggcgccgctttgtttgtcatcctttattccgtagaaattcaccgtcaaacctgcgttttcggccgcatccttggtttgcgacggagacattccgttaaaagcgggaaccgtaacgctgcttcccgtgtcatcctcggtggtgtagagcacaacacttcctccggcaggtgtatttgaccccgcatacggcgtttgacggagcacgttttccccgtcgccctttacggtcgccgaaagtccgacggccgaaagcgcgtttcttgcctgttccaccgtcattcccgcaacattgggaacggttttggttatggcttcatattccgaatcggagtatttggcctccacgccgagataagggagaatgtcgcccattatggacgccgcaacgggagccgaaacgacacttccgtagtatgctccggcacggggctcatccacaatgacgattatcgcatattccgggtcgtcggcaggcgcaaatccgcagaaggatgcgacataaagcatggtccccgattcgtccaccttgtcgattttttgagaagtaccggtttttccgcacatacggtatcccgccacataggcatttttacccgagccgttttccacgaccgaatttagacattgactgattatctgagaggtctctgtggaaataacctgacgctgtttctcggtttcaaagctttttacgacgtttccgttgctgtcgagaatttccttgacaatgtggggcttaacgtaatatcctccgtttgcaacggcggcaacggcggttatcatctgcatgggggtaattctgaaggtctgaccgaatgactcggacgcaagctcgacagggcccattttgtcggcggtatagtaaacgccggtggtctctccggggaggtctattcccgttttctgagtgaatccgaaggccttgaaataattgtagaaaagcgtcgaaccgagcctctgtcctatctcgataaaggccgggttgcaggagttttcgaaaatatttataaaggtctgcgctccgtggccggaaagctgatgacagttatatctcgttccggcaataacaatatatccgggacaattgaaggacgagctcatggtcgcctttttttcctccaccgccgccgagccggttattattttgaaaaccgaaccgggctcatatgtatcggtgatggccttgtttttccattgagcctccaaaagctcggtgcgctttgccgaaatttccttttggtcggccgaggacgcggtaagatcgtcgatggtttttttatcggtatcgctgtaaagagtgaagggttcgttggggtcaaaatccggctttgtggccattcccacgatttctcccgttttgacgttcatcaccacagcacagccacgattggttgcgctgttggccgtaaccgcctcgtcaagatatttctcgcagatatgctgaacatactcgtctatggtgagcttaatcgaaccgcccggcgtggcctcaaccatggtctcatagttaaaaggcatatctccgccctgagcatttttggacgcaacaagcttgccgggaactccctcaagctcggaatcatattgatactctattcccgaaagcccctgattgtcgtcgcccacaaaaccgaggacggtggaggccatgctgccgttaggataatatcttttggttgaggactcaagaccgactatcgaaccgaccttgttttcggtgacaaattccctgaccttgtcggcctcgggctgttcgattttggacttcaccttttcataagccgtgttcttttgggtctgttcatagaccgaatcggcgtcaagctccaaaatctcggcaagcccgtcggcaacgagacgggctttttctgtatcgttatcaaaatttttcggaacaatatagaccgtccaaacggtggcgcttgtggcaagcaccttgccgttgcagtcgtaaatatcccctctttcagccttgagggtcacggttttaagctgctgatcggcggcctcggtggaatatttttttccgtgaatgaccattatgttaaaaaggctgaccccgcaaacacccaccaagattatcgaaagggcaactgcaacggctatcatgcggttgcacatctgctttgtgggactttttcttgccatgctcggtcactccttttttcatataataaagctatgggcgaaccgaacgttcgccctttcattttacactaaagtgttctacaagtcaatttatgttcgaaagttactttttataacctgtcaaaacagatcggctattttttgaaatatatttttgttttcctccggaacctcgaccgaatcctcgtcggtgacacttatgtatcccgtctgacccgccgaggccttttgcataccgttttcctcggcgaccttttcgatgttattaaaggaaacaatggaattcagctcaacattaagacggctttcctcttgcttaagagaggttatgctctcgttggttttatgaagctcgaaagacagctcggaattttttatctgaccgtgtatctgaacaattatgagcgccataataacggcgacaacggcagcggccttgagtcggtttttcagcttgagcgcagcctcttctctcgcccttcttttctgaccgggaattcttacgaccttcgcctgcggttttttcggcgcaaatctttcaaaatcataagcggtgctgtcgtaaaacctgctcaaccctgtttccttctttcttttaatttatacgtctgagcgctctcagttttgcacttctcgagcggggattttgttcaagctcgccgtcgtcggcggttttgggagaacggaaaacaagttctccgaaaggcacctttccgcacacgcaaaccgggaaatccggcggacaggtgcagcccttgcaaagctcggcaaattttcttttaaccattctgtcctccagcgagtggaaggtgatgaccgcaagaatgccgccttttttaagcgatgcggcggctccgtcaagtccctttgacagattgtcaagctcgccgttgacggcgatacgcagagcctgaaagctctgtctcgcggggtgtcccttgcgttttgcctttgcgggaacggccgaggaaataatttcggaaagccgacccgtggtcagaatcggggatttttccctttctctcacaatggccgaggcgatgtttctggcgaatttctcttcgccgtattcaaataatatctttgatatttcgtccgccgaaagattgtttacgagatctgcggcggttgttcccgatttgctcattctcatgtcgagaggggcgtcgttgtgaaaagaaaaacctctctcgggggagtcgagctgaaaggacgaaactccgatgtcgagaagaattccgtcgacaaaatcaacgccttctttgtcgagaatttcccgaatgtcggaaaaattaccctcgacaaccttcgcacaggcgtaaggcgcaagccgctttgacgcagcggcaagagcgtcggggtcgcggtcgattgaaatgagccgtcccccgtcaaggcgttttgctatctgttcgctgtgacctccgccgccggcggttccgtcaacataaattccgtctttttttatttcaagggcttctatcgtctgctcaagcagcacgggtatatgagaaaattccatatttttgccccttaaatgtagttgatttgttcaagcagctcgcgaatatcgtcgtcggaaatgctttgctgagcctcgtcccacttggagggctcccaaatttcggcatggtttgacgcgccgataaccacggcctgcttgccgataccggctcttttgcgtagctcggcggggatgattaccctcccctgaacatccggctcgacctcaaaagaataggcgttgaaaaagcgcgaaagcttttcggcggcggtaaaggaaagggtgcttcttatggcggtgttaaacttttcccattcgggttgagaaaaaatatagagacagctgtcgagaccgaccgtgacgaaaaacacatcgccgagctcgctgcggaatttagcgggaatggccatgcggccctttgtatccaccgaatgacggtaaattccgttgaacaaatctctctcccctttcctcaaagcttaacaaaatgaaaaatcagaacgaatgatcggtaacaaaagagcggatttttgaagattattcacctcaaatccacacttttaatcacaaatcacctctttgacaccattatatactttataaagtaaaaaagcaagtattttttataaaaaaaggccgtgcaaattgaaatttttgaaaatttcgatttgtcgactcaaatttaatttttttacgaaaaacaaaaagctaaaaagccgcgaaaaaaggaaaactgcgccccgatttctcgggacgcagtttattgttataatttgattaacaaattattatgcttcttttacgaaggggagagaaaccttgttaaccgaagcctggagaattgcaagagcatcggcaacggtgattccggcctcgccgtcaacatcggcattcttgagaacagagtcagcaagagtgatctttccgacagagtgctgaagaaccatgagagcgtcggtaacggtaacttcgccgtcgccgtcgacatcaccgtaaacggtgggatcctcgggctgccaagcgcggagctcttcgagcttagtcttggctgcgtcggaaatgaggctcttctgagcatcggagagagcgtcgaactgaacgcctaccaaggtaacatcggcaaccttttcggcagtcatgtcggcaagctcgggaagtgcgttgatagcatcttcaacagactttgcgacaacctgatcgttttcgagctcggcaatcttgctttcgacagcctcaagcttggatgtgtcgagtttggcgagctgagcctcggtcagagcattcacagactctctgatagcggcaacagcagccttaacatcggcgatgttctcatagttgattgcatcgggatcggtgagttcctcaattgcctttctaataggatcgaggacgattatatcatcgagatcctcaacagccttagcaagttttgcctgcatatcggcagggatgactttcttcttggcgtcggtcagagcgtcgaaagcagccttagcggcctcaacggcgtctttgttttcaagagcgatggtctcggggagagcagcgatcttgtcataagcgtccttaacatcggcattggccgggtcaagcattgcgaaatcaaagacagccttatcgagagtggcggaagcagccatgttctcgtcggtggcaacgttgatccacttgttgagttcttcgcgggcagccttggccttttcgatagcggcaccggaatcggcggtaacttcaccgatggcggcaacggcttcctggaagtccttctcggcaaaagcacgggcggtagcataaccttcacttacgatagcaatgttcttaagagtgaaggtaccttcgtatctctggagaatatggaggaggttaacagcagagagatcgtaggtgggagtaccggcctgaatgaaggacttaccgatgtcggacatgagaacggaagctctctgccacttgtttccaacgaggttgatctcgctggggaactgccactcgaggttgttgaactcattaccgtgggtaatgttccaaacgttatccttgtcgggatttacgagaacctcgaactgatagtaatcattgtagttgaaggtgtgggtgtattcttcttcaccgaagaaacggcctacacggacataaacggcattgtagccttccttgttgggataggaagcgctgccgacggtgatgttcatccaaagagcgccgtccttggtcgcgtgatcatttccgcagaagtcaaagacatcttcggtatcctgtacgcaggtgcagagagtctcgtacttaacaacgatgatcttgtcaagtcttgccttaatggcatagagtctctgaatgtcggcgttgtacttatctctgatgatagcaacctgagcggaggtgagagtgggaatgcggtcaaagactgccatgatagcatcctcatcctcggctctaacgtcgtcaacatcgggaagagctctgatggaatcgacaaaatcggcggcaatagcctcatcgccgaaatcatcctgaatcttcttcataagagcggcaagcttgtcggcgttggaaacgcgggctttctgctcctcggtgagggcctcataggttctgtttacagcgtaaaccttggaaatatcggtggtctggagatcgtcaacagagggaagggcgtcgatagcttcaacaacctcgtatgcatgatcaacaacaccgtatacatagctccaataggggccgcctgcctcgtcttcgagaaggttaacatcgccggcgtcaacagccttggcagcgttgtcatagtaatcgaggagagtgtctccgtcatagatttccatgccgtagaaggtaactgcggcattgtggagctcgccggctttaccgccgtagatgaatacgggcttgtaatcggcattgagggttgcggtgaactgtgcagtaagagtcttgtaagtatatccatacttagcgtcggtctcctcggggagagcgttatagtcactgagcatgaattttgtactctgatcatcgccgtcggtgaacatctgaagtttcgcgatgtagcgagaatcggtttcgccggggacagccttgatcttggctttcagggtgtaggtcttgccttcgtcagcggcaaagacataaccgtcgccatagtagctggtatacatccaatcggtcttgataccgattttctctgccttggacatgagctcgtcgatagcagccttagcagcgttgagcttggcaacgttggaaacgtcggcctgagcagcggggctgagggcatcgaaagcagccttggcggcgttaacggcgtcggcgtcttcgagagttacattctcggggagagcgtcgatagcatcgataacagcctgagtggcctcgtcaacaggccaggattctttgatagctttaagagcatggaaataagtgctctgtccgccgggacggccgacaaataccataccggtaaccttagaagcatcaaacttctcaccggcagcagcatagtcgattgcaaaagtattttcaccggcaacaacatcaccggtaactaccaacggagcaccgtaaactgtatatgcctcggaatcggaaatcttatcaacaacagaaaggtctccggtgtaagaagtcagaaccatgccatagtcggaagcaacctgaccttctgcaagatcacggctgaaaacggtttcaaagggagaatctccgccaaattcagcctcttgagcggaaccggtccaatcaatgaacacattttcgcacccgagaaggttcttaacctccgcaaacttaacgcgggcacggagaggccaccaaatatttacggcttcattctgccatgcgcagctgtctgccgctttccagttggcaacagatgcctcggtgcactcgtcaagaacaacttcgctcttggtcttgaaagcgttaactgctgcaacaacagcggtcagcttgtcggcgttggtaacctcggccttctgagcgtcggtgagagcattataagcgtcttcggcctcgaagattgcatatctgtcggcagcgacaactgcgtcggcctcggggagggcggcgatagcgtcgataacggccttgacagcggcatcttctttggtctccacgttggcaacaacgttatcgagccactgctcgtgatctccgctatagttgctgcaaccccagaaatagaagccggtaacgttggtgatgtcaaagttttcgcccacagcggtgggagtggtggtgatggttacgaaggactgatcatccttgccgtagccggtgcggatagcgtcaacgtcgaaagccataaccttggaggtgtcaacctcgttgagttcgtaatatctgtctcctctttcagcgtttatagcatagtctccgctgaagagatagaaagcaacatccgaggggccggaaagagcctcggcggtgttggcagcgaaatcgaaggagacagacttaagaccggtcaggtcaagacctgcgacaggtccgccctggcagaagccgccgccctggaaggtgtggattgctccggtaccttcggtcttcttgtcagtagtgagttcaagactgtcaccgggatagggtgcccaaccgtctgcgctgtcacagttgttcagcataacagtcttggtggtgacaggctcggcatagtaaacttcgtcaacggtgagaacctgacgaacagcgtccataccgtcgagtattgtgttagccttcaaatcgggacaaaatgctctgccaagtgcatcttcaacaataccgtcctgaacagcagcatcagcgaactcgcgaacgataccggcaagctcgcctctaccggcagctgcatactcctcggcaggagtggtaccgccgataagggggaacttggtcgcgaaatagagatgtccgttctcatcataaccccaagtgtttaagccccagtttccgtcaactctctcgtgagggttctcggaagtggccgggataattccccactgagcctcgtagccgtagctgccgagatcaacgggg

SEQ ID NO: 2135 - DNA, 3195 bp, Unknown
  16S sequences of unknown bacteria
cgacgtatggcagctcggcccgtttacgttaacggatccatatcgcacggtggtcgacatcgctcgaacgagcgcttttcgatatgcactaggctatgtcgacgggttggctcgtgagtacggtgtcgagcgtgaagaattgcgtgcatatgcacaaaggaactgccgcggactgcacggcatcgcgcgcgcatttgacgtttttgaacacatggatggcagatcggataacggtggagaatccgaagcacgggcggcaatgattctggcgggagttgccgctcccgaacttcaggttgaaatcactcgaccgggaaacgccggctattatttggcagattacggctggcagatgccaaacggctcttggatgctggctgagctgcatggactaggcaagtttgaggacgatgcccaaaatgatccggaacatactgcggcaaaaacctatcgagctgccctcatgcgcgacacgaacctgcgtgccatgggccacaacgtcattcatttcaagctctcagacacctacgatgtcaaagcgttcggctccatgatgcgcggctacggtataccaaccacaaaaccctacgcagactcctgaccggctgtcctcatcttctcgacaacagaacccatcatcgacccagcccgctcggcctcaataagttgcggtgaaatagttcctggataacagcttttggggggtgcggacagaaagttggaccgcggggcggtccggactggaggttcgcatgtacagcagggagaaggtcgagctcttcctcctggcgacggaggacggcatggggcccaccgccgccgcgaagttcgtgggggtctcggtgggcgcggccaagaagtgggcgacggggcacctcccgcacagctacaccggggcgcgctgtagaatcggtgcgaggaaaccgcgccggaaggaggccagcttgggccccgacaagtcgatctacgccccgcccgcgaccggcccgctcgccgggctcaacgaggaccagatagagaacctgctgctcagggcggtgttggccgacctaaaagcggaagggtgggacccggcttcgatctcgaacaggagcaagtgcgagctcggcgagagattgaggctggcgaccgccctgcccctccgctcgatcacaggtttcttgaggatatcgaagagctcctatgagtactggaggccccgcgtcgccgcgccgcgcgaccgcgacgccgacatacgcgaccgcgtggtgcgcatcttccgcgagggctcggggtgctgggggtaccgcaccgtctgggcgcgcctgcgccgcgagggcgtccgcgccagcgagaagcgcgtggcccgcgtgatgcgcgaggagggcctcgaggtcgtctacaacaagaggcgcgcccggggctacagctcctacgccggcgaggtctccaaggcgccggagaacctcgtgaacaggaatttccacgccgacgagcccaaccggctgtggctcaccgacatcaccgagttcaggctcccgggcggcgagaaggtctacctgagcccggtcatcgactgcttcgacgggatgcccgtcgcctggtcgatcgggctgcaccccgacaagcgcctcgcgaactcgagcctgctcaaggcctgcgcggcgaggccggcgggcgggcgcacgacgatccactcggaccggggtggccactaccgctggccggagtggattgggatctgcgaggagaacggcctggtcaggagcatgtccgcgaagggctgcagcccggacaactcggcctgcgagggcttcttcgggcgcctcaagaacgagttcttccgctacagggactgggagggcgtgacggccgaggagttcatggggaggctcgaggcctacctcgtgtactatcgggatgggcgcatcaagaagtccctcgagtggctgagcccgatggagtaccgcaggaagcttggatacgcctaggcgcggtccaagaaatcgtccgcaccccccttggccatcaaatggcccattctaggaactattccaccgcaacttagattgggaaaccgcgaaaccttaaagctctaattcattcaaacggaggatcgcaacaatgtagatcttgagcgcctgcttgagctgttcctcgttggcgcactcgttgggaccgtgcatctggccgccccatgcgggcagctccagaccggtctcctcggggccaaacgacacggcgcgggcaaagttgcgcgcgtacgtaccgccgcccatggcaaagggctcagcatgcttgcccgtaaactcgttataggtatcaataagcgccttcacggccggatcgtcggcagacaccgagaacggcaccttcgcgcgacccagctggcacgtcacgccaaaacggcccacgagcgggtcgagctgctcgcggatagtatcggcactcgtgctgtcggggaaacgcacgtcgatgacctgctcaatatggccatccgccacgcggatgacgccagcgttgcaggtaagcgggccaaacgccgggctcgtcgcgtcgatacccaggccgcgaccataggcgtccgcatgcacaaaggccaaaaacttgacaaactcgtgctcggcaggcgtcagcaggcgctcgccacgggcaccaaacgcgtcctcggcctcgcgcagatacgacacgatcaggccgacggcattgatcgtcccctcgggcatcgaggcgtgaccgccaataccgtgggcgaaaatctgcacatgaccattgtcgagagccgtgatctccaggcggtcagcattctcgaccggcgccggcagctcatcggcggcaatcgcgagctcgcagatggactgcgacggaatggcattgctcgcctcggcgccgctccacgacacgatgcgcccgccgtcgatcttgggactcacgaacgtcgccccaaactggcccttctcggcattgcagaccgggaactcggcatcgggcgtaaacaaaaagtcggggtctgcgtggttctccagataatggtgaacgtcggacatgcccacttcctcatcgcagcccagcagcgcgcggaaggtgtagcgcggaacaatgccgtgcttgagcaggtacgcgccggcataaagcgacagcactgccgggcccttgtcgtcgatcacgccgcgaccgagcaaccagccctcgcgacgctccatcgcgaacggatcc

SEQ ID NO: 2136 - DNA, 32759 bp, Unknown
  16S sequences of unknown bacteria
aacttgaggagccagagtaagaagagagtagtattctactctcttcttttttattctctcaattagtttttttatgtgtttactcacaatttaaaacgttttggataacaaatcatcaaatttgaaatagtctgtaatgtaatataacaatcaaaatttaatcttggaagtcagtgttattaactatcatagtactaaagtaccatatctctattcatgattaaacattctatttatggaaaaggaggaaagaatatcttttgtagagattaaagtagataaaatatgttccgaattttcctcaaatattgcttttataattttatgcacagttgcaactgccaggaattcagacatttcgtctcttcgttttttttcataaatatttttatcattaagatattttaggataatgcatttcatctgttgttcccatttttccaaaaattcaggatccccatttttatttaataacatccgaatcacaaattgtctgcgtttgatatattgagccagctgttcaagaagctgcaaatcagaaaaagaaaacataacgagaggttctttttttaaagtggacatttcaaataatacgtcattggttatctgctgccacacttctgttaaattggtgtagtaattataaaaagtagcacgagatattctggtgaattcaattaattgttttactgtaattttttcaattggtgctgttttacataataaaatgagtgattgtttaattttatgtgtagtagataataattccaaaaaaatactcccttattgttgagatagtttaaacataatatattcaaaataatatgtcaatgcaataacagttattgataaaaactaatcaataactgttatatttttttacctaaaattagataaagtaaatttttaaactctgagaatgttatcttgtttaagtttcatatttacaaaatacatttcattgtaaacgtttattaaataaaatttatcaagtagtatgttttttgtacaagttgattgacttaaatgaattgttctgtttataatttggtagacaaaaattagaaagtgtctattctgtgtttgttgatgcaaaatgataaagaggaagctatcaattattttttaatttttaaatttatcctgacaaatgtaggtgatgatgtatttgttgaatgtaaaaaatatttcaaaatcttttggctccaaacaagtattgcatgaagtgaatttaaaagttacttctggagaattatttggtctgcttggagcaaatggtgcgggaaaaaccaccttaatccgtttaatttctacattgttgttacctaccaaaggagaaatagaattagatggacaacggctttcacgagcgaaaatcgatttgaaaagtcaaattactacagtaacacaagaatattctctaagaaatgatatgacagtgttagaagtaatggaattgcaagggcgactttatcatatggaatccaaactgcgtaaacaaggcagcgaaacattgctgaaaaaatgtgggttatgggaatatcgcaatcaaaatacccgtcaattatcaggtggatataaacgcatgttaatgctctgcagagcactattaccaaatcctaaaattgttttacttgatgaaccaacagttggcttagacccatttgctcgaagaatgatgtggcaaatgattcgagatttacatcatcagggacttacatttattttaacaacccattacatggaagaagcgcaaatgctttgtcacagggtagcgtttatgagaaagggatgtgtgttgggggtgaaaacccctgaagactggattttacaacttggacgttttgcagtagatcattttgaaaatgaaaccgttaaaacttattatttcaattgtaagaaagaggcaatcacctatactgaacatttatcttcagattttttgcttcgtgagacaaatttagaagatgtgtttttggaaacagtaggaaaggggattccgaagaagaatggcaattttaactgttatttgggaaaaatggattgaatttaaacatgaatggattaaaatcaccatctcttctttaattactcctttactatatttaattacatttggattaggaattggaaattttattactacaggagacagaccgtatcttcaatttttaattcccggtattattgctcttaccactatgaattccagctttaatgcagtaggtatgtcgttaaacgttcagcgtttatacgaacattcttttgacagtattatggcttctccaacaccactttggcaatatatcatcggtcagatgataggaggcagtttacgcggaatgtatgcggggacacttattcttatcatctccttattattttcggttcagttgtgcttttcaatttggttttttggaattatgctgctaaatggcatgttgttcggtgccttgggggttatggctgcaattgtgtcatctactcatgctgatatcgctcgcttttctacttttgtcattttgcctatgacatttttatgcaatacctttttttcggttgaacaaatacccaaagcgatgcagtggattatagaggtattgccgcttacacatacaagccgtttgttgaggcagttggcgtggggagagtatatttcatggatcagcattttaatattaatttcttatactgttttattcatgctgatagctcttttaaaaatacaaaaagcaaaaaacttgtagaggagaggtctgtatgtgggaacatgtttatccattctcggctattgtaggtcaagatgctatgaaaaaatcgttgctgctgaatattattaatccgcaaatcggaggtgtattaatttgtgggcaaaagggaactgccaaatcgactgtggtacgttcattggcaaatttatcgaattgtaatgttgtgaacgtaccgttgtctgttacggaggacagattggttggttcgatagacttggagcaaacgcttaaacaaggacgcatacaattggaatatggtttactgtatcaggcagatgaacaagtattatatgtagacgaagtaaatcttttacaagacagtatcgtaaatgtgctactagcagtaaatgcaagtggtgttaatcacattgaacgggaaagcctgtcttacaatcaccccagccgatttgtattgataggaacaatgaatcaagaagaaggggaacttcgacctcactttttagatagatttggattatgtgtgaatgttcaggcggaatctgaccctaatattagagtagagatagtaaaacgcaggatggaatatgagaaaaatgcagagattttctgcaaaaaatatttacaaaaagaagaagctttgaaacaacaaatttttcaggcaaaagaacgactaaaacagatttgtattgcagacacggacagacagtatattgtcaatctctgtttgagcgcgcatatacaagggcatagaggcgatttcgttgtagagcaaacagcaaaaacattggctgctttttatggaagaaccactgtcacaagggaagatatggaagaggcagcatatttagcattgttacataggagaaaagaaaaacagccaaacccacaagaagaatctcaaagtgaagaaccttcgacacaagaacaagaaatggattccactccgccacagcaaactgtagaagacgaattacaaaacaaacaaagtcaaaatactgaaacccatacttctgaaacctcttctcaaaatgtttcttcaacaaaaacacagtattttcgaattggagatgattttcatctgaaggaatttggacatctttccgataaaagagaacgtaatggtcaaggaaagcgtacaaatatacgcagtgctgccaaatccgggagatatttatatgcttgtacaaatcaggggaaaaaagatttggctttagacgctaccatccgtgccgcagcgccgtttcaaaaatacagagataaaaaaggaaaagcaatttctatttattctcaggatatccgcgaaaaagtaagacaaaagaaaatggcgaatattttggtttttgtcgtagacgccagtggttccatgggagccaatcaacgaatgattgaaacgaaaggagctgtcttatctcttttaaaggatgcgtacattaaaagagataaagtagcgttaattgttttccgtggagattcagctcgggttgtactgcctccaaccagaagtgttgaacgcggctatcgttatttagaagagctggaagtaggaggaaaaacgcctttaaatgcaggtatcaataaaggtatccaagtgattaaaagtgagttaaaaaaagatatgaattgtatgccgatgttaattgtaattacggatggaaaaggtaacattagtttggatgagcataaaaagccaaaagatgagttgatggaaatcggtaaaaaagtaaaagagttgtcaattgcaaacagtatggtaattgacattgagaaaaaagggtttatgcagtttggtattgcaaaagaattggcaaacgtcatgaatgcaacctattacagtgttgaaactttaaggaaagagtccatattacaaatggtagaaagtgtgagggaagcaaaatgagtcatatgagtacgaataagaatattacatttccattttcagcgattattggacaagaagagatgaaaaaaggattgattctaaatgtcattcatcctaaaattggagggattttggtatttggagaaaaaggaacggcaaaatctacagcagtacgttctatggctggtttgttacctgagattgaagttgtaaaaggctgccgttttcgttgtaaccctcgtgatgtttcttctatgtgtgaagaatgtcgtgaaaaaataaatgcgggtgaaactctggagtcggaactgtctaaaatgaaagtggttgatttgcctgtttctgctactgaagacagagttgtgggttctttggatattgaagaggcgattcaaaatggtaaaaagaaatttgaattaggcgtattggctcaggcaaacagaggtattttatatgtggatgaaatcaatttattggatgaccatattgtagacttgttattggactcagcagcaatgggagtaaatacggtagaaagagaaggcatctctttttcgcatcctgctaattttatattggttggtactatgaatccggaggaaggggaactgcgtccgcaattattagaccgttttggattcagtgttgaaattaaaggaattcaagatccggttcaacgtgtggaaattgtgaagctgcggggaaaatttgaagaagatcccactgcgtttattcaatcttatgcgaacaaggaacatgaattggcctatcgtattttacaagcacaaaaactgttgcccaaggtagagatttctgatgaaattttattgataaatgcgaaattatctattgcattggaagtcgacggacacagagcagatttgattatgatgaaagctgaaaaagccatggctacttttgaaggaagaagctatgtcacaatagaagacgtagaagcggtagcgaaaatggtatttcttcaccgtttaaaatcgttaccgtttgaaagcagtaaaacattggatatggaagtaatccaaagcattattcaggaaacggttcacgaataggaggttttgtcatgaagaaaatagtagccgtattatggcataattctgccaaccgcctgaatatgcttcaatcgcaaacggatgagtttgtttgtctgaaggtatattctgccgctgctttgagtgatggacggcaagatttagataaactatatcgagatatggatgatgcagatgccttcctgtttcaagtgacttcatctgactcagcttggatagagattgaagaatatgctgagaaatttgaaacacctatgatttatgttgggggagaatctgccggaaaaataaaaacgaaggaccagatgaaacacagcgcaatatgcaatcagttttatgtatatagcggtgcggagaatatggtgaatatgatgaaatatatctgttcacaggttctgcatgaggaaatggattatcaagaacctatatttattccttgggaaggaatttttcatccggattcgaaagagatttttcaaagtacaaaagattactttgcttggaaagaaccatccggaaaaggaacaattgcacttcttgtttctcgcaccgcttggttaagcggagacatagaagtggaacgggctttgataaaacatatagagaaaaacggatatactgcattgcctattttttcatatgcaatggcagatatagatttaggtgcaaaagggacagcatatgcaattgaaaccttttgtttcgacggctacggacagcccattgtagacggtgtaattcgtatgaccggattttttttgcaagatacagacgaatatgcaaatacaagcgaaagctccgtcatgtctcgcttaaattgcccgattgtaaaacctatttgttcttattccatgacgcttgaagagtgggaaaaaaatgaggatggctctgtagcggatattgcttggaatattgcattaccggagctggaaggggtaatcgaaccaatttttattggggcagaggagcaaacaggacaggttgaattacgaaaaccgcttgaaaagcgttgcgaaaaattggtgcatcgtttatccaaatggattgctcttcggaaaaaagagaataaagacaaacgggtagtgtttatcttaaataataatccttgtactgctgccgaagcttcagtaggtggaggtgcaaatttggacacattggaaagtgttgtcagaattttacacgcaatgaaagagcatggttatcaggtagaacatataccggaaaatggtgatgaacttattaaaacaattatggaccgtaaagcaatttcagattttcgttggacaaccgcaaaagaaatagtacataaaggcggtgtattgtgtcaagttacaaaagatatgtatatggaatggtttaatgaacttccggagaaagcgaaaagcagtatgattgacgcatggggagaacccattggagaggctatggtacatgaaaataccatactggtaacaggcatatcttttcaaaatgctttggtatgtgtacagcctaagcgaggctgcgttggagcaaaatgtgatggaaccgtctgtaaaattttgcacgatccacacgtagcaccaacacaccaatatttcgcttcttatcgctattttgagcgtgtatatcaagcagatgtcattatacatgtgggaacacatggtaacttagaatttttgccgggaaaaggtgtcggactttcagatgcatgttttcctgatatttgtatcggaaccatgccgaatctttatatttataatgcggataatcctccagaaggaaccattgcaaagcgtcgtgcactggcaacgattattggccatatgcagacgaccatgacgcaaagcggattgtatgattctttggaggagttggatgagctgctgaatcaatatgataaagtgaaattatctgatccttctcaagctcatttgttggaacacttcatcattgagcaaatacaaatgaatcagatgttagattacatcaatttggaagattatcataaccatatgggctatattattgaagaatgccataaagtacttactatgataaaaaatacgcagattcaagacggtatgcatattttcggacaattgccgcaagaagaaaaaagagtagattttttatattctattttacgatttgaaggaattaatacaccttcaattcgttcagatgtaagtaacttaatcggtttagagctttcctcgttattggaacgaccggagggattctgcgcacgttataatacggataacggtagtattttatttgacattgaccgaatttgcaaacagattatcagagtgtttttacaaggagaaacaataacatctgatatagatttatatggttataccttacaaaacgcctctagtcttgatgatattaatgctcgcttggaaaatgtattggatattaacagaaggattgaatcttccaaagaaatagaggctttgcttcgcgctatggacggaagttttatagaagcgggaccggcaggaattattacacggggtagagatgatgttttacctacaggcagaaacttttatacattagatcctgaaaaagttccgaccaaagctgcatgggaagttggaaaaagattggcagattccgttattcaaaaatataaagacgaagagggtacatatccggaaagtgtagctatttattggatgactacagatattatgtgggcggacggagaaggtatggcgcagcttctttatctgcttggggtagaaccggtatggttgtcaaatggcaaagtaaaacattttaaaattattgatctgaatgatttgggacgacccagaattgatatcacggttaaaatttcaggaatattgcgagataattttcagaactgtgtttgttttttagatgacgctattcaagcagtttccaagctgaaggaacctttggaattaaattttgtgcgtaaacatgccttagaaaatcagcaatctcaaccggatcttagctgggatgatgcgacctcacgcatatttggagcacagccgggaacttacagttcgggaatcaatttactggtctacgcttcggcatgggaaaatcaagatgacatttctgatttgtttatgaattttaacagttactcctatggaagaaatcgttttggaaaacaatcgccttttgccttggaatccagtttaaaatatgttgacattacttatgacaaagtaatgtcagatgaacacgacttactgggatgttgttgttattttggtaatcatggaggaatgacagcagcagccagaaagttgtctcaaaaagaagtaaaagcatattacggcgattccagagaagtaaccaatattgaagtacgcacattatcagaagaaattaatcgtgttgtaaaaagtaagttattaaatccaaagtggatagaaggacaaaagcagcatggttacaaaggtgctggagatatcagcaaacgtgtgggccgtgtatacggttgggaagcaacgacagaagaagttgacgattgggtatttgatgacattaccaaaacgtttattgtagatgaaaataaccgtaaattttttcaagagaataatccttgggctttggaagaaatgtcgagacgtttaatagaagcgtatcaaagaaaattatggaatcctgaagaaggtttgattggtgaaattcaagatacttatttggaactggaaggctttttagaagaaagcatgggaaataacgcaggagattttcagggaagttccattgacgtagtaaacttaaatgatattgaaacttatcgccaaacagcagcaaaattgcatactgtgaaatataataaatttgattgaaagaaggaattaacatgaaaacaaaattaatttgcatggcgcttttggcaacaatggcagtcagcttgactgcttgcggaacaagcggaggaagcagcagtacttctggtgaaatgaatacttcatccgcagtacagtcaacaggtattactattacagactccgccggaagagaagtaacgttggaaaaacctttggaaacagtggtaacttttaattccagcttatatgatactttggtatcctttggcgcggctgatactgttatcggggtaggcgattccattaaaaaggcaattgccgatggtgttccaagcgtaggggcatggaatgacccaaacatagaaaaaattcttgaattaaaaccggacgcagtaattacttataaaagctatatgacagatgaaaatgagaaaatgctggaagacgccggaatcaaatgtatttacttggaactgtcaaaagccgatcaggtaacaaacgaaatgacttccttaggaaaaatttttggagaagaagaacaggcacaaaaatatgtggacttctgcaataaatacaattccttaatagatgaaagattgaaaaatataaaagaagaagacagagtaaaagtttattacgaaggctatactgattataagagtgcaaacagtacaaccggtggtcaccaattagtaacatcagccggaggcattaacattgcggcagatgaaagcactgaatatcctgaaatcagcgatgagtgggtattggaacaaaatccgcaggcagttgtaaaactagtaagcaacaccaagaatattttaggacctaatgtaacggattctgcggcagcggaagaagtatataataatttaatttcacgtccgggttggtcagaattgcaggcagtaaaagatggaaaggtaattattttggcttccgaaataggtactactgctacaggcagtgtaatcggctccttatatttagccaaagtattttatcctgaagaatttaaagatattgatttgactaaagtgcatgaggaattccaagagaccttgtttaacagtgaattaacaggaatctatgcttatcctgaagttaactaagaatataacaatttgtattaaatagatttgtggtgtatgttatatatgaataaaacttctgctgccattgatacttctgaactaaaagacatcaaaatagaatattccaaaggaaaaaagaaaaaaattattttaattgtttctttgagtattgcattattcatcgcgtcgattgtggcaattactctgggggcttcgtctgtaaattttaatacagtatttcaagtatttggagatttatttgtccataatgacgcaatcaccgaaacacagagacaaattgtattaggtattcgtttgccgcgtgttttagccgccattttagcaggtatcgcattgtctaatgcaggtttattgatgcaaggagtgttccaaaatccattggtaagcccatatacattgggggtttcaaacggagcttcttttggcgcggctttggcaattgtatttagttcccattttgcttttttgaatttaggtacttatttactgcctgtatttgctttcattagttccgttttaaccatgatactggtatatggtattgccaaaattgcaaaaaattcctctaaaacactcattctgtcaggtgttgccgtcggatatttattttctgcattagtttctttgcttaaatatgtgagtgatgcaaaagaattgccggaattggttttttggacgatgggtggtttttccggtattaactggactgctattgcaattatggcaggtgcgtgtttgctcagctttattatcatgatgtatttttcttgggatttaaatgttatgacagccggagaggaatctgcaattagtttgggtgtcaactataaaaaaatacgtatgattgcatttgttttatctacgttattaacggcagtagcagtatcgtttacaggggtcatcggctttgtaggactgatagctccccatgttactcgtatgatagtaggcagcgattatcgttatatgattccggtgtcttcattggtaggagctcttttattgctactgtctgatacggtaggaagaaatattatagcgccgacgcaattaccggtgggaattatcacttctgtgataggcgtaccgtttttcctctatttaatcattagaaaacgggggagatagtatgcgtttagatgttaaaaatttaaattttggatatacaaaaaaagtacaaatattgcataatattaatttttcggtagagagcggacaactggtttctttaatagggcctaacggttcaggaaaaacgacaatcataaaatgtatcaatcagatactgtcgcctcagtcaggtcaaatatttttggatggaactaacgttcataccatgcgcacaatggagttggcaaaaaaagtaggttatgttcctcaaatgacaaaaaattttatgggaggaactgttttagatgcagtgctgatgggaagaagaccttatatcaaatggaaaattacagattatgatgttacattggttttagagattttaaaaaagttagaaattactcatttggcacataaagaatatgaagcattatcgggtggtcaaaaacagaaagtgttaatcgcaagagctttggcacaaaatcccgatgtatatttgtttgacgaaccaactagttttttggatattaaaaatcaacttgagattatgaatatggcaaaagaattggtgcaccaacatcataaattggtgattatggttgttcatgatttaaccatggcattaagatattccgattatattgtattgctggaaaaaggttccgtaatctctcaaggagtgtctcatcaggttttaaattctgaaaacatatttaatgtatatggagtaaatgttaatattttggaaggaaattatgttgcacctatttagaaaaagggttctttattgtttttgacaaagattatgtttgtaatcggacttactgttaaatataaaattactattcttacttatttttagaatttacatattaatattacaagtagcgttaggataaataatctgctttatctattgttctgttcagatgtgatttatttgtataatattgtattaagatattgtaattattataatctcaaaaaaacaatattaatatttcaataattttttagtaatttttaggtaagagtgctgctgcatttagaggatacattgatttaaatgggatatcaaatgtggttaatatcagcttttttccatgatgtaagttaatatgtttttatttcgttttttcgtattcgcttacatctcggataaaaaagaatatccgtggtaacaaattaccacggatattcttttctgtttttcaaaaacagaccaagtataactatatatattcgtctcaaaagtaatctaatgggttatatttcgcgttggacttcataatgatataactttgcaacggtggaatatgataatctaataaaggtatttcaattaataagccatcctttaattccttttcaatcagtttacggggtaaaaaagcgtaatatggatattgcaataaaaagggaatgatctcttttatcacactaattgtaaattgaaatacatagtgtggaggaaaaatatcgtgtatccaatcaaatccacttttcggcataaatttagaatagataattggtaaatgaagtatttcaccgttgtgaataccattggaaaattgtatattttggctgttggtaacaaaaatgatttcatccgttttatatggaatacatttatagctgatttcattcgttgccagatatgaaaagcagacatcaatggaattatcatgaagacgattgagaagatgtcttgagtgatctaatattacatttagacagatatttgtatgtttattcatcaattgagaaatatgtggctttaaatgacagttgtatatgcagttgacacaccctatattaatgatttttgaatatgtattacaagagttaatttccattttcattttttcttctaattccaaaaatcgttgagaatattcataaaaatgttctccggcatgggttagggtaatgtgtttattatccctatcaaataagggctgtcctatttctttttccagttctttaattcgatttgttatggtagattgtactacaaaaagttgctgtgcagcttttgtgaaattttttacctctgctactactaaaaatgtttttagtgcttctatattcataattgtctccaaagtcataaatcactctataaaactatatttttcatacaaattataacattttttcttattttcttttatttattaaagtacaaaatttctcaataaatcaacgtatttatatagaaaaattatttaaatgaaaaaaattatacaataatctttaaaaatttcctactatcaaaaaaatgaatgataataggaaatttttttcattgtacaaatattttaatctattttatatttaataatgtgttaaggaatatacacattatatccgcagaaaggatgtttgccgttggacatggcgcgatttattttaaaaagaatattgcaaattattcccatgttgctggttgttacaatatttgctttttgtttgagcaatttggcaagcggtgatattgcagagattagtattcgcagttccggtggacaagttacaccagaaaatttggctcaggccagaatagacctcggcttagaccaacctttggtaatacagtattttaattggctgggaaaagcggtccgttttgatttcggcaattcatttatcagtggaaaaccggttataaatgaaattatgtctcgttttcctaatacgttgtatctcgttttgattgcttccattatggctattgtcattgctgtacccattgccttgctttctgcaagatattccggaagtatcttagaccaaggattgcgtgttgttactacaatcggagctactatgccggaattttggcttggattattgttattatatgtttttgcgattcatttgggtattgtacccgtaattgcaggaagcaatattgcgaatatatttcttccagcttttacattatgcttaagttattcagccgtctatgtacgtatgctgcgtacaaatctgattgaagtacggcgttccaattattttaaggctgctcgctctaaaggaatgagtgaagggagcgcaatggtaaggcatggtttaaaaaacgcaattttaccttgtgttactttaattgcaactaatttcggaggaatgatttccggtggttttgcagttgaaactattttttcatggaatggtgtagcaagatatgcaatagaaagcgtgaaagcaaaagatataccggtgattgaatgctatttattattggtagctcttgcgtatatcattgtcaacttaattgtcgatattatctatcaatatattgacccgaaaattaaattacagggaggccgtcgcagattatggttcaagagatagataagattcaaaaagataacattcagaaaatagataaagattgttttatcttgcaagtgttaaaacgattatttaaaaataaactggctttagcaggcggaattgttgttttattatttttaattgtaggttgcttggcacctgtgattgcaccgcatgatccgttagaagtgaatgtaagcatccgtttgcaaggtccttctcaagaatactggctgggaacagatcatctgggacgatgtattttatcacgtttactatatggtgcgcagaccactttattaaactccttagttgttttggcgggaatattgcttattggtattcctctagggctcatttcaggattttgcggtggttggattgacaatttaattatgagatttgccgatattgtatctacatttccctccagtttgttagccttagcagtcgtaagcgtttttggtgccggtctacaaaatgtaatgatagttttagtagccttatggtgggctccgttcgccagaatattacgcagccaggtattaaagataaaagaaaaagattttgtaatggcggcaaaagcaagcggtacttcaaaatttaagattgtaatcaatcatgtattattaaactccatatcaccgattattgtttattctaccttacgtgttgctgcggttattatgcatattgcaagcttttcttttattggacttggcacacaaccaccggctgctgattggggagttatgctcagcgacagtaaacaatttatcagtacagcgccgctgatgatgatatggccgggtctgtcgattatgttggtggtgtttagcttaaatatgtttggagaaggtttaaacgaagcattaatgccgggaggtaataaaaaagcgaaacaattgggagatggagaataaaatggttcaaaattataaaaatgatgtaattttatctgttgaacatttaaaaacttatttttatcaaaaacgtaatcaagaaccaattcgtgcagtagacgatgtttcttttcagattataaggggaagtattactgctatcgtaggacaaagcggcagcggtaaatcggtaacatcaatgtctatttttaatttagtggattcgccggggaaaattgtaggaggctctattgttttaaacggaaaaaatttattgaaattatcaaaccgtgaacgaaataaaatttatggtaaagaagtaactatgatttttcaggagccggcgagcgctttaaatccggtagtaaaagtgaaaaaacaaatgttagagatgatatttctccatcagaagatgaatcgaaatgttgctcttgaaaaatgtagagaagctttaaaaagagtaaatttaaaagacacaaacacaattttggaaaaatatccgtttgaactttccggcggtatgtgtcagcgcattatgattgccatggcaattgtatcaaatgcagatcttttaattgcagacgagcctactactgcattggaccttaccgtacaagcggtggtgctgaatgaaattaaaaaacttcgggatgcaggaatgtctattatgctaataacgcatgatttgggaattgtggctcaaatggcggattacgtttatgttatgaatgacggaaaaattgtggaaagtggaaatgtattcgacatttttgaccatccgcagcatgaatatacaaaaacgttgttaggggcggctgaagaaaaacaggaggttatggtatgagtttaattatgattaataatctcaaaaaaagttataaaatttcaaagacagagcgtattcatgctgttaatgacgtgtctttttccattcaaaaaggtgaaattttaggtttggtgggagaatccggctgcggaaaaagtacattgggaaaacttcttcttaatttagaaacgtccgattccggagaggtactttatcacggaaaaaatattacccggtattctttttctcaaatgagaaaaatcaggaaagagttgcaaatggtattccaaaacaacttggattcctttaatccttattatacggtcagacagattatcatggaacctcttaaaaattataatagaggaaacaccaagaaaaacgaccaattagtggaagaaatgattcaacaggtgggactggataccagctatttaaaccggtatggaaatgagttatccggcggtcaaaggcaacgtgtgggtattgcccgtgctttaattttaactcctgaatttgtcgtatgtgatgaggcggtatctgcattggattatgctgtgagaaataaaatattaaaacttttgattcaattaaaacaagaaaagcagctgacatacctttttatttctcatgatctttctgccattaatcaaatttgcaatcgggtaattgtaatgtatcgaggtgaaattatggaaattttacctagcttaaagcaagaaatccttcatccttataccaaagcgcttttggctgccgccttaggattcaatccaagagacagaacacaaaatcgtattttgtttcgggaggaagaacttccaatcgaaccggaagggtgtgcattttatcatcgctgtctttatgcctgtgataaatgtaaaaagaaaccaccattggttcatcataatgataagcagcatttcgttgcgtgtcatttgatataatactattttaactggaggaatttgtgtgaagaaaaaacgattttttacggctttggccggactgatggtactgattttaacattaggaatattaagtggatgtggaaacaatactgaaaataccagtcaaccggatactaacaccggaaaagaaattaccatcgcaatttacagagatggcgatatgaatgaactggacgcagcatcttataatggtcctcacgtaatttataaaatgatttacgaaggctttgtagaagacggtggaaaagatggaatacaatcattacttgctaccagctgggatatatcagaggacggtaaaacatatacctttcatttaagagaaggagtaacttttacagatggaactccttttaatgcagaggcagtatgctttaatatgaaacgctggataaataatgaccgccattcttctttaagttcctacaaggtggaaagctgtactgctttggatgagaataccgtacagattcagtttgcggaaggcgcttatcctattctggaagaaatgacttatcccagaccggtacgttttttaagtccaagttctatcactggagttgatggagatgtcatgggagagtttacttctccgataggaacaggacaatggatgttggagagctatactgaaaatgaggaattcgtattggtaacaaatccgaattattggggagaacaacctaaaatctctaaaattacattcaaagtaattccggacggtcaggctcgcgttatggcattgcaaagcggagaagtagatttaatcggaggagatttattgggcaaaataccaatggaaggtttgcaggaattaaaaaattctgggtatcgcattgaagaattagacacaatgtgttcttattttatggcgtttaaccaagaaaatgagaattttcaagatgtaaaagtaagacaggcgttaaattatgctattgataaagaaaccatggtggaaaacttgttctatggtgttggagaagctgcacgcggattatacaattcagataacgttccgtatgttactaaagataatagtcccggttatacatataatttagagaaagcaaaaaaacttttagaagaagctgggtatactgattcaaataacgatggtattttggaaaaaaacggtaaagatttcaatgttaaattagtgtatacgtcagaagaattgcctgaatggaaaactatggcggaatatatccaatctgaatatgctaaaattggtgtaaatgtagaactatccgaagtagataccaatacttataatgaaattagtatgacaacttttaattttgacatgattatgactcgtacctcctctgattcatggttgccgcacggagatatgaagcaactgttttcagtactttcaaccggaaatcgtgcacggatttggttggatgatactttaaccgaaaatattaaccaaactttgttatgccatgatgaagacgaaagacaagaaggttatgatagaatatttacacaaatcaatgatgaagcatttgtggtgccgttatattacccaaaaacatgttttgcaatgacagataaggttacaactttcgagccgggggtcaataattatgctccaattaattggacgacattagatgtaaaatagggagaagtaattatgaatttaaaaagtgcagtagaaaaaaattggagctgtgaagcacaacagtatagtgaaaatgtaaaaatagagttggaatccaatttaccggatcaatggatttcattaattgaaaaatacgtaccccgtaccgattacaaaaatgttttagatattggaaccggccccggattttttccaattattttatctaaatgcggctacacggtaacaggaattgattgtactcctgctatgctggatgaggcaaagaaaaatttacagttatataatgtatctgcaaatattttacatgccagtggagaatcacttccttttgatgataacagttttgattgcattattagtcgtaacgttacttggactttgctggatacaaaacaaagttatcaggaatggctgcgtgtgttgcgtccgggaggaaaaatattaatttttgatgcgaattggaacttaaaatatcatgatcaagaagtgatgaaacagtatcaacaagcggcaaaagactttcgtgatatttttggtgaggactattcagtcattcataatttatcagaggaagcggaaaattacagaagaaatatgccaatgagcaaagtgaaacggccacagtgggattttaacactctgtttgacttaggagcaaaatcaatttgttgtgaaacagatgtttccgatttaatttggggagagaaaaagcaaattgcttatcgtgctacaccaatgtttttaatggtagctgaaaagagataatataaaaattgtaataaaagcgttctttcataaactacgaaagaacgcttttattacatgtgttttattgtatatttatgatatgacgtattttataaaaatataattttacaagtggtctttattgacactcagtaatatttatgatatcatggatattactgagtatgtatatttggctaataaagcactccaattatccttttcataagggccattagctcagttggtcagagcaaccggctcataaccggtcggtcccgggttcgaatccctgatggcccaccatatttatttagtctgtattttttgcgtattgtaaaagaatacagactttttatttttataatacacaattgattttctaatacaaaaacattgctgttatgtaagaaacagcaatgtttttgtattttaccttctaaatcctaccacttaccgttttgctactgacaaagtacctcccaacttttataatataaatgacgataaaataaggaggagatatattgaaagttaatatcgaaatttcatctgaagtacaacagccgtacgcgataatatatactgctgaagttacaaaagaaattcaagacgcggtgattgccttggaaggcaattatcatgtaattacagccttagatcatgataaaatagttattttaaatccagatgagatttatatggcgcgagttgaaaacgaacaagtagttctctatggggagaagagacaatttttatctaataaaagattatatcaggttgcagatcagcttggaaaagattttatacaaatatcaagatttacaattatcaacttaaagtgtatagacagtgttaggccatgttttaatggtttgatgcagatatttctaaaaaatggagcaacagactatatttccagaaagtacttgccgaactttaaagaatatttaggtttataggaggtttatgatgaaaaaaattatactctatattttacgtggaattggactaggatgcgtattctttacattaagtggtatcatattcgatattatttttaaaggaagttttttgttgaatcattggtattatactaaaatggcaataggttctatgataacaggaattgccttttatgtaccgtcattggtgtatcagaatgaaaaactttctaaagggttacaagtgttcatccatatgggaattggattggtaacatatattagtgttggactttatgttggctggattcctttgcaagcaggagcatgggctattacaggaactatcgtaattgctgtggttgtatcttttcttatttggtttggattttatttgtattatagacaagaggcaaaacgtatcaatgcaaaactcaaagaaaaacaagggatttaatttgtaggcaatactgtattttttaatttattatgttattctaagagataatatttgagaggtgattttaagatgtataaaacagtcgtaattgggtatactccggtagcagattcaatggctgaaaagatagaagaaaaatcaaatgaaatgctgggcaaaggatatgaattgataacaatggcaattacaggaggtgctaaggcaatattggtgtttaaaacgaaaatgtaatttgaagctaaaataaagtaagataatttttatatgaaatacatgtatagcatgattgttgatattagagtgaattatcttatttttattacttttatattgtaaaaacaaaaagaccaaatcttacgatttggtttccttttgtacttgaaagtatttgattgattgagggtagagaaataatcttgaaatagtagcgactctatctcttgattacaattatattataacagttttttggttcaggttgtgaatcaattgtaaatagattaatattgttttgtaaataaattttcatttctttttgaacgcgcaaaaaacaggtatccaatattggatacctgttttttattagtgctcaccgcagccgcaatggtcatgatggtcacaatcttcaattttacctacaatcggtgttggatcaataccttgacgggtataataatctgctacggcagctttaatggcctgttcagccaatacggagcaatggacttttactggaggcaaaccatccagagcttccataacagctcggtttgtcagtttcaaagcttcatctattgtcttgcccttgataagttctgttgccatagagctggttgcgattgctgcaccacagccgaaagttttaaatgttacatctgtaattacattgttttctactttaatgtacattctcataatgtcgccgcatttagagttaccaacttcaccaatgccgtttgcatctgccagttcgccaacgtttcttggatttgcgaaatggtccataactctttcactatatgccatgttaatcacctttctgtttcatgtttatttatttttattgataatttcgtcccataacggagagatatctcttaggtaagatacaatacctggaagcacttctaagatataatccacatcttcttcagtgttttggtcactgaatgaaattctcaaagaaccatgtgcaatttcatgaggaagaccaattgccaacagaacatggcttggatccaatgaaccggatgtacaagcagagccggaagaggcgcaaatacctgcaaaatccaatttcaatagcagagactctccttcaatgccttcaaagcacatattaaagttgccgggcaaacgttttacagcatcgccgttcaggcgagaacgttcaattttggaagcgccttcaattaaacggtcacgcatacgaattaatcgagcattgcgttcgtctaaattggcatatgcttcatccatggctacactcaatgcaacaatgccggctacattttcagtacctgcacgtttgccacgttcctgtgcaccgccggaaattaaatttggtaaacgaatgccacggcgtacatataaagcgccaacaccttttggagcatgtaatttatgtccggaaagggagagaagatcaatgttttcttcttttacattaattttcacattacctactgcttgtacagcgtctgtatggaatagtacaccatgttttttgcaaatggctccaatttcagaaattggctgaattgtgccgatttcattattggcatacataattgtaaccaaagcagtgtcttcacggatggctttttccacatcttccggttttacaatgccattttcatagacttccaaataggttacttcaaaaccctctttttctaaggattccgttgtgtgaagaactgcatggtgctcaaatttagaggtaataatatgtttcttaccttttttggcaagctcgtgagcgacgcctttaatggcccagttatcagcttcacttcctccggaagtaaagaaaatttcattggtaagcgcacctaaatgatttgctacgttttctctggcttcttccaacgctttttttgcttcacgacccactgcatatagactggaagggttgccgtatttttctgtataataaggtagcattgcgtttaagactgtttgtgaaacgggtgtggttgcagcattatctgcatatacaaatcgtttcatatattattcaccttcattttcttaataaaaaatagtttagcaacataagaaaatttttctaaatgttgttgattaaatataatatacactaatttagtatacattgcaatactttcagcaaaaaaattagtgtgaggaggagtttttcattttttctgcggcagcaactgccaattggtcgcaacgttcgttttccgggtgaccggcatgtccttttacccaaacgactgtaagatgatgaggttcaattaaggttaaaagctcgtcccataattcaggattcagcgcgggggatttatcactttttcgccaaccgttttttttccagctttttgcccagcctttggaaataccgttacaaacatattgtgaatcactatataatgtaacagcacaaggttctttcaatcgtttgaatgcttcaatcaccgcacttaattccatacggttgtttgtagtatttgcatctccgccgctaatttccttttctgtctgctgataacgtaagatggcgccccaaccacccggaccggggttgccttgacaggcgccatcggtaaaaatttctacctctttcacaaaactatctccaattcgtatgttttgagtatgaattctcatgtttaaattataccaatttccaattagaatatcaactaagtgaaagaataaaactattttttcaataaatttatgaaacggtataaaatggttacaataatgaaagataaattggactactttatactgtccaatacttgacagtattatgtaatcgggttacaattgagaagacgtttgtgttcggattatatatgaattattttttagtgagatcgttgcagaaaatagatatttatgtatggcaaaacatacatttaaaacagttgttgaaaacagaacatgaaaataaaaatatgattacggaaataaccatctttactgaaaagtgaataaaaagccagctttacaccgtttgtagagccggcttatgattgttatgtccttaaaatttggaggttacaaagtgacagaaaaggatattggaacaatgattgaaaagaaactggaatctacagaagataaggttcctgtttttactccagccccatcggctgtaaaaaatgaacaaaaaaacatggtgccttccgcgcatcaaacacgaacatcagataaaacttctgcaactcaaaataaatcatggaatgaacgtatgacagcaaattcaaacagcggtcgttccaaatacgcaaaccaatcaaaacagcataaggtttttccaaaaactgccggagcagatgtatcacataaatctcatgttttacaagcaaaatcggtacagccaaaaccgtttgcagctaaaacaccacgttccaaaggagcagcaccgacagaggaaaaagcagttcaagtgcaaacaaaagcagtacagaccaggcaacccaagcaacctgcggctaaaaaaacttcagcacaaagacagcagcccgcacagaatctggttgaaacaaaaatggcaatcaaacaaatcagccaaccttccagaaatacaaaaagcaaacaaccaaaaccatctattaaggcttattttttaggcggtttgaatgaaatcggaaaaaatattactgtatttgaatgcgacaatgatatggtcgttgtagactgcggtatggcctttccggacgatgatatgatgggcgttgatttggttatccctgattttacatttattgaaaaaaatgtggataaaattcgcggcattgtcataacgcacggacacgaagaccatattggtgctatgccgtatttactcaaaaaagtaaaacttccaatatacagtacagctttaacattgggattaatagatggaaaattaaaagaacacggtttacagggaaaagtacagctcaatacggtaaagccgggtcaaaccgtgcgtcttggctgctttggtgtagagtttattcatgtaaaccattctatttcagatgctgtagggttggcaattcactcacctgcaggcacactgctgcataccggtgactttaaaattgactgtactcctttaaaagaagaaatgattgaccttggcagaattgcagagcttggtcagcaaggagtgcttgccttaatggcggattctacaaacgtagaccgtcccggctacaccccaaccgaacgtaaaatcagtgatgcttttgaaaaattgttcttgcaggcagcagagcaaagaatcattatcgctacctttgcatccaatatcagccgtgtacagcagattatcaactgtgcggcaaaacatggtcgcaaggtggcgctttcaggaagaagcatgattaatgtaatgggaattgcgtccgaattgggatatttggatataccggaaggccttttaattgatattgacttgctaaatcgttatccaaaagataaagtggtattaattacaaccggcagccaaggggagccaatgtcggcattaacccgtatggcatttgctgaccatagaaaagtagaagtcggaccgggtgattgtattatcatctctgcaaaaccaattccgggtaatgagaagatggtaagtaccgtaattgatgagttgttgaaaagaggctgtgatgtagtttatgaatccagccatgaaattcacgtatcgggtcacgcaagtcaggaagaattaaaaattattcatggaattgtaaaaccacaatattttattccggttcacggtgaacaaaagcatttgcgtaaacatgctgaacttgcgcgttctatgggtatgaattcagaaaatatattcattggaaccattggagatgctgtagagttaaatcaaaattatatgaaacagcttccttctgttcctgccggaagaattttggtagatggtcttggcgtaggcgatgttggcagcattgtactgcgtgatagaaagcacttggcagaagacggtttaattgtggttgtatgtaccatcagtgaaggcgatggtcatgtagttgcaggtcccgatgtggtttccagaggatttgtatatgtgcgtgaatcggaacgtctgatggtagaatcaagagacttggttacacgagtattggaagaatgtgctgaaaatcaaattcatgattggggcacattaaagaccagaattaaagatgatctttctaaactgctttatgaaaaaaccagaagaaatcctatgattcttccgattattatggaaatttagtgtgtgtaaatcaaaaacattcggtatcaaaagtgccattgtttgtttaccaaaggggttatgagtttgaaacgaaaggtttgggtttcgtctccaattctatatgtactggctgttattatggctggtatgactgctgccagttggttctggaatcctattatattttttattgaattggctttaaccttgatttcgattgcaattataacggtaatatttgtacagtttaagtcacatgtaaccgttgctatgaaatcggccaacaaaattttgtcgggacgggaatatcagctgttgcaggattttacgcttccggttgctattgtaggcaatgaaggtgatattatttgggtaaatactgcctttttaatggatgttggcagagactcagaatatagaggcgaaaatatcttaaaattaattcaatcgaaaacaatggaacaggtagctgaatccgacggtaccgatatttcaattgatgataaaaaattcacggtatttgctgcaaaaacccaatatgcttacattgtctattttgtcaataataccgattataaaaacatcagcaaagaatacgaacaaacccgtccttgcgttatgattgcggcatttgataataaagaggaattggcacatgactgcagtgcaacagaagaagcacgtattaatgcagaagtggaagccaccttaaacaattgggcgcaggatatgggtggttttgtaaaaaaactgagtggcggcaatcgttatttgctggtaagcgatgaacgtcatgttgcatgggcattggaaaaacgttttgaaattttagatgtcattcgaaaaatcaaagcgccgggcaacagaagcgctacagtgtccattggtatcggacgcggtgccgatacattaactgaaagtgaacaatgggcaaggcaagctttggatatggcgttgggacgcggcggcgaccaagttgcggtgaaaaagaagaacgatgcatatgatttcttcggcggtctatccaaaggcgttgaaaaacgcgataaggtgcgtacaagagttatcgccgcatctatctctgaccacatgaaagcaagtgatattgtgtttattatgggacatcagttctccgatttagatgcggtaggctctgctgtcggcatgtggagtgcagcaacaaaaggcgcgaaaaagcctgcttatatcgtaattgaccgtaatgcaaccatggctatgcctattgtagatgaaatagaagcagcacacggtccggaagagaccatttttatttcggaagaagaagcgttggacatgatgacgcagagatctttggtaattgtagtagatacgcattctcccgactttgtggaaagcaaggaacttctcaatgaagcgcagcgtgtggtcgtcattgatcaccaccgtatgatggtaaagcacattaacaatgcggttgtattttatcacgagccatatgcaagttctgcttccgaaatggtttcagaattggttcaatatattggaaacacggttttaagcaaggaagaagcggacgcactgttggcaggtattatgctggatacaaagaactttgtattaaaaagcggtgtgcgtacgtttgaagcggcagcttatttaaggcgcagaggtgccgacactgtagtggtaaagaaaatgtttgcaagtaatattgatacttataaagaaaaatattctttaatttctacagcagaagtttataatggctgtgcaatagcatgtacggatgaatctactccgaatgtgcgtgttgccgctgctcaggcagcagatgagctgctttccattcaaggagtcaatgcatcttttgtactgttcaaaacaggaaaaacagtgaatatctctgctcgttctcttggagatatcaatgttcaaattattattgaagctatgggcggcggaggtcatttgactatggccggtgcacaaaaaacaggaatgactatggatgaggtaaagaaagagttaattcaggtaattcgcgatatattgccttatgcaagtaaatttcctgcattaaacggtagtaaatcttaaatgatacggagggttttatatgaaagtagtactgcttgcagatgtaaaaggcagtggtaaaaaaggtgagttggtaaacgtttccgacggatatgcccgcaactttttatttcctaaaaaattggcaaaagaagcaaacgcgcaagcgttaaatgagctgaaaaatgcggaagagtcaaaagcattcaaaataaaacaagagacagaagcagcgcaagcttccgctgataaaattaacggaaaaagcgtatctattttggcaaaagcgggtcaaggcggaaaactgtttggctccgtaacagcaaaagagattgcggaagcaattaagaaacaatacggtgttgatgttgacaaacgcaaaattgataccaaaggggatatgaaagcattcggtacatatgaatgcgaagtaaaattatattcaggtattacagctactgtaaaagctgtggtaacggaaaaagaataatacaatttgatacctgatggcattttgtcatcaggttttccccgttataaggaatggaacgataaaagaggtgtatgtatggcagatgaaaacagaacgataaacgaactctccgcaggagccggaatgctgggttataataatgcattgccgtttagccctgaagcggaacaatctgttttgggagcaattctgctggattccagttgtttggaccgtgttgctgaaatattgccaagaccggagtattttcatcaagtcaacaatagccttatttatggtgctatgcttgaaatgtttacattgggacagccggtggacttcgttacggttttggaaaagctcaaagaatcaaaatcgtttgatgaagccagcggaaaagcatatttagttcagttggcacagttggttccttctatttctaatgtagaaacttatgctaaaattgtaagggataaatatgatattcgcagcttgattttaacagccagagagattttggaagatgcagccgacggttctgcagatgcatctcaactgttagatgctgcggaacagagaatctttgatattcgtcgcggaaaaaatatgcaaggattacagagagtcaatgaattggttatccagacatttgaccgtttggacttgttaaactctcccgaaagtgatatgtttaagggcgtaccgacaggcatcaaggaattggatgatacgattacaggactgaaccgttctgatttgattttgcttgcggcacgtccgggtatgggtaaaaccagctttgcactgaatattatgcgtcatgctgcagttgttgcaaaaaaacgtgttgcgtttttttcattggaaatgtcaaaagaacaattggcatctcgtttgttatctactgaaagtatggtaagcagcattaaactgcggacagggaagctggatgaaggagaatggatgcgtttgattgaaggaggagatattctctccaaaacgcaaatgtactttgacgacagttcccaaattacagttcctgaaatgaaggcaaaactgcgtcgtttaaaagatgttgaccttgtgattatcgactatttgcagttgatgtcaggcagcagaagaacggataaccgtgtacaggaaatttcagaaatcacgagaaatcttaaaatcatggcaaaagaactgatggttccggttatcacgctttcacagctgtctcgtgacagtgaaaaacgtaccaccaatgcgcacagaccggtgttatctgacttaagagattccggctctattgagcaggacgcagatattgtactgtttttgtatcgtgacgattattacagcggcgaccaggcgcccggcgaagaaacagataaaaatcgcggagaatgtattattgcaaagaaccgtcacggcgagacaaaaacagtaccgcttcattggcaaggtgaattcatgcgttttacttcgcaggaggttattcgtcgtgagccgttctaattctgtggaacctatcgttttaaaagtaaagcagacattacagcaatatcaaatgcttgtcgatgcaaagccaattgttgttggtttttccggcggtgcagattctatgatgctgctgcatttgctgcatcaaatgcaattgccggttttagctgcccatgtacatcatggtttgcgaggcgaagaagcggacagagacgaaaaagcggcagaattgttttgcgaaaagtttaagatacctttggaaatcctgcatacagacgtccaaaaacgggcaaaccaattagggattggtatagaagaatgcggcagagaagtacgctattctttttttcaggaattggcaggtttaaaaggcggaaaaattgctacagcgcatacgttgtcagatgtatgtgaaactgttttgctgcatatgaccagaggaaccggtctgaaaggtttatgcggaattcctccaatccgaaataatattattcgtcctctcattggaattacgcgtcatgaggtggaacaatattgcggctattaccaattgccgtatgtaacagacagtacgaattttgagaaacattatacaaggaatcgaattcgtttagatgtggttcctgttttaaagcaaatcaatcctttgtgcgaggaggcaatcttacatcttacacagcaatgcaaagatgatatagattatttggaacagcaagctgaagatgcgctgtccaaagctgaagtcaaggatggttattgtacggatgtttttttacaaatgcccaaagcaattcgctcaagagcaattttcttggcactcaaaaaagtaaaagatattactccatcctatgtacaaatggagcagattcacaaagcaattgaagcaaaacgtgggtctgtaacggtaacaggcatgattcaattttgcgtagaaggaaattttatttttttgcgtgtgggaaaaatggataaatctcaatgggagtttttagcaaattcgactgaaatcgcattaaaagatggccgtataattcatttaaatcatcaaattgtaaataattataaaaatgatataaattttaaaaaaatgttgtttcataattccgttgattatggtacaatatctgataacgcaacttttcgaaatcgcagagagggcgattattttcgtcctgcagggcgaggagttacgaaatcattaaaaaagctgttcaatgaagcaaaaattccaccgtctaaacgagatgatatcgtcattttagcagacggtgaccgtatcttgtggatagaagggtttggtccatctgaatttggatgtattacatccaataccaaagaactggttgccattgacattgagggagcaaacattgaatcatcaaattgaaaaagtgctgttttccgaatctgatattgcatctatggtgcaaaaacttggtcaagcaatcagtcgcgactaccaaaataagaatttggttttggtgtctttaatgaaaggctctttggtatttacagctgacttaatgagaaaaattactgtcccatgtcaattggaatgtatgactgtctccagttataaaggggcacagacttcagggaatataactgttttgcaagatatttccgtatcattgaaacatactgatgttttagtggtagaagatatgttggataccggtttgaccttgcagtacatactcgggcatttaaaacagaaacatgctaagagtgtgcgcatttgtactttatttgataaacccg

SEQ ID NO: 2137 - DNA, 12552 bp, Unknown
  16S sequences of unknown bacteria
tatggggcctatagggctcgaacctatgaccctctgcttgtaaggcagatgctctcccagctgagctaagaccccatatagcgaagtgtgatttgctttaccgctcctcaacttgcttcgctattataatatgaattgtagtgaattgtcaagcaaattttgaaaattttttcaagaaattttatccgcctgtttcgggcagctgaagctgcatcttactcacgtccgacggaacagtgttctgcgcttccggctcgctgcaagtgcatccctccactctacctgatatacaagaccgtgcagtacaaagctcatcatcgctccgcagacgacatcaatcacggaatgctgatccagcagtaccgtcgatgcacagatcaggatcatgatcacaaaatggacggcaatcgtcagcttccgatgcttcagatgatcgaggctgcatacggcctgaaagatcattaccgtgttcatcacatgaatggacgggcatacattcgtcggcgtatcaataccgcgcagataacggaccatattatacagaattccggtctcatgcgggttctgcgccaggcgcagattcagcccggtcgggaatacgtaatagatcaccaggcagatcgtaagccctgaaaatatcatcaggcaaagcttcttgtaatcttcccatccgcggcgtttgaaccagataaaggtacctgccacatacggaaaccagaatacatacggaatgataaatgcctcgcagaacgggatcatctcatccagcttacaatgaataatgtatctcggtacgatattctgctccagccactcaaacgccttaagataaaacgccatatacagcagtgcgatcatatatggatatcgtttgaaccagtttttaatcttttcaagcttctcgttcatattattcctcattgcagcgccgtatatccggcacattttctgaactctaggtgaattgatcccgaccgaatggctgctttgcagctgatatgggtcaagcggatattcgcaatccgcttcgctacttgtaggatcacaaggaatcttcccgcaagcgggcccctccttatgatatgtcataaccgaatagctgcttcgcagcttatcaggagtggcttgtaccactcctgatacaagcaagtcccaacccactgcttattgctttgcgcaattgaagcaggggacttgcttgattcggttaaatacgcatgacatcatagcattttcccatctgcagtgcaacactattttcgctgaaattcagaagggatttgaaacttttttcagtaaagcgttcaaaaatcacaagctctctactgctctgtatccttcacatacgtaccgatcagaggagaatctgatgcatcgtagtcctcctcactcgaaacagatacatcgaggagcgttccattgatattgaacacaatcacataatggtcgtctcctttgtatactgcctgactgccacgcacatccgcaactccggaaatcccagcttccgcaaaggaaaaggatatctgggtatcctctgccatcgcaatcgtcagcgtctcatcgtctgcgacataggttccgctccagatatcgccgtccgcgctctcgctctcagtctcgctctttgtctctgtgaccgccgtgccggaggtctgcgctgtctgtgtctccccggcagccgccgtctctgactgggtaggtgctgtggctgtcgcatccgaggcgcttccgctctcgcccgccacactgactgctgtaccgctcacgctctgcgtaccggaaacagtctgaagcggctcctctgtctgtacttctgttccattttttatcgtatcgtttttggctgcggactgctgatccgactcctgctctgacgagctgcaggcggtaagaatcataacacctgcaagagccagcgctgcaagcgcagctgccttcttcttcatcatgccactctcctccatttggcggatgttacaatccgctttactgcatgtatctctctccttgccccgctattctaacacgtttccattcctttgtcataaagtttcgttttttttaagaaataccgtttcttacgtcatgcctccgcctgcacttcgttatcatatatagtatcatcaaacgaatgcgcttccttcggaagctttttccggatccttctcgccccgtgatgcagccgcagccggtgaaaggcctcctgtggatccgaagaaaaaaactgcagcagcacactgcagtccaccatgccccagtgatacccctgctgataattctgatagctgctccaccagtagtccccgatccggcggacatagccaaggctcaggggcagccggtgtacggctctgcatcttctggcaaattcagacatggaacggatcgcctcaatacgctgcgcacgcagccagcgcgtcccctccgtgtccggaaagccttcatatattttccagaagcgctctgtgacacgttcctgcagcatctgcagtgtgtacatatcttccgcctctgtaataaaatatgcggcatcatcggtaacacagaacgcatataccgggcagctgcaggctctgtgcgcacaaagaagcagatccagcaggtgttttttattgcgctcatctgcgagcagcaatgtactccccttcattacataacaataaacatcagacatacttttccccttcccggtgaagagctcctccttgggcaattctgccacatctcttcacatcctgttcatcgtatcacatatgcagcctataatcaacatattgtttcaataagtgtcattttgtttttcttttaaatggctctggtttcagatccaaaaaaaagatgaaatgcaacaaatcgtgtcacatttcatctctcaaatccattttctgaagctatttctccttattgtgtcccggaagcagtcaccgttccgtccgcatttacagtcacaccgtaatttgcgctcatcgtgttgagccggtcaatgacagaggcactggcatccccctccgttggggtcggctgataatcgttatagcctgcggtcgaggagatactgcacggcaccaccgttgcagcagctgctgcctgcacctcccctttttcgattgtaaatgtctgctgaaaaatcatcgtatccatatcagaaggcgcactattaccgccaaagcagaaattaccgaggctgtaagcaatgtatttccctttatagtactctatcgcctgcaaaacatgcggatgatgaccgacgaccagatctgccccacagtcaatcgccgtatgcgccagcgatttctgtgtctcatccggctccgccgctttttccgtgccccagtggaatgcgacaatcaccagcttcgcgccctgctgctttgcagctgcaatcgtctgctttacctgttcttcccgcgccattccgtcattcaggacatatattccaataaaggcagtcggtataccatttacctcttttactgcgattttatctccgatgcagtaatcgattccggccgcatccagcgcctcctctgtatcggtcaggctctttgccccataatcgctgctgtgattgttcgccagggtgacgacatctatggatccgtctgtcagaatctgcgtgtaggacggatcgcctttaaatgcatattcctttgattcccgtgctgtctcagtcgtcagcgtcccttcaaaatttgcaaaggtcgcatcatccgcctcaaggatcgaccggacattctggaaaaagtatgaggtaccgttcattgcctcatacgcgttaaagctcgtgctcgtattaaagctttcatctgtcccgagcgtacagtcgccaaccgcactgaccgtgactgtccgcgactcagacacctctgctgtgcagattgcagcagacacaccgtccgcggtgaccctgactgtcccggtaccatttgccagcgccgtgaccactccgccgtcactgacagaaagcaaatccggattctggctctcatagctcaggttctccagcaacgcatattccggttcaacctttaccgtaagcgctgccgtctcgcccggatacagggcaagcgtttccggcgatacggtaaggctctctgccgtcttcatatttgtcacaaccggcgtactgcggttgcctgccgcatcctcggcatagaaacggtaaagcataccctctgtataactgatcggctcggtatatttctgatactgcggcaccagctccgactccgtctcagggccgacggcataatagagtgcgcgcacgctggagcgcgcatccgctgcggccagctcgatccggtccttttgcagagacgcatgtacgaccggaggctccccgtccagcttcgggatctcgacccgcgcactgcgtgttccctgatctgtggccacctctacctccagaatatctgtattcgccccgaccgtaatcagtccggacgcatccggcgtatagcctgtaccattgacctgcacagactgcagcgtcgcatccgtcacagacagcttcagctgtaccggataggagctgcaccagttttccggctcatcctctaccgtaatgcgaagcccgctatccgctgtgacattctcactcttgcgtcgactggcaatgctgccgcccaccgcctgaaaaatcaaaacaacaagcaaaaggacaaataccgctgccgctgtgatcatcgccatttcccgtctggaaattcctttgtccctcagcgcttctatcccgtcctgtacacattcgcgcgctgccagcagcacatctgccgccgtacgcttctgtggtgcaaagcccttgcggagctcttcttccttctctgccgctgtctttctccggcgctttttcgcgttcgtgatcttaatagatgcaggatcctcaggagtatccgtggtctgctccggctgtggctgttcggccgactctgactgttcagcctgctctgacgaagtaacctgggcagtatccgttgtatccttcagctgtcgctgctcatcctgctttggcgaagcagccttagtggtatccgttgtatcctccggctgtcgctgctcatcctgctttggcgaagcagcctcggtggcatttccggtgatccgttcaaatacattctggctctccggctcgacaggcagctcttcctttggctcttcttcgtcctcatccaggtctctcaggatcgaatcccgacgcagcagaccactgcgcgtctccccatatcctgtgttccgggaaagatgctcagggtagcgtgtccccttccctttcgggaggatccccttccacgggcgggagcttaccgggcgcgcagactccgattgtggctctgcctcattctcctttgtgttctcctgcccttcttcggatgatgccgcctccctctccggctgctttttctgctcagtgggtgtctcttctatatcatcatctgcatcattcgcatcctcaagtttctcccggctgcgtctgatccgtttttttctgttttttatgcctgtcaccagtgactggatcacaccaccggattgcgcttctgcatccgtctgcatttctgttccgtcagcttctgccctttgatccgcctctgcttttggcgcttctgtgtcatctaaaggaagtgcttcttcctctgtgtcttcgtaatcgtcgtcttcttcagactcctgctgtgccctccggctttccagatagccggccgccttctgccagagccctccaagccctctgccgcccgccgactgctcttcctctttcgtaaatcgctcccgtctcgcactgatacgggcatcggtctcctccagagatcggacgaacgcatcgtcctctgcgtcccagtccgctttggtatcggtccgcttttcccccgtctgcgcatccgactccggctcatctgacatcggctcatctgacatcggagcgtctgtctttgacacacgctccgcactctcccggatactctcctgcgtgggttcttccccacgctgaagagatctcacaatttccattaactgttcgacgttatccgtctttatctttgtccgtctcattatttaaaatatgctactcccgactcaaaaatcctgaggtcctgttcaccgtaaatatttaccgcaacggaatctccacggcgctctgaatgcgccatcttaccaaatacccggccgtccggactcgtaataccctcaaccgccaggtaggagccgttcacattccactcctcatccccggcgcataccgttccctccggatcacaatactgtgtcgccacctgaccgtttgcaaataatgtttccagccatgcgcggtctgcgacaaatcttccctcaccatgtgaagccggattcacatacacgccgccaagtctggcctgtgccagccacggggacttgttgcttacgaccttcgtatataccatcttcgaaatatgacgtccgattgtgttgaatgtcagagtcggagcatccgccttctgtccggtgatcgcaccattcggaacaagtccgagcttgatcagtgcctggaagccgttgcagataccgagcgccagtccgtcacgctcattcagcagcttctctactgcctcctgcagcttcgcattccgaaatgccgtcgcaaagaattttgcagagccatccggctcatcgcctgcggaaaatccgcccgggaacatgatgatctgtgcctggctgattgcctcctcaaatgcatctaccgactcacggatcgcttctgcgcttaagttgcggaacacctttaccgtcacatctgcccctgcacgttcgaatgcccttgcactgtcatactcacagtttgtacccgggaataccggaataaatacccgcggacgcgccactttatggcggcatacatagatcttatcgatgcaataggtaccgtcggtcgtcggaatccggttcggatcatcctttcctgccagcagtaccgccgtcggtccgtccgtcggattgccatcgagatccagccctcctccgatcgtcggaagtccggactctgtcttaaatacacgctctaaggttcccttccatgccgcaagcgcctcatcgatcggaagcgctgtctcgcgataccggaatgttccatcatctgctgtatgtccgattaccgtataggtcgatgccagactgccgagcattccgtccggaacctccgctacgatatcaccgaagcctgcggtaaagaggtcacgtgcatctacatcatgagaaatctcaaatcccatgccatttccaaatgccatcttagaaagtgcagctacaagaccctttccatccaacgcatatgctgaaatcattcttccggcctgaatatcttcccggatctttgtatacagatccatgatctgtgcatagaccggaaggtcataggcatccttttcaatcttcagaagtacaagtgtactgcctgcctttttcagctccggtgtgatgatatcgcctgtcttcgctgtatcgactgcaaaggaaacgagggtcggcggtacgtcgatctcattaaagctgccggacatactgtcctttccgccgatcgacggcagtccaaagcccatctgtgcctcgtatgcaccaagcagtgcagcaaacggctggctccagcgcttcggatcctcagtcattctgcggaaatattcctggaaggtaaagcggatcttgctgtagtctccaccggaagcgacaatgcgtgcaatcgactccagtaccgcatagacagccccatgatacgggctccagctcgacagatacggatcaaagccatagctcatcatcgtaaccgtatcgcattttcctttaagcaccggaagcttcgccaccatcgtctgcgtctcggtcagctgatattttcctccatatggcataaatacagagcccgctccgatcgagccgtcaaacatctcgaccagtcccttctgcgagcagcagttcaggtctgccagtgtctccagccattttttgcggacatctgcaacctcttctcttgtaaaatatttgtctgtctcagatggcatctccacctcgacggacgtctcctgatgcgcgccgttcgtgtcaaggaaggctctggaaatgtttacgatctccttgtccctccagatcagcaccagacgcggctgctctgtgacaaccgccacctcgacagcttccagattctcctcatccgcataggcaaggaaggtctcaacatccttcggatcgacaacgactgccatacgctcctgagactcggaaatagcaagctccgtgccatccagtcctgcatatttcttcggtaccttatccagataaatctgaagacccggtgccagctcgccgatcgctaccgacacgccgcctgctccgaagtcgttgcacttcttgatgagatggctgacctccggccgacggaacagacgctgcagcttccgctcggtcggtgcatttcctttctgtacctctgcgccgcacacctcgatagaggcctctgtgtgtaccttggaggaaccggttgctccgccaataccatcacgtccggtccggccgccgagcaggatgatgatatcgcccggatcagaattttcccggatcacggcagagcgcggagctgctgccatgactgcaccgatctccatacgcttcgccacatagttcggatgataaatctcctttacatagccggtcgcaaggccgatctgattgccataggagctgtagccgtgtgctgcctcacgcaccagctttttctgaggaagcttgccctttaaggtcttcttcacagacacggtcggatctgccgcacctgtcacacgcatcgcctgatagacataggtacgtccggaaagcgggtcacggatcgcacctcccagacaggtcgctgcgcctccgaacggttcgatctctgtcggatggttgtgtgtctcatttttaaagtttacaagccactcctcggtcttgccgtcgatctcgaccggaacaacgatcgagcaggcattgatctcatcggattcctcctggtcctgcagcttgccctcccgctttaatttgcgcatcgccatcagcgcaagatccatcaggcagacaaatttgtcgtcacgtccctgaaaaatctctttgtgcgctgccaggtatttttcgtaagtaccctgaatcggcgccttataatagccgtcatcaaaaatgatatccttcagctctgtggaaaatgtcgtatggcgacaatgatctgaccaataggtatcaagcacccggatctctgtcatcgtcggattgcgtttttcttcgctctggaaataacgctgaatatgctggaaatcccggaaggtcattgccagattcaaggaagcataaagcgtctttaaggatgcctcatccatatctgtaaagccatcaaacgtgatgacatccttcggctcttcaaactctgtcacaagggtatccggcttcgtgaatccggtctcacgggaatccaccgggttgatgcagagatttttgattgcctcgaattcttcatcgataacctgtccctttaccacataaacggtcgcagaacggataatcggctcctcgtcctccttcaggaacttcacgcactgaacagctgagtccgctctctggtcaaactgtcccggaaggaactcaacggcaaacgcccgctcatcttccgcaatcggaaactgctcttcataaagaaggtctaccggtggctcagaaaatacggtactgcatgctctctggtagacttcatcggaaatattctctacgtcataacggatcagctgacggacattcgtcacatcctccacaccaaggtaactactgatttcatgtgcaagacctttcgctgctactgcaaacgcttctttcttctcgacataaacccttcttactttactcattccagacctcccggctcttgcctgtattcttctgttttgatgattcggcagtttctcgtcatctatgcgaattttaacacaagcgagcgtatctgacaagtttcgcttcgagaaatcgtgattccgcctttcacatacattcagtccactgccatacagacagttgcatctcatatacgttccgtctgtcgctcactccagaactttgcaaggcatccctgtaccgtctgcaacgtgcacgtctgcggtgcctgccactccgccgggaacaggttccggtaacgcgctgccgcaaagcgctcatccaggagtaaaatgacaccctcgtccgcctctgtgcgaatcacccgcccagctgactgcagtactttattcattccgggacagagataggcatagaaaaagccgtcctcgcctctcgcatcataaaaattcttcagaagctcccgctcccggcatacctgcggcaatcccgggccgaccacgatcgcaccgatcagccgctctgccttcagatcgatcccttcgctgaaaataccgcccatgacacaaaacccaatcagcccttccgacggtgtctcctcaaatcggataagaaatgcttcccgttccgcctccgtcattccctgctgctgcaaaatcagctgcggatgcatttcttccgtctccagaatctctgtaaacgcctccgccgtttcctccatcatccgataagaggaaaagaacaccatataattgccgcttttcgcccttaatgcttcgcagatataggtcgcaatccggcggtattcttcctcaccgcgccgcgtataccggctgctcgtatctgtcccgagcaggatgagtcgcttttccggctgaaatgtggaggtggcacagattgcataattatccggagctgtgcttaataatgatttataatactgcaccggcagaagcgttgcggagaaaaagaccgtactgcgccctttattgatacactcctgcaggtttccggagatgtccacacaataaagcttcagcataaaccgcccatccgcacacagttccgaatagatcacgtagctgtcatcgagccggtcacagacctccaggaagctgcgcgccgaaaaatagagctccagcatccgctcacctgcctctgtatccgcaagcttctccagcacctcctcaatctggccacacagattcatcagatagaccggaaagatccccacatcttcatgcaccttcagctccgtgctctcccgcttcagatccagaagccatgcattacaacgctccagcgcacgcgtcagcttccggctgtgctcttcgactgcccgttttccctccagaaaatcttccttatacaaagttgccgaaaacatttcccgtccacggtcgaccagattgtgtgcctcatccacaagaaacagatactcgccccttccctcggaaaaaaagcgcttcagcttcgcacgcggatcaaaaatataattgtaatcgcagatcaccgcatcgcaccataaggatacgtccagactcatctcaaacggacagactctccatttttcggcctgctgcaaaataacatcccggtcaaatgcatccgcggcattcagcatttcaaacactgcatcatttacacggtcaaaatgcccttttgcacgcgggcaggcatccggattgcataccatctccccgcacgggcagaccttttccttggctgtcagcgtcagcgtctttaaacgaagtccattcccgcgcaggacagaaaatgcctcttctgcgacggtccgggtgatcgtcttggccgtcgcataaaaaatccgctccgccagcccttccccgactgcctttaccgccggatatacggtagagagcgtctttccggtaccggttggcgcctgcaaaaacaggttctttttccgaaggatcgtgcgatacacatccatcgccagctttttctgaccggcccgccatggatatgggaactccagtccctgaatcgaagccctgcgaagctccctccagtctctttgaaactccgcccacttccggtaggcatctgtcacctcctgaaaccagcctgaaagctccttcgtcggaagcatttcccggaatcgccggatctcctctgtctccaggctgcaataggtcatctgcaccccgatctcatccagtccgtgctgcagcgcataaatatgcgcatagcattttgcctgcgccagatgcaccggtatggcttcttttaaggtatccggatcccggtacatgctcttgatctcatcgatccataccgtatcctgttctgtaaaaatcccatctgcacggccttcgaccgtcagcgtatacccatccccgggaagcgtgatgccaagcggtacctctgccctgtaagcgctacccattttgccctgaatctttcgatgaatccggctgccctcctgcatggcctccttctctccgagaccgccgcctttacggttgtcgatatcgcccgaccgcaggacaaattccaccagatcccgcaccgaaattctgatattcaggactttttcttccgcctccatatgcctcccccgctttctcttcatatcaatcggatattcgaaatccgcctcgcatttcatgctctcgcaatcctaaaacacctcaaatccgctcatttttctac

SEQ ID NO: 2138 - DNA, 2460 bp, Unknown
  16S sequences of unknown bacteria
cttcggcggtgttgggcaaatcaagcgcaaggccaagggccccgcgttcttcactgcttctgccgggaccttctccggcctcgaggcatccggttccaacgccggcgccgagcagcttccgtgggtcgcccccgccaacgcggtcaagctcgtctcgtccaagcccgtcgagaagagcggcgtcgatttgaccaagtctgacgtcgtcgtcgcggcaggccgtggctttgcggcgaaggaggacttgcagctcgcacgtgacctcgccgacaagatcggtgcggggctcggctgctcgagggcgtcgactggatgccggtcgagacctacatcggcgtctccggcctgatgctttccccgaaggtctacgttgccgccggcatctccggccagatgcagcatatggtcggcgcgaaccgctccgacgtgatcttcgccatcaacaaagaccagaacgcgccgattttcaagcagtgcgactacggtctggtcggcgacatcaagacggtgctgcccgcgctggtcgccgcactgtaagggtgctttcgaagaagaggaggagtgcgcttcatggctgatttcgatgcaatagtagtgggagccgggctcgcgggctctgttgccgcctacgagctggcaaaagccggcaaagaggtcctcatggtcgagcgcggcaactttgccggcgcgaagaacatgaccggtggacgcctgtatgcccattcgctcaagaaggtgttcccggacttcgagaaagaggccccgctcgagcgcaagatctgccatgagcgcatctcactgatgaccggcgactcgaatttcaccatcgacttcagctccgacgcgatggaagacgagtcgcaggcgtcctactcggtgcttcgcggaccgttcgaccagtggctcgcgtcaaaggcagaggatgcaggtgccgaggcgatttacggcatccccgtcgagagcctgatcagggacgagtccggcaaggtatgcggcatcaaggcgggcgaagacgagattaccgccgaggttgtaatactgtgtgacggcgtcaattccctgctcgcgcaggaagccgtcgtctacagcaagccgcctgcatcccagattgccgtcggcgtgaaggaggtcttcgagctcgacgagcagactattgacgacaggctcctgtgcaaccccggcgagggcgcggcatggctgttcgccggcgatgcgacgcacggcgtcttcggcggcgggttcatgtacaccaaccggacttcgatctcgcttggcgtcgttgcggggatcgaagcgtgcgcgagcaccgcaaacgcgacacccgtgtaccagatgctcgaggacctgaaaaagcatcccgcggtcgcgccgctcatcaagggcgcgaaggtggtggagcattcgggccatatggtgcccgaaggcggcatcaacatcatgcccccgctcatcggcgacggcgtgatgctcgccggcgacagtgcgatgatgtgcatcaatctcggctatatggtccgcggcatggactatgccatcgccgccggccagatggcaggccagcaggcggtcaaggcgctcgaagccggcgatacttccaaggccggtctgcagggttatgtcgacgccctcgaacagtcgtttgtcctgaaggacctgcgccagtacaaggacgagcccgcatttatggagaacttcgaccgcatgttcaacggatatcccgtcatggttcgcgacatcatgaactccatgttcgtcgtcgatggctcgcccgttacgcccatgaagcaaaacgtcatgcccatcgtcaagcgcatgggaatcatgaatatcctgaaagacgtgagaggggcgatgaaggcgctatgagcgatatgaacattaccgtgaacgttgacgagtatctggcagtcaacaagtacgaggttgacgagggcaacccgcatatcgagctcgtcgaagatcccgacgacgcagagttcgacaagttggtcaaggtatgcccggcagcgctttataagcgcgatgcagacggcgtgaagtcgttcgactacgccggatgcctggagtgcggcacctgccgcatcgcctgtggggacaccatcgtcaagaagtggaagtatcccgaggcgaccatgggagtcgagtaccgcttcggttaaagacttggaaccgaagaggtggcttcgagccgttccctgccagaaatccctggcagtgccaacactgggtggcaaaagggacgcggacgccagaaatccctggcactgccaacactgagtggcgaacgccaataatccctggcagtgccaatgttgagtggcgaaatgcccgcggatgccaaaaatccctggcagtgccaaagctccatggcgtgcgggcctttatcgccaattatttctggcagtgccaatgctgggtggcgggcgccagaaaaacctggcactgccaatcctgagtggc

SEQ ID NO: 2139 - DNA, 24184 bp, Unknown
  16S sequences of unknown bacteria
tgattctacgcttgcggtgttgtcggacagcttttccacaagagtgctgaagagctcctccgcggcggatgcgtcaagggtatcgggaatcgagaacacgcttgccttgtaggtggacgcgccggttttttcgtaggtatagtcgaatccgagcgcctttatcttgtccccgtattcctcaagcgcgactatctccggcgagagcagtttcagctctatcggggagagcagcatctgtcctcctatcgcggttttggagccgtcacgcagtccctctcgcatttttcggcaaagctcgtcgaagattattctctcgtgcgcggcgtgcttgtctatcatgagaatctcctcgcctatctgaacgatgacgtatgtattgaacgcctcgccgattataaggtagtcgggaatcttctttgggtcaaatgcgcaaatctcggcatagggatcgttttgcttggcaatatacggcatatcgggagcttttgcttcatgcggagttttgacatcagcaggtgtttcttcgattggagtctgtatttcctctacctgctctactcgtaccgcttccgtcgactgctttacctcttcacgcgggatttcttccggctttgcgtgagcttctgatgactttgcataaactgcggctgacttgaaatccggcagctctatatccgtcgcaggcttttgcgcagttttcgggcggctgagattgtatttttcatacacacctgagtagtcgggaactttcggctcggcttttttctcctgcgcctgtgaagcagaagtaccgctcggtgcgctcgtcattgttatctgatcagctcggggtctcggcttgtcaagcggtgcaaaagcgtttctgagctgttccgtggtatatcccgacgttgttttctgtgcgggcgtgtgcatttcaagctcgggacgttttgccgcggcttcaagggaggtgagtacggcgtaatatatcgcgtcgaatatcaccttttcgttcgcgaactttacctcgagctttgcgggatgcacgttcacgtcaaccgcggcggggtttaatatgatattgagcacgcagaacgggaatttatcgtgcggtatttttgaagcgtaagcctgttccagtgcggctgaggcggtttttgacttgatgtagcgaccgtttatgaagaaattctccatatttcggttcgagcggaacatatcggactcggacgtgtagccgacaatgcgtatgccgttttcctctcggtcgactttgagcgcacgggcagcggtatccttgccgaagagcgcccatatcgcttctctgagctctccgctgccggaggtcatgaacttcacctcgccgtccgagatgaacttgaacgatatctcagggtgggacagcgcgattttttctactactccgccgatagccacagcctcggtcgagtcttttttgaggaattttcgccttgccggaacgttgtagaataaatcctcggcaatgactgtagttccctccctgcatcccgtgtcggttatgtccttgattctgccgccgtcggcttcaagcagtgcgcccatctccgctcccggaacctttgaatatatcctgagccttgacacggacgatatcgccgccagcgcttctccgcggaatccgagagttgttatcgagtcaaggtcctcggcggttttgattttgcttgttgagtgcctttttatcgcgggagcaaggtcgtccttctcgataccgcacccgtcgtcagccactcgaatgaacgcgactcctccccgctgaatctcaagtgtgatatggcgcgctccggagtctattgcgttttcaagaagctccttcacagcggaggcaggtctgtcaacgacttctccggcggcgataaggttggcgacttcaaagctgagtaagtttatttttcccatttttacagcattttcttcagctcatagatgaggttcagcgcctctatcggtgtgagcgtgtttatatcggttttgcggagcttttcggctatctcgtcgttaataatgtcgccgaagctcatggaaaccacttcgttctcctgtgctttcgcggctttcttcggagcgggtacagcgcggtttccttcgagtgaggcgagtatctcctttgcgcggcgcgttatctctcccggaactccggcaaggcgagcaacctcgataccgtagctgtcgtccgtcggtcctttcacaatcttgcgcaggaacgtgacgtcctctccgcgcttctttgccgcaacgttgtagttcacgactccgcgtatctctccctcaagggaagtcagctcgtggtagtgcgtcgcgaacatggtctttgctccgatcttcttgccgacggtgtattccgcaacggctcttgctatgctcattccgtcgtaggtggatgtgccgcgtcctatctcgtcatatacaatgaagctgcgttttgtcgcgttgttcaaaatatatgccacctcgcgcatctccagcatgaacgtggactgtccggaagcgaggtcatcggacgcaccgacacgggtgaacagcttgtcgacaattcccactctcgcggaagccgccggaacaaacgagccgagctgcgccatcagaataataagagcggtctgtctcatgtacgtggattttcccgccatgttcggtccggtgattagcatgagcgtgttgtcggaggtgtcaagatacgcgtcgttcggcacaaaatacgcgtcgtcaacgaatttttcaaccacggggtgacgtccgctctttatgtctaccacatcgctgtagtcgaccgtcgggcagacatatccgttctgtacagctacgtcggacagggagaggaacacgtcgagctttgcaagagcttccgcagacgaacgtattctcacggaggaattgttcacctcatcccgtatgccggagaaaatctcgtattcgagcgatttcagcttatcctccgcgccgagaattgtcgcctccatgtctttaagctcgtccgttatgtatctttccttgtcagagagcgtctgttttcttatgtattcctcgggcattttgtcggcagccgagcgcggaacttcgatatagtatccgaaaacgcggttgtagcctattttcagcttctgtatgcccgtcttttccctctcgttctgctcggcggttttaatccagtccttgccgtttgacatgatgtatctcagctggtcaacgtcggcattgtacccggactttatcatgccgccctctcgaacgacaaacggcggattttcctcaatggatttgtcgataagctcgtatatgtcgccaagctcatccattccgtccgcaatgtccttcagcgcgccgctcgttatacccgagagcatcttttttacgtccggcagtatggaggcagtctgtgcaatagctctgaggtcgcgcgcacctgccgtaccgtaggacacctttgtcacaagtctttcaaggtcaagaaccgaagtgagcttttcacgtatctcctcgcgcagcatgaagttgtccacaagctcggcgaccgcttcctgtcgtgagattatctcggcggcgtttgtgagcgggtgctctatccactgcctgataagtctcgcgcccatggaagtctcacatttgtcgagcacccagagaagtgaaccgcgcttttcctttgtcagcattgtctcgcaaagctccagattccgtcttgtggaaagatccatctcaagataagcggaagaatcgtagaacgacagctttttcagataggaaatgtcggttttctgagtttcggcaatgtatttcagcgccgctcccactgctatgacagccgaacgcggtctgcctgctatagaatcggtcgagaactgcttttccgcgcgctctatagcctcgtcagggtcaaaatagtccgtcgcggcttcggtgagcagtaccttcatgcgctttttgacgtgctccgctaccttcggaagtgatttcgcggcgcagcttaatattatctcgcgcggggaatacgtggaaagctcatttataacgtcctcctcggaatatctgtcgcggaaggcagtcgccgtcatgaacgcggtggagatatccgagaagcacattcctattgagcttccgtcaaagtagattgttgcaaggtagttgtttgctctttcgttgagcaggtctgtttcgatgagcgttccgggggttattatcctcgtaacctcacgcttaacaaggtttttcgccagcttcgggtcttccatctgttcgcagatagcaaccttgtaacccttttcgatgagctttccgatgtacggctcgcacgaatgatacggaactccgcacatgggcgcacgatcctcttcaccgcagtctcgtccggtcagggtcaagtcaagctctgccgaagccgtctgcgcatcctcataaaacatctcgtaaaagtcgccgagacggtacatgaggatatagtccggatattgattttttatttcaaaatactgctgcatcatcggggtcatgcgaaaaaacctctgtgttaattatagtttatagaatatttgtcctgtctgaaactcagtgacagccgcaggaaccgccgcaggatgagcagtcgtgtgagcagggacgttcgcctgtgataacaaactgaagctccgcgtaaatctcctgtgtgagcgcgtcaaactcgttcttcgccgctacgtaagctgtgtatacgggatgagttgtaatctggtcgtagagcgcgtcgattcttgcctgaacagcggacttgaactcttcgcttgcggtccggtctccctcgggcttgttgtaagcgtcggcaaggaggttctgctgtgtgttgtattctccgatgagcgcggtgagttcttccgaatgctcgtagtcggatatggtggactggattctttcgtcagccttaacgagttctccgagctttgcgatgacctctttcatttcgggtgtgagcttttcttccattgtgtttctttcctttcagaatctttatataataaatttttttagcttaaatcatttcgccgtgcatgcagaacgtttccgctcccgttatcttaacgtcgacaaacgaacctatcttctccttcggtgcgcggaaatgtataggacggacgcagtctcccctgcctgtcagcatatcggggtcggttttgctctctccctcggcgagtatgcgcatggttctgccgacaaaccgctcgttcttctcgtccgatatcgcgttttgcagcttcagcattctctcgaatctcgcggtagacacttcatgcggaacctgctcccactttgccgccggagttccttctctcggggagtagatgaacgagaaaatcatgtcgtatctgaccttctcgagcatatcgagcgtgccttcaaagtcctcttccgtctctccggggaagcctacgattatatctgacgtcagcgaaacgtcaggcacaagctcgcgcagtcttgcgattttggtaagatatgcttccgtggtgtagcggcggttcatgtcgtgcagaatcttgtcagagccggattgcagcgggagatggaagtgctttaccaccttttcttcctccgccatgacacggaataattcctccgatgcgtccttcgggtggctcgtcatgaatctgagacggaaatccccctcaagcgcgcatatctttctcataaggtccgcaatgctctcgccgttctcgcctttgtaggagttgacgttctgtccgagcagcgtgatgtcctttgcgccgcagtcgatgagctgccttgcctccgctaagatatcctcggcagagcggcttctctcgcgtcctctgacatacggtacaatgcagtatgtgcagaaattgttgcagccatacattatagacagccatgccatatgctttgatgagcggttcagcggcactccctcgtctatcttccactcctcgctgagcacaaacgagcgttttccgccttcgagagcgttcagcacaagctcgggtatgcggtgtattgctcccgtgtcaaaggtgaacgagacgtagggatagctcattttcagcttgtccgcgcggcttttctgcgttaccatgcatccgccgacacctatcacaacggaaggatcggcgtccttgatgtgcttgtactgtccgattattgaaagcgccttcttctccgcgtgctcacggactgcgcaggtgtttacgagtatcagctttgcgtcctccggcttgtctgcgggagtatatcccatcatggtgcagtagccggcaagtctttcgctgtccgcttcgttctgctggcaaccgaaggtctggatgtagtatttcttctccccgccctccctgacgagtttcttcaccctctcggcaagcttcagctgaggcgcgacctcgttgtctattatctttgcttcaatatagttctcttgcattatatatccttacttctttatttcaaatttttccgcgatgccgggagttaaaactatctctccgtcgctttttaccataacggcttcaaaggagattttaccctcgttgtagaactcaagagccttgtccgctcccatgacgaaaagcgcggttgagagtgcgtcggcagctgctccgtttgacgaaactaccgcgacgcttgacagtccagactccgccggatatcctgtcttcgggtcgattatgtggtggtatctctttccgccccactcgaaatatctctcgtagtcaccggacacggacacgaatcccgaaccgaggtagcagtagcctatcacgtcagaggtatcgtgcggatcgcgtattccgattttgtagtcctcgccgcccggcttctttccgaacactccgatgttgccgccgaccgacacaagtccgtattccacgtcggtagtgtcaaggtattcgaggagctgctgagccgccattcccttgccgataccgccgaagtctattttcaccgaaaggtcaagctttgatattctctttccggttatctttattttgtcccttccgcagtgggagagagcttcgtttattttcgtctcgctcggcggcgtcgtgttgtgtgtgacgtcccacagctccgtcagacatccgagggtgtagtcatacgcgccgtttgtcagctccgccacagtttccgcggtatcgagcagggagagcattttgtcgtcggccgaaaggatatagtcgtagtcggagttcaagcggtacacgtcgctgttttcgttgtggctcgatatagcggagtctatgtcgacgagtatcttcgagcattgtgcggcggcagagtcaagataatctttgccgagagccgctccgtccttttcccgcgcgagctttattgtgacgtaggtgtccattataaagtagttgtattccgcgtattctccgctatctcccgcgcctgagcatgacgagaacaagaacagtacggagataacggaaagcagaagcgaaacaagccttttgctgtattttgaggtcagcataattatacctcgtttttgaatattttgtccggaatcagcgtgatgaggaatccgcacagcgcaccgaacacagccgacgcgaacacaagcacgggagcatacgaaagcactgccccccctgcggtgatatatgcggctgcgagctgtcctgcattatgtgagagcgcgcacaggacggatattccgatgaagctgagcccgaggttgtgttttttcagcacggcaagggtcagaagagacagcgccgagccgaagatggaaaaaagaagcgatgtaacattcccgaacagcaggaacgagatgagaatacggcaaaacgacacagccgccgcgtcggtcacaaaataacggtaggcacacactgtcagcgcaatgttcgtcagtcccagcttagctccggggaaaacaaacggcggcagaaagctctcgaggtacgacagtgcaagcgcgagacacacaaacgccgcgtcaaaagccagccgtttcgtctttgcatcggtgcgcatatttcccccttatccgaccgttccgtcagagctttcatccgtgccggagactgtcacaacaagatgtcccgggatgcacacaatcgactcgccggaatgggatattctcccgcttctcacgcagaccttgtcgggacagtcggaatatgttacagctgcttctccgttttccacctgcagaacgtagtgatattctcccgagacaatgctgtattcgccgtagttttttaagctgtaactcatctcggtgccgtcgcagctcactatgacgcgctctcccgatttttttccgatacttttcggaagcaggagaagaacgccgaggataatcacgcaaaaaatgagcaggatatctcgttttgttatctttttcgacggcagcacagcattcctccgtgaaaacacaataatactatgatattatacacgaaaagagcggaaaagtaaagagcattttatataaggtatgattttttacgaaatcgtcaaagaaaaagaaaaagcagacccatttctgaatctgctttatgcggaaaacgggacttgaacccgtatggtgtgtaccacacgcccctcaaacgtgcgcgtctgccagttccgccacttccgcattcgtctcgtgagatgttctctcgctgacgaatgatattataccacagctcgccggctttgtcaagtgaaatgggaaaagatttttgtatttttttgacgacattccctccccctcaaaaaacaaaataaatattgcattttcccgccaaatgatgtataataatacgatttaattgcatcgggggaatgtatagtgaacggttcgggaaatgatcttatcgcacatattgaagaagctatgccaaagctgtcgaagggacagaagaggatagcggaatttataattaacaactacgacagggcggcttacatgactgcctgcgctatgggaaacgaggtcggagtgtcggaatccacggtcgtaagattcgcaaacgagatgggattcgacggctatcccgagcttcagacgcagattcgcgatacggtgcgcgtccgtctgacctccgtacagagagtgaacgccgcgaaccacaggatggacgaggacgacgttatcgaccacattctcacagcagacgcggaaaaaataaagtccactcttgaagggatagaccgcgcggcattcacaaatgctgttgacctcattctcggcgcgcgaaacatatacatcctcggtatgcgctcttcggctattctcgcggagttcatgaactactatttcgggcttctgtttgacaacgtgcggctgatcagaccggcgggcggaagtgaaattttcgagcatctcatgaaggttcacgaggacgacgtttttgtctcaatcagcttcccgcggtatacaacgacaattgtcaacgccacggaatacgtctcgaagacaggagcgaaggtcatagcgataaccgacacgctctcctcccccatagtcccgcactctaccgtcacgctgaccgcaaaaagcgaaatggcgtcgtttgtagactcacttgtcgctcccatgagcctgattaacgcaatgatagcgtacatcggcaagaaaaagcacaaggaagtcacggaaactctcggacggcttgaaaacgtatggaaggaatacaatgtttacacaggtagtgacggggggcagaaatgagtaagctttatgacgtcgcggtagtcggcggtggtgcggcgggaatgatggctgccatatccgctcacgacaatctctggggcggaagcgtagtcataattgaaaaaaacaaatacacaggccgcaagataggaatcacgggaaagggcaggtgcaacctcacgaacaactgcacggtgaacgagcttctcgaggcggtgcgctccaatccgaagttcctctacggcgcggcaagcagattcactcccgctgacacgatggattttttcgagggcatgggagttccgctgaagaccgaacgcggcagaagagtttttcccgtttccgacaaagcctccgacatacagtttgccttcgacagagctataaaggagcgcggaatagaggtaagatacaattccccggttcgtgctgttgaagcgagcgaaaaccgttttgccgtcacgacctctcatgaaaaggtggaagcgaagacggtcatcatctcaacgggcgggctttcctaccctctcacaggctccacgggcgacggacacaggatgctgtgcgatatgggagtaaagattacgccgctctccccctctcttgtgccgatagagacgcgcgaggactactccgacctctcgggacttacgctgaaaaacgtgcggctgacggtgacggacaaaaacggacgcgaggtatacactgaactcggcgagatgctgttcactcatttcggagtgagcggtcctctcgtgctctcggcttcggctaacatgcagtcgttcccgcccgagacatacaagctgaaaataaatctcaagcccgcgctgacggaagaagagcttgaccgcagactcatctcggatctcggcgaaaactcggctaaggatttcataaattccctcggaaagctgctcccgcaaaagctcattgaaaccgtagtttaccgcacgggagtagatccgcacaaaaaatcggctaacgttacgcgtgaggaaaggcaggctctgctcgaagttctgcgcggctttgagataggcgtgaagggatttcgtcccattgaagaggcgattataacctcgggcggcgtggatgtgtccgagataaacccgaagacaatggagctgaaaaagcaccccggaatattcgtcgcgggagagcttatcgacattgacgcgtatacgggcggatacaatttgcagctggcgttctccacgggtcatctcgcgggaaaaagcgcggcggaaaaagcacttgcagcagattaaaacggatattttcagccgacaatagtgaacagtacagtatttttggggagttaaacaataatggacaacagattttctcacataagagttgcgcttgacggtccgagcggcgcgggaaaaagcacgatagcaaaggaagtcgcgaaaagaaccgggcttatctatgtcgacacgggcgcgctctacagaaccgtaggactttacgccgccgagcacggtatctcagcagacgacacggacggaataatctcctgcctgccgcacattgaaataaagctcgcctacgaggacggagcacagaaggtatatctgaacggctcgtcggtgggagacaagatacgcacggaaaacgcgtcctactatgcctccgccgtgtcgaaaatacccgaagtcagagcgtttcttctcggaatacagaaaaagctcgcggacgagggcggggtaataatggacgggcgcgacatcggcactgtcataatcccgaacgcggagctgaaggtattcatgaccgcatcgacagaggaaagagcgagacggagacacaaggagcagatagaaaagggcatcaacgtgtcatacgaagaggtcctcgacgcgataataaagcgtgacaaacaggacagcgaaagagaagccgctcccctgaagcccgcagacgacgccgtaatattcgtgaacgacggatacggtatcgagggttcggccgaatatataataaaactaatggaagagaaaacaaaatgagcttttacacatggttttacaagacgtttgagccttttgtttcgtggctctacaaaattgacgcgcacggagtggaaaacatccccgacggcggcgcaattctcgcatcaaaccacacctcgttctcggacgtgctcgtgatatccgcggcgtcaaagagacaggtgcgctacatggcgaaaaaggagctgttcaagacgcccttagctccgcttataaaggctctcggcgcgtttcccgttgacagaggcggcgcggacgtaaaaagcataaaatacaccatctccctcatcgagagcggcgagcttgtcggaatattcccgcagggtcacagacacggtggagaggacccgcgcaaaaccgagataaaagccggagtgggattcatcgcctaccacacaaaagcgaagattgttcccgtgttcatcgaaaacgacagaatgaaaacgggaatattccgcaaaaatcatgtaacgttcggtactcccatcagctttgacgagcttgaattcacaaagggcggacgggaagaatacatgagggcgtcaaggataattttcagtcacatctgcgcgataaaatacggggaggatgagctgacaaaggaaaagccgctcgcactgcccgacaaaaataacgcgcccgagccgctcactccgctgaagacccgcgaaaaggaagaagaaaaatgagcataagaatagcatctcacgcaggcttctgcttcggtgtgcaaagggcggtggacaggcttgagaaggctctcgagggcgcgagaggaactaaccgaaaggtatacactctcggcaggataatccacaacagccactacatagagcacgtaaagtctctcggggcggaggaaatatcgcgcggtgacattccggagataatcaggcgcgccgacgagagagacgagataacggtagtgatacgcgcgcacggggagcttaaagagatatcggactcgctttactcctgcgccgagaggaatcccgccttcacgctgatcgacggaacgtgtccgtatgtgagaaaggtgagggacatcgcgcgggaaaactccggagacggcaggatatttctgcttctcggaaacgccgcacaccccgaggttgagggaataatgagctgcgcggatggtgaaaagtacgtctttcccgacgaaaaatcactcgaaaacgcgaaaatttcgttaaatagtgccaatttttgtgcaaaaacgctatcagtcgccgcacaaaccacacaaaatttagcggaatggaaaaaaagtataaattttatcaaaaaggcatatacaaacgctttaatttttgatacaatatgtaatgtgacccaaatgcgccaggaagagtgttccgctcttgcaaaagaatcggacgtgatgatagttataggctgccgcgacagctcgaattcaatgaagctgtacgatattgctcgtacatcctgtaagcgcacgtactttatcgaaggaatagaagactgcccgaagatagacgtcacagatttaaaagtgtcaataactgccggtgcatcaacgccgtacagtttaatacaggaggtatataaaaccatgaacgagcaaaatgaaaactttgccgaacttctcgagtcatcacttaaaactttaaatacaggagatatcgtcgaaggcgtaatcacgtccatttccccgaatgagatccacgttgacctcggtacaaagactaccggcgtaatcgtacacgacaaagcaacagacgacccctccgctaagcttgatgagctctacaaggtaggcgacacaatcaaggctaaagtcgtaaaggtaagcgacatcgacggcatcgcaactctcgacaagacaagagtagattccgaatccaactggactaagatagttgaagcctgcgactccggcgaaacactcgaaggcaagatcgttgaagctgtcaagggcggcgtcatcatctccctcaactccgtaagagtattcatccccgcatctctcacaggcgttccgaaggacggagacctctccacactcgttggaacaactcagaaggttaagattatcgaaatcaagcccgagagaaagagagcttacgcatccatccgcgccgtactccgtgaagagagaaaggctaaggaggacgcattctgggcaacaatcgaagaaggcaaggaatttgacggcgaagttaagagccttacagatttcggcgcattcgttgacctcggcggcgtagacggtatggtacatacctccgagctgtcctggagaagaatcaagcatccttccgaagttgttaaggttggagacaagatccatgtatacgtaaagtccttcgaccgcgaaaagggcagaatctctctcggctacaagacagaggaaatgaacccctggtacatcttcactcagaagtacgctgtaggcgatgttgcaaccgttaagatcgtcagccttatgcctttcggcgcgttcgctgaaatcgttcccggctgcgacggacttatccacatcagccagatagcagaccacaaaatagctaagcccgaagacgaactccaggttggtcaggaagttcaggctaagatcacagctatcgacgaagaaaaccacaaggtaagcctctccatccgcgctctccttgaggaagaagcagaagaggctgaagactccactgaagaagtaaacggcgacgaggaataatttttacactgagggtacactgagctgaccgtttaacgacataatcagagtaccttggaaggacgggagaaaactataacggttttttcccgttttttgtgttatgtgatatgaagaaaagattaattattgctctctccgcgctgtttgccattaccgccgtcatccttgtctcatgcggagaatacggcgctccgaagataagcatttcatttgacaaaatcgttcatgcgggcggtgagctttggggagtggacagcgaaggcacatttcgctcatttttcggctcaaattcactggaaggacttgaaaactgcgtcgcgaacggctataatgctattgagcttgatttcaatttcacctccgacggtcatctcgtctgcatacatgactggagcgcggagtacatagacaccattgagaccggcactcccatgtcatacgatgaatttatgtcgtcgaagatattctggaacttcacgccgcttgatatcgaagccgtcggcgctttcatgggtgagcatcccgaggtttacatagtcaccgacataaaggagcgtttttccgaggctgtcgacgctatatccgccgcgcttcccgagctgaaggacaggatagtcgtgcagatatacgaaaaggacgactatgaaactgcgtcgaatgcgggatttacaaacataatcttcacgctgtaccgcctcgactggcagagcaagaccgacgccgccgaccttgtgaaatttgaaagaagccacccgctcatcggcttcaccttcgcaaaagagctgtgcgacgagaaaagctacgtaagcagaatgagcaaagcgggcgttcctctgtatgttcatacggtaaacgaccccgccgaaattcagaaatatcacgctatgggagtgtacggagtatataccgacattgtaagcgagactccgttctctctcggctgatttaaataagaaatttttatttacaggaggactaaaaatgtctattccaagaaatgaatacccccgcccgaccctgcgccgtgacgacaaaacatggctcaacctcaacggtcagtgggaattcgctttcgacttcggcaactccggtcgtgacagaaaaatgtgggaagcgccgagatacgaccacgaaatcaccgtaccgtactgccccgaatcaaagctttccggcatcgagtacattgactttatccccgcctgctggtacagaagagaagttactcttcccgaaggctggtgcacagaatgcggcagagttctcatccacttcggcgctgtagattactattcggaagtcagagttaacggcaagctcgcaggcacacaccgcggcggcttcactcccttcgcagttgacgctacagaattcctcaaagacggagtaaacacaatctccgtattcgctgaggacaacggacgcaatcctctccagccgacaggtaagcaggtttactccagctactacaacgtcgcctgcgactacacacgctgcaccggtatctggcagacagtctggatggaatacgttccgaagaactacataaagaccacaaagatcactcccgacatcgacaacggcaaggtagacgttcttgtaactctcgaaggcgacaattccgctgtagcagaagttaaagctgtagctaagctcgacggcttcacggtttccgaaactgtagctaaggtttgcggcaaatccgctcagttcgagcttccgattcccgacgctaagctttggactcttgaagagcctactctctacgaccttgagcttgcggcaggacaggatatcgcagtcgcttacttcggcatgagaagcgtcagcatcaacggctccgctattgagcttaaccacaagcccgtattccagcgtctcgttctcgaccagcagtacttcccggacggaatttacaccgcaaaggacgacgaaactctcatccgcgacatcgagctttcaaaggcggcaggcttcaacggcgctcgtatgcacatgaaggtgtttgaacccagatacatctatcacgcagacaagctcggctacctcctctggggcgaattcccgaactggggtcttgacgaaaaggatcccgcttcccttctctccatcgttcccgaatggctcacagaaatcgacagagactacaaccatccttccatcatcggttggtgtcccttcaacgaaacaagcgaaagacgcaacaaggacgttctcagaacagtttacaacctcactcacgctcttgatcccatgcgtcccgttatcgacacatccggatacgttcacgttgttaccgacatctacgacgtacacgactacgaacaggatcccgctaagttccacgaccacttcactgctctcgtaacaggcgaaggctctcccttcatccacaatccgagacacgaaaagtatgagggtcagccctacttcgtatcagagttcggcggtacatactggaacatcgacgaagatccctccgctgcatggggttacggtcaggctccgaagacaatcgaagagttctacgaaagatttgaaggactcatcaacgtgcttctcgacaacccgaagatctgcgcgttctgctatactcagctcaccgacgtatatcaggaaaagaacggtatcttcgcgttcgacagacgttccaagttcgacctcgaaaagctccacaagattatgtcaaaaaaagcagctatcgaaaaataatagccaaaacaaaagccatagctttgatttttgcgatcaaaagctacggcttttttgtttttacggattgcacttcttgcacggaacgtatccctgcgctattgccgaggtgtagtcgtcggttgtagagtaattcttcggcttgattttctcgaccgagctgcacgacgggtagtgaatcttctttgtgtttgtgttcagtacgtatgtcacgccgtttgtgtcgtgctcgtatgtgccaaacgggttattgtcgccaatgctatatcccgcggtgtcggagctcactgtagtattgcccatcggaacttcgcactcgtcgttcatgctcatgacttcaagctccggctgtggctgcggaggaatttcatatatcggctcggtttccgtatcgtaggtgagctccatatccccgctgtcggtttcttctggttcaggctctgtctccggctgcgggataggctcaaacggaagagcgactgtggactcggcttctgtctcgggtggagtttcaagtatctgctcaggctcgggagtggtttcaggtgcgggttctgtctccggctgagtttccggttcggtttcaatctctgtttccggctctgtctctggagcggcagtttctggagcagtttcgggaactgtctcagtcgtcggcggtacggtttcaagcggctctgcggtttcaggctcgtctccgctgtctaccatgaccttctgcttcggagtgagcacgcttccgtctgtcgtcattgcgtaaacataagtctcgcccacgcttaccgcagtcaccttgtagcagaggaatatatccgcgcgcacttcttcaagctctatctgcgctacactttcgtcctcgctcacaaaaaccacgtcatccggtgagaagaggtcgaggtcgcgcatattcggactgacccatccctccgagacctctcccggaagcattacaagctcatcccccgacagctccggacagtcgaaagaggtaatgtccccgccgccttccgttatctcagcacagccgaaaagggatagtgccgcgagaacgacagcgcacagcttcagtattttctttttcatttgtaccctcggtgttttcaaatcagcagttttctaaaattctctattctgtggaaaacactgtagttcgcgtcgtggtagttggcggctccgttgaaggcagttctcgacagcatcaaaatgtcctcgccttctatgaaaaagtcaatgtactgaaacccgattttgttctcgtccgagtcgcggtagtcgaaaatgtcgagcgcctttttccattgttcgaggtcgtcggagtatatcagcgcaagccagttcctgccgctttggtgctcctcacacaggtagcagactatcgagacgtactttccgctgacttcatcacggtatatttcaaacttcgcgtgattgcccgggaactctatcaccttgtaaaactcctcgggcgcgtcggggtctgtcgtgttcggcttcattatcagcgcaagtccgtatgacggcacacatccgcctatctggtaacgcagaacgttcagcagttctccatcaggtgagacgacgagagtgccctcaatgttcccggctgacttaccttttgcgcatccttcccagcttgggtcatacggtacgggaggggagaaatgccactttgacgcgtcaagcaggttctcgttctcgtcgattgaagccaccatagtcgcgtgtgaaccgcttgcccagcttccccattcgagggtgttccaaagccgcccgttgtatctcacgatattttcgggattgcggtgtactccctttccgcaggagcgatatgttcctcttagaagcacggtcggcataccgaatgtaactccgccgtcgctgctctttccgatgagcatatccccgtattccgtactgcatccgagcatatataattccccgcggtggatgaacatcttcccccaaaagcacgggaacagctcggatatgtatttccatgtcttaccgtcgtcgtcggagcggaaaatcagcgtgagatcctgcgcttccccgcccttgaacacatccatagacgcaagcaaaaatccgtctggatgacgcacgagagaaggactgcaaagatactgccccgaaaagctgtacgcgccgtcctcgggatgaagatagttgactacgctctctcccggaacctttcccgttctcgcaagtctgacgcggctttttcgcacagcagtgccttccttcgcacacacataaaactcgtagtccgtttcgtcctcaagcccgccgagagtgaatgtcgtgccgctcaccttgtattgggaatactccccatctccgcgccgccgtatgttcaccgtgtagtcggaaacgccgtcaagcggaagccagtcaaacgacactcttccctctcccggatacacgcggcatatgtaaatgtcccccgtatcaaacaatagcggcttgtacggatgaaagctccatcttgttacgcctgtcatagttttctcacctctttataaaatgcagaaccacggaatctccgtcgcggtagtttttcgtcagatttacaccggcgttcatcagcgtgtctccgtgatatacctttccgctgctctcttcgatgtactccgccgtcgggtcaagtcctcgcagctttacaaagtacacgggatgaacggaggtacggattaccacaaacgtaaacagagcttccgacttgtcctccgagacgtacatccacgacgcgcactttccccgctttccgttatagctgtcgcttggcatgatgagcctgtacaagtccccgcggtttattacgctgtagaatctgtggtagtcctttacctgacggcgtatgagttcgcgctcctcgtcggtcagattcgtgaggtcaagctcatatccgaacgcgcctgccatagctacgtttccgcgggtcgtgaatgaggtaactctgcccgtctggtggtttggagaagcagaaacatggcagctcatcgacgacgcgggataaaccatggatgtgccgagctgaatatcaagccgttccatagcgtcggtgtcgtcactcgtccaatactgcggagagtagtaaagcatagcgggatcgtatctgccgccgccgcttgaacacccctcgagcaggatatgcgggaacgctgttgtaagtctgtcgagcaggtcatacagtccgaggacgtagcggtggtaaatctcgccgcctctgtcaccatcaaggagcaggcttcccgcttcggtgaggttgcggttgaaatcccacttcacatattctatattcgcggaggacagcacgcccgatatcgtctcaaacaggtagtcgcgcacgtcctctctcgtcatgtcaagcacatactggcttctggatatagaaaggtcgcgtccggctgtcataaggcaccactcgggatgctcctcatacaggcggctcgcgggggatatcatctccggctcaaaccatatgccgaacttcagtccgaggtcgtttatcttcttcacaaggggagaaagtcctccgcgcagcttttcttcgttcacgaaccagtctccgagggaagaggtgtcgtcatttctcttaccgaaccatccgtcgtccatcacgagcatttctataccgcagtcagacgcgtcctttgctatggcgagcagcttttcgtcgtcaaaggcaaagtatgtggcttcccagttgttcacaagaatcggtcgctcacggtcagcccattctccgcggcagaggttctttctgtacagcttatggtacgtgcgcgacatttttccaagaccctctcccgacatcacaagaaccgcttcgggagtgacaaattcctctcccacgccgagcttccagtcaaatccgtcgggagaaatgcctgccataagtctgactaagccgaaagcgtccgtgtcgcaggttatatcgaagtttccggaatacacgagcgagatgccgaacgccattccatgctcttccgtagtctcggaggtgacgagagccgcgaagggattgtggtggtggctggatgcgccgcgtctgcttgaaaccgataccgaaccgtggcagagcggagttctctcggcgtgtctctccctgccccatgttccccagaggtggaggagctgcgcgtcgggatctaccgttgtaaagtcaaccgaagcactgtacgcacgaaggatatgcgcgtcggcttttgttttgttgcggataacggtacggcggcagattgcgggaagctcgcgcattacggagtagtacaggtcgtattccattccgcttgccgagtccgagcagtgcagaacgagcgtgtcgcattcttcctcattcgcgtgaacggcggggcatttgtcgagaacaggcttgccggggattaaatcatagctgtcgtatctgagcgcggtgttcggagcggcggctgactgaacctccgactttgtctgcgccttcaccataacagcggagggtctgaagtctcccgtaccgaacgcgggatattcaaaaggcgcgacgtcgcacgagaaccatccctcgggagtatcggcaggtcgcggaactacggagtcatgacctactttcacgagaagatatgtcacgtcatcgtcggatatcgcatctcccgcatagagatgaagcagaaagccgtggaacgagcataaaacataggatgcgtctcctgcgcggaggtgaaaaacaggctcgtcctgctgtgttgtcgtaattttaatcataggtttacctttcttgcggcataatatttgagtttattatacaatatctacacaagcgctgtcaaggatatttcactcatcggtgtaatgtgaacaaaaaaagagacacagcgcaaagccatgtccctgaaccttattttttcatctgccttgtgaacagcagtaccgcgagaaatgtgaacagcaccgcgtatcccacaacccacaatagatgcggcataacgtccccgaagctgcccgagactactgctctctcaagctccaccgcatgaacgaaaggcagagcatatgcaatcttacggaaagctccgcctacgaggtcaaggtcaaaccaaactcccgacagccatgccgtaagattcgtcagcaaagctccgcataccgcgcctacctgcttcacgctgagtatgctgccgaacataagcccggcagaaatgaagaacagcgatatcggaatgacggcaagaaccgcaagcagcacattcacactgagcttcagtccgaggacagccgcgacgacgtagcatatcacgctttgagctatcgctatcggaacaagcggcagaagatatccgaggatgaagtcggctgcggtgagcggagtggtgtaaagtcttgagagaaacgcgctctcacggtcctttgccacgagacttgccgcgaacagtgtgataaacgcgagtccgaacacggcgattccgggagagagcttttgtatctcgaaaaggctgacggggatattcacctgaatagtggacagaagcagcaaaagaatcacgggaaagccaatgccgaagccgaggtttaaggggtcgcgcagtatctccttagcggtgcgttcggaaaaacaaagcattctcattttctctccacctttactatcgcaatgaacgcgtcctcgagcctgtctttgcccgtgattttctttatctcccccgcactgccgaccgtgagcagacaaccgtccttcattatgcctatcctgtcggaaagctcttccgcttcttccatgtagtgcgtggtgagtatcaccgtaaccttgcctttcagctcacgaatgctgtcccaaagctcacttcttgcaagcacgtcaagtccgagcgtcggctcatcgaggaacagtattttcggctcgcttatcagtgccatggcgatactcagtctgcgctgccatccgccggagagctttcccgcctttttatgcattacggagtcaagaccgaaccttgcggcaagctccgtcacttttgtccccgttttcgccttatcaaagctatgtatgccgcacatgagcctgaggttttcttctaccgtgagattcggcgcgacggcggtttcctgcggagagacacctatgacggattttacctctgcggcgtccctgactatgctttttcccatgaggaacgcgtctcccgaggtcggttttgtcaggcacgagagcatttttatggtggtggttttccccgcgccgtttactccgagcaatgagaaaagctccccctcctccacggcaaggtttaagcttttcaccgcggtcacgtccttatattccttatgcagattttcagttcttatcgcctgcatggtttacctccaaatagcgttttttcagaccctcatacgcgtcggttacgataccgcttatcatgtcgtcgtcccagcagagatacgatgtagcgatcatagtcgcgataccgtgaacgaagatccacatctccatatgaaaaaggaacgcccgctcctcgtcaagaccgagatttttcttgattatatcaatgattgggcggatggattccctctcgtcgcgtaccgtctcacggcttctgtcgcacatgaagaggagcttgaacagttctttttcctcccgcgcgaaacggatatacgccattccgcttgctttatacggggggtattttccggctgacatatcggctgcgaggcagttttggtagagtatgtttgctttttccttcactgcggcgcgaagctcatccatattaatgaaattagaaaatatgggctgagttgagcaaccgaggctgcgggcgatatttctggcgttaagggagttttctccgtcgtttcgcacgaggtttacggcagcggaaaggatttcttcctttgaaacttttgttttaggcggcatggggtggattccttaaaatagcaattgttatatatcgattgttattttatcactgtttgactgaaatgtcaagatgatttatgcaaaaaatgcctgtcgcgggatttggacagacattattttaatattgtcttgacagactgttattgaggtagaaaagactccgtcttttgattttattatatcgactgcggtcgaaggctgccactacg

SEQ ID NO: 2140 - DNA, 10358 bp, Unknown
  16S sequences of unknown bacteria
atgttaaacgccgtagtcaggttcatgccaagttcagtaaacagtgcgtccgctatgaaaacggggcgtgtgctggggatttttccaggcaagagcagcacctgtttcacttgcaggaagaggatggcttttctgattcatagagtacctcattacagtaaatgtagattagtgtctgattttgtattttattcatgttgattagtgtaaaaataaaataaaaatatgttgatatttgcgcgaatatttgatatactatgggtgcgccccgaaaggagggacaattatgtatcgaaagatcatggaatatttagagaaatggaaggccagcgaacaccgtaagccactgatcctgcaaggggcaaggcaggtgggaaagacctactcgattctggagtttggccgaactcattatgaaaatgtggcctatttcaatttcgaaaccaatccaaagttgaatgacacctttgcagaggatatcagccccaactatctggttcccatcttgtcccacattgcgggccagacgattgtaagagaaaaaacgctgattgtctttgatgaggtacagttatgtgagcgggcactgaccagcctgaaatacttctgcgaggacgcgccggaataccacattattgtggctggcagcctgctgggggtggcggtcaaccgggccaagttttcgttccctgtggggaaggtggatatgaaaaccatgtatcctctggacatggaggagtttatgctggcctgtggggagcatgatctggtggagcggatcagaaattgctttgatacggatacacccatgcccgcggcactccatgacgcggctatgcagcggtatcgccagtatctggtagtaggcggaatgcccgaatgtgtgtcccagtttgtggagacacaggactatatcttggtccgacacacccaggacacgattttagcaagttatctcaatgatatgagcaaatacagcaacctcaacgagatcaagaagacacggttgtgttatgacaatatcaccgtacaactgtctaagaaaaatacccgctttcagtacaaactgattaaaaaaggaggacgagcagctgaatttgaaaacgccattgaatggctgacactgtctggtatcgtttcacaggtctaccggctggataagatcaagaagccactggagaattaccgggacattgacgcattcaaaatctatgtatcggatctggggctgctctgtgcgaaaaaggatctggccgccaatgatgtactctatatggtagaggagatcaacgattttaagggcggtatggcggaaaactacgccaatgtgcagttgagcatcaacggctaccgcacctactactgggagtccgaacgcggtgcagaggtcgattttgtgatccagcgggaggggcatatcatccctgtggaggtcaagtctgcggacaataccagagccaagagcctgaaagtttatatggagacttatcagccggcgtatgccatcaaactgacggctaaaaactttggctttgaggatggaaaaaaatctgtcccactttatgctgcattttgtatttgaccatgtcgacagggtaaggccgatgtgttatactgaactcaggtgaggaaaatggtttttgcttgtgatcattgccactatctgttcggtttggaaaaggaaccggagcaatgtcctgactgcgggaagtaccgtgttcgtccggccaccgaggaggaacagcgcgaatttgaagtgcggatagcagaacggaatagagaaaatgggtgcagttctttttgaactgcacccattttattgtgctgatttggttgctatacccagaccaatgtgatgacggtggatcatcaggagaaactactctttgtcggcgagtgtaaatatcaccaagtcgatggactcaaccatatatgatgcattggaggagaagatacagaaatctgcggtactgcagccttctcatccaagaggatcatatcatgaggatgattaaggaaggtgtgttgttacacttgcaacgcatcgtcttttcgcttgcgatcatccgttacaaacgatgcacttaaaccagcagttcaaaccattcagtcccgacttcacggaacaaacggaagcagcaacgacgctctatggcagcgacctccattttttattttcggaaagcgatattccggaattgttccaatgtctggatgaactctatgaaccgatgatccttcaacgtgccaaccatgtgatccgggagcagatgtgcaaatacagccacttattcacaacgtaaagaataggatccgtcgtaaaatagtttctcatttcaacctctatcatagattaaagataaagtcttgattgtggagatatcaaaaaacacatctttggttctctcaatagcaaaaataaaataggttgttttctacctactttctgttataataaagccagaggtgattaggatgaccattgatacaaacgctgtcgtttctatgaccgaagcgaatcgaaacttttccaaggttacacggttggcagagcagaaggggcaggctgtaatttttaagaacaaccgccccaagtatatgctcattgatttggatgcatcccccattgtggagatgacagacgatgaaaaaattgactttatagccgctcggatcttgaaacggtttcgaccagccttcgaggaacttgctaaatgatacatttttctaaggacaaggtcttgcttctacacaaactgttggcggaggctaccggtggaagtattggcctccgggatgaggggctgttagagtctgctttggacggcatttacgccacctttggaggtaaggaactatatcctacgaaagaggaaaaaggtgctcgtttaggctacactctgatttctaaccacgcctttgtagacggcaacaagcgcatcggaatgtatgtgatgcttacttttttggaggttaatgggattcgtttgacctgcagcaacgaggatgttgtgcaggccggcttgggtgttgccgctggcagtatgacctacgaagaactgctgcgatgggttctggagcataaggggtagacttttacaaacggggtcataattattctcagccccgatttgctatgctttatttttacgagtacatttatgaaaattcttcttgtatgaccccatgctgttgcgctataatgattgggagaaaatgtatttccatgcgagaagtacgaagtgagcgcaagatctcaagcgacggttccgtgacctcattttggccacaaatgatccagtaaaccctgataatccatataatatgtacagatatagtgtttatccgattgcattagacactgtatatagtagaagccatatgcttgccatcgagtgggagtaagtaacaagcaccgcaaagccttgaaaacaccggatttttgaaacgcagcatagcaagttgatagcagatacccaaaccggatttactttatttactcgcatagagcgagtgacttataggtaaatctttcataatcctgaaaaggtcttgccgattagtgaaagtcggcaagacctttttgttatctctgaaacaggcgttagcggcgcagggtttcaaaggcggcacaaggaaagacagccaatgggtgcgctcgtagaaggaacaactctccgccgtgatggagcgccacgggatagagtgggagggcaacaagcacctgtctgtgttggactgcaagaaggagcagagggcgaaagaaatcgccgcccggaaacagtcaaggctgaaaagcagagccaggtggaggtacaggagcggcggctgaaagaactggccccggcggtgaagaacatggagcggttggcggcggatttctccgccgacccggaggaaattttgccggaggccgggacactggagagcgccaagtcctactgggagaaaaaggcacccccctgctggcaaaaatcgtccagatatggaaaacaagaaactgcggcagatctccgccgattatacacgggtcaagcgagtctttggctcggagcaggtagcggcggcggtggaggccgacagacagcgggaataggcggagaaaagccgcaaacggccccggcgctcccttgaccgtggtgggcggtagaaaattgctgcccctgtatcaaacgagttacacatatttatgcttacctattgacaaatatccgaaagcggatataatatgtatgaaaccggacattaaggaggccgtgatgagcaataagaaagcgagaatgtatgcctatttatctgcggaaatcacttcattataccatgaagcggctgtaaagatgggcatttctgatactgttttgaacattctatatgtgctttgcgaacgggatggccagtgtctccagagcgacatattcaggttgacaggtatcagtcggcaaacaatcaattcggcaattcgcaaattggagaaagatgggtttgcctatctgaaacagggagaaggccggaatacaatggtttgtttgaccgaaaaagggaaagattttacttttgaaaaaatccttccactatttcaaattgaagataaaatatggggtgaatggacagtcgatgaacaagatgaatacatatcattttcacaaacataccgggattcgctaaaaaagtacctaagtgaagatttgtagtccactctgccccacacgaaaaggagcagttatgaacagagagaacaaacgaaagcagtatgaaaaaggatactataaaacacatgggtgtaacgatagttttacttgcaaagtatgtggtagaccagtggtacctaccggtgcagggagcgaccaccgtaatcattgcccaaactgcctttgcagtttacatttggatattgaacccggagatcgagaggcagattgcggcggaatcatggaccccgtgggtgtttgggtccgaaaaaatggagagtgggcaattatccaccgttgcagaagatgtggacacctaagttcaaatcgtatagcagcagacgataatccgatgaagttaatgtccattgcgatgaagcctctttcccaaccaccatttccattagagaagatcgaggaaatgaccgcacttatgggtggagatggacaattattttacggataacattggagagcattttccatttagcaaccccagtcggggctgtcaatggtcgggatgaacggcgcatttcatgcgccgccatggaccgccccgcccggtcttgttctgcagtcatcaaggcgggcatgcactggtgaggcttacccgccttctttgattttgggcggggctggtggccgaattgcgtcccatggcgggagtgcaaacgctcccagatggtgggcgcaatccgtctcgaattgagatgaattacgatagaaacttatatcaaattgaggaaagtttttcggaggcgtattgaggcaaaaccttacaattattctcttgagaataatcccaaaagaacaagcaaaaccgccccgctgaacgacacattcagcagggcgtttttttgcttgtcttatttatttttccgccacgggatatagtattggctttccctgccatcatcgcaggtactcggccagttgcgtttccataaaaggtaaaacgcacgagcaggaaactgttcctaaaggcggaaggaacagccagcgagctggacatctccaaaccctacgcctgcaaactgatgcagcagataagcaagggacggaaagggatataataccacccagagcggcataaccgtccgggaattccgcgattataacaagatcttcccctgagcaccgcccccctcgattgggcagtcaaaagcaggcctgtctcatggctcgggccgtactattattcaccgccgcagtgttttgatcactctcaggcgccacggcgatccgctccagccgcgcgcccagccgactcaaaatctcattggagattgtccccgccgcttccgcaacatcgcaggccgtgattttttctgcgccgctattcccaatcagcaccgcctcgtcgccaggtgcagtctcagggatctccgtggcgtccaccagagtctgatccatacagatgcggcccacgacgggcgcacgacagccatggagcagcactgcacccacgccgcaggacaggctccggggcagcccgtcggcatagccaatggacagcaccgccagccgcgtctcccgccgggccgtaaagcgcaaatcataaccggcccgctctcccggctgcagcatctgaacctgggcgacacgggtcttaagggaaagcaccggctgcagggcagcggcgcggggcaccgcgtgggaagcacagctcagcacaccgtacagcgcaataccggtacgggcataatcacccccgatttccggataattcaaaaggccgtaactggccagcgcatgcactttgggcacccggcagccgcgcttgcgcagggcagcgactgcattctgaaacgcccgggcttgagcgagcgtgtaagctctgtcctcctcccccgtcgtttcatcggcacacagatgggtaaaagctccggccacatgaagattccggcacgcaaagatgcgctccagcgcatcgatttgcgtccagcgctcccccaggcggtgcataccggtgtcgattttgatctgcacctccagcggaaggcccgcctgattcaagcattcagcataagaggcatccagtaccgtctgggtcagcctagagcggtacagcagcggtatcagccgcggatgcgtatagcccagcacaaggatctcaccctccacgccgctcccgcgcagctgtgctccctcccgggcgctggccacgcaaaaggcccttacgccaagacggtttagctcccgcgcaataagcaccgcgccgtggccataggcgtcggctttgaccgcaggcatcagcgcacagcctggaggcagcaaggcgcgcagtgctgccacattatgccgcagcgctcccatatccagttcgatccaagcccggtctttcccaaagcaatcgcccatgttcacggctcctcctcccgcacaatcacccggggctgctgtgccacaacggtagcatgcgcggggacatcaaaacacaccactgccccggcgccgattttggcgtagtcacccacagtaataccgcctaccagcaccgctccggcgccaatcaggcaatgatccctgatctgcggcgcggcgcggtccacctccccaatggtaacgttttgatagatgcagcaatccgcaccaatacgggcataccgggaaatataaatcccgtgcaggccgtgaggcagcatcggcctgccggcaaaggcagcgtctttgccgatgtaaccaccgtgccgccgggcactgcggttgaggaaaaacgtctgcactgcccgcagccgccggctggcggtgcggctccgccaggcaaacagccgccagaacagacccagatgatcgcctttggaatagtcgatgatctgctggcgcacactcatgctttcattgctccttccatgacgtaaggataaacccgtcttcgttgtttccggacacggcccaagaaccattttcgccccatgggatgcaggtctgcgcgccctgaagcggaacaaaaacgatttcccaaacgcctttgccctctttccagcacagaggagtaccgcccagcgggaagtttttgaggaaactgtgatactcctccaacaccagatcccgctgcatcataatcgccgcatggggccgccccacatagcgaaaatgccatggctcatgggcaatgccggtcacagattccttgccggcccgataccgttccacaaagccataatccaccgcccggcggcgaaattcctgacaaataccgcaatagggaaagtccgggcaaataaaatccagatccggccctgcctgtcccaggtcaatggccagccccgtctgatgctcactgtgtccggggagggccacgaactgctcggtaaaagcccgcccgttctgacgcagagaactctcgtaaatctcctgctgctcccgctgcgagcgccatccgctgacaggcgccagcacggaccagccgcccaacgcccgcaccaggcggcgcagcggctccgccgcccggcgcgccagcattacatttgcatccaagcaaaccctatcctgctcctccggcccggcaaaaggcagctgcgcattgaccaaaatcagatcgccccggtggacggcgctgcgctccagccttcgctccgtcatggttccaccgccagttcaatcaccgcagtaagaatctcctgcagcgacagccctgccgccttcatcatgctgggataccggctgtgggccgtaaagccaggaatggtgttcacttcgttgaacacgatccgcccctgcgcatccaaaaacaggtcgacccgtgcaaagccgcggcaacccaaagcgcggtatacggttcgagccgtctcctggatctgggcgctctgctccggccggatacgggccggcacatgaatctgcgccgttttcagcgtatacttttcggtataatcaaaaaagccgctctgcagttcgatctcatcaactgcgcccacggtcagcacgtcgttgcccagcacggcacagcccacctcaaagccggaaatacattcttccagaagcacagcgtcgtcatgggaaaacgccagttccaccgctgcagtgagctgtccgcgctccgttaccttcgttacgccataggacgagccggctttcacaggtttgacaaaaatcgggtatcccagcctctcggcccggctcgccgcttctcccgcttcgccccgccccagcacataggagttcggcacgctcactccggccacagcagccagtttatgagcgcggtccttatccatacacagcgcggaagcaagcacaccgcagcccaccagcggaatgcctgccagttcgaacacgccctgcaccgtgccgtcttccccatttttgccatgcagcacagggaacgctgcatccagatgaacacgctcaacctgctttcctctgcgcaccagcagcgtctgatcaccgcggtcgagcgatacgaccgcaggggcgcaccaacgcgggtcgttccaagtatcttccgctatacgttccacagggccagtgtaatgcagccatgccccgctgcgcgaaataccgatcagcacaggcgtatagcgctcccgatccatatgttgcaccaccgcttgagcagaggccagagatacgctgtactccgaagagcagccgccgaacagaacggcaaccgtacgcttgtccatagaaaacgctcctttcaacgatcccgcacgcgcggcaatttgcttgcttctgccactttcattgcaggatttgtattatgtgtactaactgtgttatttatattaatacagataatatagcatccctccccacttctgtcaaccgttttcgcgcaaaaaggcaggcgccccccaaccgtctgccttatacggccggtatcagatgcgccggctcttttctgcatttctacaaccttttgtacaaacgcgcaaaatttactcataaattccagcaatttacgtttccgcatcgcagaattggagcaaaatgcaaaaagcctttgcctcagtagcttttgtgcccgacggaagtatttatagttgacacttctcatgccgatgctttatcataaaaaaggaaaaagccgccggcacctgcgagaaccagcggcccaaacgatatgtctggggggacgccttatggaattgctggaaaaccatcttctgatcaatgctttgatcgcctgggtgacggcacaatgcctcaaaggtatcatttgctgtattctgacccacacgctcacgctccggcaatttctggcagacgggggcatgcccagcggccattccgccaccgttacggcactgacggtcacggcaggcttggaatacggtattaactctccggtgtttgctatttccgtcattcttgctgtggtcgtcatgcacgatgcgatggggatccgtttggaagcgggcaaacacgcccaggccctcaacgaactgtgggaactggtcaacagcgacgccgcccccgaccgtaaaatgaaagaagtactgggtcacacgccgcttcaggttcttttcggcggcttgcttggcatggccattgcctttcttctgggataagttccgccccgcaccgattacggcgcggggcatttttcatggcagaacgcttttggtacaacgctgtatttttttcggttttgttgcccaaaaccgtacaactttcgccctgccctgtgtagggctttttttcggaaaagccccaaaatccgac

SEQ ID NO: 2141 - DNA, 2194 bp, Unknown
  16S sequences of unknown bacteria
gcgccccaaaactcaccgcgcgcacattttatgctccactactacgctttacgcataaccgcgcgactaatcggttgaaatgtgcggagacggaagtaaatcatatcagccaaactccaccgtgagcgtagattcacaaggagacggcgtttgagtctccttgtgcgccccacgcgtagtggcagccttcgaccgcagtcgatacaatgaaatcgaaaagacgccagtcttttcttcttttttctcacttaaagcctaagtgaaacttcatcccgtgaagtctcttagaaggcgcaagtcgtctaaggtaaagaaaattgctgcgctctttctttaatctaaggtagaaaaaaagccccgtagggctctttttcagctttcgatttttttgtagttgtctatcgccttctgaagcgacttgtcaagcagctttctttggctctcgtagtacgaagcaaacgctccctcgctggtcgagccaaacactccgcgcgtgaatactgacccaagattcagctccttgtccgccatcataatgaacggggagttgatgtgctcgtagattatgtccaccatctgcgcgtcgataagtcccgacgagtactttatcttcagcgcagtgtcgtaccacgccggagttacctttctgtacgattccgcgcacagtgcctcaagtacagcgcacagcatatccaccctctcgggagctatcgacacgggtatcgcaactccgtttccgttagccgttcccgcgccggacatatagtcgaggctttcgtcaagcttcgggtaggggagtatgccgtattcaaaatccacgtctctcagctcatgcgccgtgacaaactgaccgggcaggaacagggacgttttatttatgaatgtcgttgccttgtcgttttccttattgctgaaaatggacatattgtcggtgtagagcagtttatacagtgtctcgctccacttaacgccgtcctcgctcatgatgttcagcacggggaagccttcctcgtcgcgggtgatatatgtaagtccggtcgacattgacatatagttcggtattccccactgctcgtagcggaagcccatgatgtctccctcgtcggctgcaccgctgccgttcacgtcggtatacacgtcgcggcagtatgtgccaaacttatcataggtccacgttccgtcaagcacggcgtcataaagcgcgtttacatctccgaaatagtcggtgaacattggcttatcgaagtacatagcggacgcgtagagcattacggtaaggcagatatcgccgtttaggaagaatctctttgagttatcgaggttgctttcctccatcattttgccgtaccaccacggagcgtcgaggtcgaggtactgtttgtccatgaggttataataaagtccctttatggactgctgccacaggcgggagctttcctccattattacgtcgtagtcggaggagccggagttgagggcggtcatgactgctgcgggaaagccgttccagtcatccgagcccgcgatatagttaatcttcacgccgaggcggtcctcaactgtgatattacggttatagaccgcgtcaaggactacatccccgccaagctcaccggcagtatcgtagctgagcgtctggggggagccgaagtggtagacgttcacggtatctccgttaaaattcaaatctgcggggagattatcggggatatcggcgcgagtggtttcggtttcggtttccgtttcgttttgcacggtgtcggctactgatgtgtccgatgtgtttgcttttgtttcggtactgcctgtatcggagcaggaagcaaggatggggaaagtcatgaggagtgcaagcgcggcggcaatcaatcttctggttcgagcaagcatagtctataccgtcctttattttattcagatatacggatatccatggatattatacgatattttgtgaaatatgtcaatcggcgagtgggattctcgggagaatttacataagaactacgggtttagctatgggttagttgagcgaacggttttcttttgattaaatttttacttttggctacaaaatttcgttttggtttaatcttttcggaaagattggaaaggaagaaaggacttcgccctttcgatttaattattccacttcgcgtggggcgcccttttcagggggaacgcagagaggttc

SEQ ID NO: 2142 - DNA, 29493 bp, Unknown
  16S sequences of unknown bacteria
ttgggcagcaagcgtggagaagaggtgccggttgcccaaaagcaagctcgcgggaagccaaatacatgagaagttgggcagcaagcgcggagaagaggtaccagctgcccaaaaccaagttcgcgggaagtcaatagaaagagaagttgggcagcaagcgtggagaagaggtaccggctgcccaaaaccaagttcgcgggaagccaaatactcgagaagtcgggcagcaagcgagggaaagaggtgccagctgcccaaaagtaagctcgcgggaagctaaatactcgagaagttgggcagcaagcgcggagaagaagtaccggctgcccaaaagcaagctcgcgggaagccaatacaagccagcaaaaagctaattaattgcttgacagatacagaaaagtgcgttatggtgataacagtttcaatattcatgacctaattcaggagatttccagatgtatatttacgaaatgaaaaaagagcgtgtgcatcttgcaaagcaaattgccaaattgcaaaaagatttagagttgcttccgaatcaaaaattatttatcacaaagaatggaaaatataataaatggtatatagcaaatgggcatacccctgtttatatcaagaagaatcaacgtgaattggcagaaaaactggcacagcgtgaaataacagagatgaatttgaaaaatgcatgtcaagaacttgcttccatggatcgatacataaaagaacatgagcagcgcagtttggaacagcaaaaatggtttaccaataattctgagattcagaaacttcttgagacttcaaaagattttaccccagacggttcaacagatgaatatttacaaaaatggatgcaggaatcatatgaatcgaatcctcgttatccggaaaaacttatacacaaaacgatggacggaaaacgtgtacgttccaagtcagaagtgatcattgcaaatgcattgcatcatcatggaattccttatcggtacgagtgtgcatttcgcagcgaagacatgacaatttatccagatttcaccatttgccacccacagaacaaacaaatattttactgggagcattttggcatgatggatctgtcggcttatgctaaccgtgcatttgaaaaattgaaaatgtatgccagctgccaggtcattccgacaatcaatttgttaacaacttacgagaccgcatatcacccactggactgcgaacaggttgagaacataataaaggaaacttttttgtgataggatacactggaaaatcgtaactacatctgctacaataaaaatatcttgagtcttgaggaggacgagtaaaatgaaagtgggttttggctgcgatcatacagcgattgatctgaaaaaagaactgatggagtacatgaccgagaagggttatgagtgcgtagactacggtgcatatgatgcaaaagttcgagtagattatccggatcagggacagaaagttgcagaagctattattgctggtgaagttgagaaaggtgttctgatctgtggaaccggtatcggaatttctctggcggcaaataaagtgccgggaatccgcgcggcagtatgcagcgagccgtattcagctgagatgacagtcagacacaacaatgcacagatcatcgcatttggtgcacgtgttgtcggaaatgagctggcaaagaagattttggatgcgttttttggagcaaccttcgagggtggcagacatgcagaacgtgtgcagaagatctgtaatattgaagcaaagtataataaataagtattttatgttcgtgtaaaaagacgctgcttcttgtaaatgtggggagcagcgtttttatgtgctgaaatagtcagtctgatcccacgctgattgctcatatactaacatttgttttgcgaaaatagaaaatgtggatattatacgaagaagccatctgtcaattttggcggatggctttttcacttattcctcccgcctctgccgatagcggcttttttctttattgagaccgcctgccatatggctcatttcgccgtcgaggaagcgggcgcggcgcacactgtcttcgccgtattttttacggatctgatcaatggccttatcaagcttctcctgtttttcatttcttgcagtctggaaaaggtccagctgctcgtactcggactgttccgccttggaagtgaacacgccgatcaggcggagaggcctgccatcccataattcacggaaaagacgtcggctttcttcataaatgagatttgtggaattggttggagtgcgaaggctggtctgacgacttctctcagtgaaagaattgtccttcacgtgcacgccgactaccgatattttcatattatcctgacgaagtcttgcaccaacggtctcgcacagggacaggatcacctggcaggcagtttccatgtcagtcacgtcatccggcagtgtagtctcatttccataacctttgtttttgaaagatctgcgctcgaacactgccgcatccagttccccgccgttggcgtatttccagatggcacgtccatgctttttcagatgcatttccagaagccccgggtcggtccgcgccagctcgccgatggtgtggatgcccagcttgtgcagatgagatgcggtagtttttcctacaaaaaataactcatccaccggaagaggccacattttctgcgggatttcctctggaaaaagggtgtgtacccggtcaggtttctgaagctcgctgcccatcttcgccagcaaatggttgacagagatgccaatatttaccgtaaatccaagttcccggtggatccggtccttgagccttgcggcaaatcccatcggatctgcctgcgcttcctggatgccggtcatgtccatccacgcttcgtcgatgctgtattgctggatcagtggtgtgtattcgtggagcatgcggatcagctggtcggattttcgcacgtataactggtaatttggcggcaccacaaccagacccgggcatttgcgccgggcctgaaagagtggctcgcctgtgacgatcccatattgtttggcaagtgtgctcttcgccagcacgattccgtggcggctcttctcgctgccgccgatgacagaggcaatcttacggatgtcggtggtcgggagagtggtggccggggcgttgactgcggcgtcgtttgcaggatcaggggtgtttttctgggtgaggtcagcacaggatgcagagtcatccaccccaccttcctccagcagcccgcatgctgtccatgacagaaatgcagaattgacatcaatatgaaagatgagcttcattttctatctctcctttcggaaaggtccctcaaaccagcgtttgatcacgatctggatctcatcggtggatttgtcaacaggctgggtcagcatggtgtagatgccagcccggttggctccccacacatcggtgaagatctggtcaccgatgaacagggtgtgcttcggatcggttcccattttcgccatggctttattgtagccttccaccttcggcttgcccgccttataaatgtagtcagtctgtacctgctgtgcaaaaggctttacccgcgcttcgccgttgttggataccagcatggtcttcatgccaaggttgtggatccgggcaaaaagctggatcgccgcttcgtcggccgctgcgccatggggaaccagtgtattgtcaatgtcgaagatcacgccgccataggttctggacaattcttcccagttcagatcatagactgagcggatcaatttattcggataaaaattctgaaacatcatttaaagtctcctttgattggtaattctattgtacctgttcagaggggatgtggtcaatgaaaatgagacaaaattcaccccctctcttccacaaaacttaagaagtttgtaatagttatataatatattcttgctataataaaagcctgaaattcatataataaacagaagcaacgatacaagctgcgtgaccttgggtagttgcatacagggatcagagagaactgaccctatagatacgggggattgcctatatgaaaaaatggaaagaatatatgatgctggcggtgctgtgtatcagcatggtcggatgtgggaaaaaggattctggctcggagcttctgacggaggtgcaggagaccgtgacgccggtggaagaggttgtgaagccggaaggagaggagacgccagagggcatcaggctccatgtatacagtggagatgagagcgcagaaaatattgtgcagcacaccgtctatgtaaatgagatcacagaaaatacagtgatgcgggagctgacagaggcgttggaaatggacgaaaatgcagaaatcaactccatttcttttggaacttacggtggggacaaggtcgttatgctggatctgaaccaggcatttgaagagtacgtgaacaagcttggttcttctggtgaatatattgtgatgggaagtctgacagatacatttcttgactgttaccagagtgaactgctgttggtgacagtggacggaaaagtgctgaagacggggcataacatttacgaggaatatctggaaatgtatccgtatacggaggcaacttatcagatccgggaggaaaagctgaccggagacgggctggagatctcctgcccgcagatcgagggcttccgggatgaacgaatccaggaaaaatggaaccagatcatgctggcaacagaacagacagttatggatcagtgggagggcaatggaacttatcgtgtgacttacacggtgaagaccatgactccggacactttatcgatcctgatggacggtacggtaaatacaccggatacgccagaggaatacacgttcaaatacacctacaacattgacctgaataccggtgagagcattcgcctgaaggatcatgtggatgtggaaaagcttgcagaaaatatgtttgcaggcaccggttattatgtgaaggaagatctggcagattatttccgggaacggctggaagccatctatgacagtccggatgcgctggcgcagtcattggctggctatgattactcagaagacggtacagcaccgtatgggtattcttatctggcggatggaaaagtgtggatctgcatggaagtgccccatgcgctgggcgattatattgagatcgaactggatacacagtgatccgggcacacagagttgcatttgtaaaatgcactatggatgcacccctgatggatacatgtatgacttggaatggcgatatgcaaaagaggaggaaacgtatgaaaaagcgaatgttattacttggaatggccatatggatggcagccgcactggcaggttgtggaaatgacacaacagccagtacagatcaggctacggcagcagaccaggaacagtcagaaaatgcgactgaagagacgcagaccgatgggtcacagacggatgcgaatatcgaacaggcagcaaccggtgcccctctgatccagatggagaatcagcaaaaggactggcacagcgatgatggctctaagtggctgatgcatgcggagacacagcagctccaggtggagattccgggaaatgatgcagccgctcagaaaatcaatgactggtcggaggctgatgcatccgcattctgggaaaatgcagaaaagacatcggaatatgcggaaaatgatttggagagtatgagtacggtctccggtatggaagatttaggtacgtactcctactattacagtagttttcagagttataatgtgatgcgcgcagattctcaggtaatcagtctcagaagctacaataatgattatacaggtgggattcatggcgattatgcatattatggaaccacctttgacaccatgaccggtgagaaactgaagatccaggacattgtggcagacatgccctcgttccgtcagcagtccacaaaggatattgataaatatctgcaggaaaattacggcgacggattatttgaagattatcaggatacggtagaacagatctgggaaggtgaggatggatttaactggtatttgaatgagtcggggatcatggttaccttcaatccttatgtagtaggtccgtatgctatgggagccgtgaccgtgccgcttccatacagctcctatgcttcttacctgaatccggactatactacgccggagaccatatctgcaggaaatggggagttaacagaagagaccgtcacaaagatccgcaccagcaggctggaaggcggggcgcagcagaccgaaaacagtgacgcagcagcccagacggactctggaaacagtgacgtagcagtggctcagacaggctccggcaacaccccggtgaactacggcgatctcaacgtctacatggatcagaaaaatgagtttggcggtggaactctgaccattgaattgaatgaacagaaagagcagaccgaatattttgaccgcctgtgtgacagccagatcctctacctggaggatggcagagtgtttgttctgctggttgcagatcatgcatccgatgactacgaactgtttctctatgaagtgacggacggcaaactgaagctgaccgaccagcaggataatctgttcctcggtgatggcagtgtctctgcaggcggccgcaaaaatggaatgctgatgcttaagaaaaatgttaacgtgtttggcagctatcagtgcagcatgacatacagcattggcgacgatggaaaattagtgccggatgaagaatttttccaggtggatatagataattatccatatagtgtgttgacggtgaccagggagcttcctgtatctgtcaatggcggacagactacgctgcagacaggcacacagatccgcatcaccggcaccaacgatgcaggaatcgctctgtttgagacgacggatggaaaagtatctggtgagatccattatacagagccggaaggtgactctgaattctatcacaagatcaacggcatcaccgaagaccagtattttgaatctattccatatgcgggatagagaatatacaggacaaatatgtgtaatcataaagacccgggagaatcagagattctcccggatctttatggaatgttctgcaaaaattacatacaaacggttgaaaagagagtctgataacggtaatataataacaaaacgcgaggaagggcgtaaaagtaaagagggggttataacaacatgctttatattggagtggatctggggacatctgcagttaaattgcttctgatggacggagaaggacagatcagaaagatcgtttccagagaatatcctatttattttccacatccgggctggtcggaacagaatccggaggactggtttgcaggaacgatggacggactgaaagaactgctggatggttgtgacagatcagaggtagcaggtatcagttttggcggacagatgcacggactggtgatcctggacaaggaggatcaggtgattcgaccggcacttctgtggaacgatggccgtacttatgaagaatgcgattacctgaacaatgtgatcggaaaggagaagctttctgaatacacagcgaatatttcctttaccggatttactgcaccgaagattctgtgggtaaagaataaggaaccagagaattttgcacggatcgcaaagatcatgcttccgaaggattatattgcttatcggctgactggtgtacactgtacggatgtatcagatgcatccggtatgctgatcttcgatgtaaagaaccgctgctggtcaaaggagatgtgtgagatctgcggagtcagagagaatcagcttgcaaaggtctatgaatcctatgagaccgtgggaaccgtgcttccggcgattgcagacgagcttggaattccgcacacagtgaaggtggcagccggagccggagacaatgcggcggcagcagtgggaaccggaactgttggtgatggaatgtgcaatatttctctgggaaccagcggaacgatttttatttcctctgaaaaatttggcgtagataagcacaatgccctgcatgcgtttgctcatgcagacggacattatcatctgatgggatgcatgctcagtgcagcttcctgtaataaatggtggatggatgagatcatcgggaccaaagactatgcccaggagcagaaagctatcacaaagcttggcgagaatcatgtatattttctaccgtatctgatgggcgagcgttccccgcataataatccgaatgcaagaggaacattcattggcatgacgatggataccagccgggcggatatgacgcaggcagtattggaaggtgtggcatttgcactgcgggattctctggaggtggcaaaatcactggggatcaagattgagcgcaccaagatctgtggtggtggagccaagagcccgttgtggagaaagatcattgcaaatgtcatgaatctgaaagtagatatgatcgagagcgaggaaggaccggcactgggcggagccatgctggcagctgttgcctgtggagaatatgaaaatgtggaagcggcatcagataagcttgtgaagattatcggcactgtggagccggagccggaactggtagcaaaatacgaagagagatatcagcagttccgtcagatctacccggcatgcaagccgttgtttgagatcatcaaataagatgaagtaaaaggcagtaagccgttacggaattgttaacaatatatgaaacttatacagagtgcgtgcagacgcactctgtttatgttatactaggagttgtatgacagggggaaactgattatggtaagtaaaaatataactgtacagaatgaagaaggaatccatttgagaccggcgagtatgctggtagaccaggcaaacaaattccgttcccgcatcagactgcagagcggtgaacatgagagaaactgtaagagtcttatgagtcttcttgcatttccaatctgcccgggaacagaagtgacgatccagtgtgaaggtgaagacgaagaagaggcactgaaggcaatgctggattgtattcataaactgaaggaaatacaaccggaaacaaaagggtaagtcttagaatggctaagaaaaatctcaagaaaaccaagagtaagatcgtatctgctgcatggaaactgttctatgagcaggggtacgaggacacgaccatagaggaaatcattgaagagtccgggacttccaagggatctttttaccattattttgaaggaaaagatgcactgctcggttctcttgcctatatgatggatgagaaatacgaggaactggagccgacgatcgcagatgatgcagacagttacgaggtgctgttatatctgaaccgtgaactgctgaccatgattgaagagaccattaacatggagcttctgacccggctttattccacacagctcaccactcacggtgaccggccgctgctggatcatggcaggacgtattataagctgcttcggaagatcatcacccgtggacaggagcagggaacgctccgggcagatatgcgggtcaatgagctggtgcgctattatgccatgtgtgagcgggcgcttctgtatgaatggtgtctgcggaagggcgaatactctctgtcagaagaggcagagtgtaaatttccgatgatgatcgcaagtatgaagacaaaaaactagaacaaagtctatactttactctgtattgtatcctgttttatattgtgctagaatgcatgacagacgcgaaaataaagtattttttgcagaaaataaatatagaacgtgagggagaacaagaatgagtactatacagatcttgatgctggcgacaattctggtttatctgattggaatggtagccatcggtgcagttctggcaaaggagaaccggactaccgacgatttttatcttggaggcagaaaattaggcccgtttgtgacggccatgagtgcagaagcatctgacatgagcagctggcttcttatgggacttccgggagttgcatacctgacaggtactgcagatgctgcatggacagccattggtcttgtcatcggaacctatgtaaactggctcctggttgcaaaacgtcttcgtaattatacccatgtgtgtaacaattccaccacgctgccgttgttcttttctaatcggtatcgtgatgaaaagagagcgctgtctgtgatcgcagcagttctgatcattattttctttgtaccctataccgcatccggttttgctgcctgcggaaaattatttgcaaatctgtttggccttgattatgttccggctatgatcatcagtgcgattgttattgtggcttacacgactctgggcggatttctggcagcaagtaccacggactttgtacagagtatcgttatgacactggcgattattgtggtatttggttttggtatcatgaaagtgggaagctttgaggcagttatggccaatgcgcagtccatggcaggatacttcagtctgacacagatccatgatgcggcaactggaacagcatcaccttatggaatcctgacgatcttctccatgctggcatggggacttggatattttggaatgcctcatgtactgcttcgttttatggcaattgaagatgtaaagaagctgaagctttccagaagagtggcaactgtatgggttgtgatctccatgtttgttgcagtcttcattggagttgtcggtaatgcaatgtccaaggttggcgtgatcccgacactggaggatccggagaccatcattattgtagtggcaggtgtgatctctcagcatggtgtgctggctgctatcgtagcaggtctgatcctggcaggtattctggcagcgaccatgtccaccgcagattcacagcttctggcagcatcctccagcgcttctcagaatattctgaaagaagtatttatgaaggatatgagtgagaagaccggtatgttgatcgcgcgtatcaccgttctgatcattgctctgatcggtgtatttatcgcaagagatccgaacagctctgtattccagattgtatcctttgcatgggcaggcttcggtgcttccttcggaccactggttctgatggcactgttctggaaacgctccactctgcagggtgcactggctggtatggtcagcggtggagttatggtatttgtatggaaattccttatccgtcccatgggtggcgcacttggaatttacgaactccttccagcattcctggttggtctggctgtgaacgtgatcgtcagccttctgactccggttccgtccaaagagattcaggacgaatttgagaaagtggctaagatgtagtgaaataacaccgaagtgtgagtctggtgtacataacataatcatatgtggaacaaaaagggagctgcacggatgtgcagctccttctttatgtacaatttttgaaaatcgtattctatacagttctgaatttggcgatatagaccggatagctgtccgttcccttcatctcagtgccggaggtgatcgttacctgcttatcagttaccaggtattcaatatcagcacctttttctactacagtgtcctgcataaggatacagttcttgactttggcacctttctcaatcttcacaccacggaagagaatagaattttctacctcaccctcgatgatacagccatcagcagccatgatgttgcttacctttgcgccagtgatgtagcgggtcggagtatcgtcacgaaccttggtgtagattggagctttgccaaacagtgcatcctgattgtagtcatccagaagcttcatgttctcatcgaagtagctcttaagaccagtgatgcaagcggtgtagccgtcgtatttgtaaccctgtacattcagcttgctcagcttcggaaggagtacatcgcgctccagatattctttgccaagaagcgaagcttcgttgaccagatcgatcagcagttcgcggctgatgaccataatattcagatagaaattctggatacctttgtctttcgggttcacatagatcttattgatgcgtttgtcttcgtccatgcggaaggtgtagtagtaacctttggcatcatcaggagcttccacaaagccctttggaagttcctgttcccgataagcaagtgttacatctgcgccgcttgcaacatgagcatccaccattgctctgaaatcaaagttggacgcgatatttgcatttgccagaaggacgtatttctgtttctgctttttcagaaaatccagaatatttgccagtgcgccagctcgtccaacatatggcttggaagaactgtatgcatttggcgggaaaatattcagaccgccatttttacgaaccagatcccaggaacggccgcttcccagatggtcgatcagtgactgatagttgttgcttacaacgactgccacattggagataccgctggtcaccatactggacagggtaaaatcgatgagacggtaacggcttgcgaacgggatggaagccatcaggcgaaggccaaccagttccggcacgaaatagtcatagctgttggggaaaatgattcccagagttcttgtattggaatttaccatttttcttcaccgccttctacgttattgctgatcatggcattaggtcctatgacagcctctgcaccgatggtcacaccggatccgatggttgccacgcactgctcaccgtcttttggcattgcaccaaccacggcattctcgccgatttttacattttcagcaacgatacagtgttttactactgcaccggactcaatgacagtaccgcccatgacaacagcgtcttctaccacagcaccttctgcgacctgaacaccggagaagagaacggagtgtttgaccgttcctttgatacggcatccatcggtaatcatcgaattttctaccacagcattggcactgatcttgtgaccggacataccactgttacggctatagatcttccagtcgtcatcgaacaggttgataccgctgtgctccggatcaaggacttccatattcgcttcccaaagagacgggatggttcccacatctttccagtatccgttaaaatgataagcatacatgcggcgatgatctttcagcagattcggaataatattatttccaaagtcattttcggagttcgggtcctgctcatcttcctccagatatttcttcagaatatcccagttgaagatatagatacccatggaagccagattggacttcggattctttggcttctcctggaattctgtgatacggtcatcttcatcagctaccatcagaccaaagcgggatgcatcttcccacggtacttccataacggctacactgaattctgcatttttctccttgtggaaacgcagaaaatcgctgtagtcctgcttgcagatctggtcaccggaaaggatgatcacgtactccggatcgtagcgctcaataaaggaaatgttctgatagattgcatttgctgtacctttataccagtctgaaccggatgccttctgataaggcggcagtacatgcacacctccaaagagacggtccagatcccacggctggccgttgccgatgtattcattcagaaccagcggctgatactgggtcagaatacccaccgtatcaatccctgaatttatgcagttagaaaggggaaaatcgatgatacgatattttccgccgaatggaactgctggttttgcaagcttctgagtcagagcatagagtcgtgagccctgtccgccagcaagaagcattgcaatcatttcttttgccatactattccctcctgatacttgaaatcatagataaattatactatcttttttgtaaaaatgataggtcttttgtgcaaaatgtttgtgatttttatggaaaatatgacaagaaaaggcaaaatatgacagggttaagaaccggttaagaagaaaaaagcctaagttaatgcatggttaagatgctgccagagttgtagatttgaaaaagggaatgtgctatgctcgttgcaatcaagaaaacagacagaaaagagggaatgacatgaatcagattggaagtatgtttctggtaggcgcgatgggaatattgggtgggatccctaccctatatattctgatcagcctgccggtgatcctggtgcagaagatctttggaaaaatcaaatacgggaaatccctgtatcagtagagaaaaagtacgggaaggctgcctgaagagggcagcctttttgtggtatgagacgcccttggcacattgacacttgatgctgcctgggctatgataaaaacagaaaataaaaggggcacataatttatgaaagagaagcatacaagaatcggaaatatggggattacagcagcgatcctggcagctacatcaggcctttcctatttgctccatcgggtatcgaattcggattttcatgtgcccatgctgttcgtactggcggtgctgttcatctctctgctgacggatggctatgtgtatggcatcattgcttccatggcagcggtgatcggcgtgaattatatctttacctatccttattttgcattgaattttacaattacaggatatcccatgacatttctcaccatgctggcagtatctatctgtgtcagcgcattgactaccaggatcaagaaacaggagcagatccggctggaagtggagaaggaaaagaccagagctaacctgttgagggccatatcccatgatattcgtacaccgttgacatccattgtggggtctgcatcaggaatactggagaatcagaaggttctgacacaggaacgggagatggagctggtgcaggatattaaagatgaggcacagtggctgatccgaatcgtggaaaaccttctgtctgtaacccggatcaatggggaaaatgccaggatcaatacggaggacgaggtggtggaggagatcatcagcagtgcagtgatcaagttcagcaaacgcttcccggaggcatcggtggaagtgaagatgccggaagaatttcttatggtagctatggacggtgtcctgatcgaacaggtgctggtgaatcttctggaaaatgcagtgctccatgggaagacatatacaaagatttggatcatagtgacacacacgccggggcgggtggagatcgctgtggaggatgatggacagggaatcaaggagtcagtgctgccggtcatgtttgaaggaaagatctcgtcagacgaggaagagtcggattcaaagcggaatatgggaatcggcctgtctgtctgccacagtattgtaaaagcacacaaaggcggtatgcatgcagaaaaccgggcagaaggcggagcaagaatctccttctggctgcccatgaatgaggaggacacggatggatattaaggacagagtgctggtgatcgaagatgataaaagcatccggaattttttcagaacagttctggaggcaaataattatgatgttctgatcgctacgacaggcgcggaaggctacagcatggtcacttcccagtgccctgatgtggtgatcctggatctgggacttcctgatatggatggaatgacgatcctgaaaaatgtacggcagtggtcatccatgccggttctggtggtctccgccagaactcacgagaaggataaggtggcagcactggatgcaggtgcagatgattatattacgaagccctttggcacttccgagctgctggcgcgggtgcggacagccatccgccatgcaagagccactgttctgacggcagaaggcatgcagaccgggcagttccgggcaggagacctgctgatcgactatgacaagcaccgggtctatgtgggagaccgggatgtgaatctgactcagaatgagtacaagatcgtgagccttcttggaaaatacgcaggcaaggtgctgacctatgatttcattatcaaagagatctggggaccaaacatgcagaatgacaatcggatcctgcgggtcaacatggcaaatatccggcggaagatggaaaataacccggcacagcctcagtatatttttacagaagtaggcgtagggtatcggatcgtggatggggactgacttgtctggatggatgtaagctgatatactggtcgcagacaaactgtttggagacagttgcgaatacgaaaaacacaaaggaaatctatatagtatggaagaaaatgagaaaaaagaactggcccttcagatcatcgaccgattgaagaaagcgtatccagatgcggactgtacactggattatgacgatgcgtggaagctgctggtaagtgtgcggctggcagcccagtgcacggatgccagagtgaacgtggtggtggaaggactttataagaaatatccggatgtgagatccctggcagaagcagatgtaaatgatattgaagaaattgtgaggccttgtggactgggcaaaagtaaggccagagatatcagtgcctgcatgaagatcctgtgggaaaaatacggcggaaaagtaccggaggattttgatgcgctgctggcattgccgggcgtgggcagaaagagtgccaacctgatcatgggtgacgtctttcataagcctgccattgtgacggacactcactgtatccgtctggtaaaccgcatgggactggtggacggcatcaaggatccgaagaaggtggagatggcattgtggaagctgattccgccggaggaaggcagcgatttctgccaccggctggtctatcatggcagggagatctgcactgccagaacaaagccttactgcgataagtgttgtttgaacgacatctgtgcacagagaatctgagattttgtgcagaacaccacttgattttttgaatattttgcgtcaagatagataaaaaattagtttgagaggcaaaatatttatgtttgtattaagaagaatctactgtcgaagctttcagatggtatttaagatggcactgccgttcctgccttaccggaatccgaagatcattccgtctgtggcaggtatcccggaggtatgccgcaaaaagaagatcacgaaagtgatgatcgtgacggatgagggaatccgcagactggggcttacttcatttctggagaagaccctgacggaaaacaatatttcttattgtatctatgacagaactgtggccaatcccactatctggaatgtggaggaggccagagagctgtatctgacagaaggagcccaggcaatcattgcatttggcggcggatcctccatggattgtgccaaggctgcaggtgccaggatcgtaaagccacaccagagcattcagcagatgaaaggtctgctcaaagtacataagaggcttccacttctgatcgcaattccaactacagcaggaactggaagtgagaccacactggctgcggtcatcactgacagtgaacaacattataaatatccgatcaatgattttgtactgatcccgcgctatgcggtgctcgactatcatgagacagtaggacttccggctaatattacagctactaccggtatggatgcactgactcatgcagtagaggcatatattggcggctccactacaaaagagaccagagctatggcagaggaagcagtatgtctgatccatgagcatctgaaaaatgcttatgacaatggacacaataaggaagccagaaaaggaatgctcagggctgcttactgtgcgggtgttgcatttaccaaatcctatgtgggttatattcatgcggtggcacattctctgggcggacagtacgggactccccatggtcttgccaatgcggtgatcctgcctatcgttcttcggatctatggtccggactgcgagaaaaagctgggaacgcttgccagaaatacgggtgtggcgaagctggagatggatgatgcaaaagctacgcagtgttttatcgactggatccagaagatgaacgactccatgggaattcccagatattttcctgagatctgtaagaaggatattccgattatggcgaagcatgcggacaaggaggctaatccgttgtatccggtgccggtgctgatggatcggaaggaactggagaagatttatctggcagtgagggggaaaacatggtaaaagatgtggaaatgagagatggatccgcaggcagctgtggaaaaagtaaagaaatagtggaagctcagcgtacctattatatggaaggaaagactcgcgccctgtcggcgcggatcgacgcactcaatcgtctggagcagtccatcttaacatatgagcaggagctttaccaagcattacgatccgatcttggaaaatcaagagcagaatcctatatgtgtgaagtggggctgactttatcagagcttcggtatgtgagacgtcatgtgaagagctggagcaggaacagacgggtgcacaccccgctggcacagttccatgcagcaagctttacggtgcaggagccatatggggtggtgctcattatgtctccgtggaattacccgatgctcctgacgctggagccattgatcggagcagtggcagcgggcaactgctgtgtgttgaagccgtctgcctattcaccggcgacttcagctgtgatggggaagctgatccgggaagcatttccttcagactatgtgacggtgatagaaggtggcaggaaagaaaatgaagatcttctgaatcagaaatttgactatatttttttcaccggtggtgtgaatgtgggaaaactggtcatggagaaggcaagtgcccacctgactccggtgacgctggagctgggaggcaagagtccctgcatcgtggatcataccgcgaacattccgctgactgccagacggctggtatttggaaaatatttgaactgtggacagacctgtgtggcaccggactatgtgctggtggaaaagtcggtgaaagagaagcttctgacctgtatcaaggaagagatcagaagaatgtttggcgagcatcccttagaaaacccggattatggaaagatgatcaatcagaagcattttgaccgggtttgtggactcattgatccgatgaaactggtggcaggtggtcaggtccaggaggatgcactccgcattgcaccgaccgtgcttgctgatgtgacagcggaggatccagttatgcaggaagagatctttggcccggttttaccggtcataccggtaaaggatatagaggaagccattcggtttgtgcaggaacgaccgaaacctctggcactctatgtatttacagaagacaagcggaccgaacagcgggtactgacggagacctcttatggaggcggctgcatcaatgataccatcattcatctggcaacttccgagatgggctttggcggcgttggcaacagcggtatgggttcttatcatggaaagaaaagctttgatctgttcagccatgagaagagcattgtgaagaaatccacctggatggatctgcctatgcggtatcagccatataccggctggaaagagaaactggtgcggatgtttgtacgttaagaaagagccatgtacatgtttcaaaatatgtgcatggctcttaatcgcatcttgacgtttcctgggatttgttgcagtataagagggaacaaatgagatgaggagaaataaatgctgaatcaattttcaagaaccgagttactgcttggaaaagataatatggagagactggcgaatgccagagttgctgtgttcggtgtaggcggtgtcggcggatatacggtggaggctcttgccagaagcggtgtgggcactcttgatctgatcgatgatgacaaagtatgtctgaccaacattaaccgtcagattctcgcaacccgcagtaccgttggaaaatacaaggtggatgtggccagagaccggatcctggacatcaatccccatgcggtggtcaacacctataagaccttttacatgcctgataatgcagagcagtttgattttacccagtatgattatgtggtggatgccattgatacagtgactggaaagatcgagcttgtggagcaggcgaagcgggcaggaacgcccatcatcagttccatgggagcaggcaataagatggatccgtctgcttttgaagtggcagatatctacaagaccagtgtgtgtccgctggcgaaggtcatgcgtcgggagctgaagaagcgcggtatcagaaagttaaaagttgtatattccaaagagcagccgctggagcccattgatgatatggctatcagctgccgcgagcactgcatctgcccgccgggagcagtccgtaaatgcacggagcgccgggcaattccgggcagcaatgcattcgtgccgtccgtggtgggactgatcattgccggagaagtggtgaaggatctgaccgacgcagacacccgggcaaaggtgaaaacgggaggaaaagcatgaagaccattaccatagaagaactggaacaactgactcccgggtctgtgaccatcgtagatgtgcgcccggcagatacgtatcagagaggaaccttcgagggagccatcaatgttcccatgaaggaatttgttgaccgttacgaagagatcccgaaggataagcctgtgtgggttctgtgtcacacaggtgagcggagccttgattatgtggaactgctctgttcccatggatatgatgcgggaaatattaccggaggttaccgcgcatatctgcgtctgcagttggagcgcttcatgaaagaagaggacgcaagaaaagaaaagaccaaggagatcgagcgaagtctgatcaaaaaattccggaaatccatctggagaagttttacacgtgcgatccagaaatatgatctgatccaggagggggacaagatcgcagtctgcatatccggcggaaaggattccatgctcatggcgaagctcatgcaggagctgcagcgacatggaaaattcccgtttgagcttgtatttctggtgatgaatccaggttacaatgaggacaactggaagattatccaggataatgcaaagcttttggatattccgctgaccgtctttgagagcgatattttcaatattgtggcagaagttgaccgcaatccctgttatctgtgtgcccgcatgcgaagaggctatctctattcccatgccaaggagctgggatgcaacaagatcgcgctgggacatcattttgatgatgtgatcgagacgatcctcatggggatgctctatagcggaaaagtagagaccatgatgccgaagcttcacagcaagaattttgaagggatggaactgatccgcccactttatatggtaaaagaagcagatatcgaggcatggagagactatcatcagctgcattttatccagtgtgcatgccgctttacagagaactgtgctacctgcggcggtgaaaaaggttccaagcgtgatgagatgacggagctgatcaagcatttccgtcaggtcagcgatgtgatcgaatataatattttcaacagtgtgcacaacatcaatcttcggacggtgatcggatatcataaggatgatcaggagtacaatttcctggatgattatgatgagtggggacgtaaggacgcagatggagaagatcgtaaaggattttttggaaaatcagaatcttaaaaaggatgagtttgtggaactgatccgggcgtataaggatccggaagcagtggaagccttaaagacccgggccgtggagcttcggaagaaatactacggagatcaggtatttaccagagggctcattgaatttaccaattactgtaaaaatgactgctattattgtggaatccgtaagagtaatcgaaatacggaccgctaccggctgacagaagaagagattctgacctgctgtgaaaatggctatgaactgggatttcgtacttttgtgctgcagggcggcgaggatccgtactatacggatgaacggatggaatctatcatccgcaagatcaaaaagagctggccggactgtgcattgaccctgtctatcggggagaaatcctatgatagttacaagcggttcaaagaggcaggagcggaccggtatctgctgcgccatgagacggcagatgcagttcattatggccagcttcatccagagactcagaagctgtccgaacggatggattgtctgtggaatctcaaaaagcttggctaccaagtgggagctggctttatggtaggcagtccgaggcagacggacgactgcctggcagaggatctggtatttttacaaaagcttaagcctcagatggtgggaatcggaccctttatcccacaccatgacacccggtttgcgcaggaaccggcaggcagtgtggagttgacgctgtatctgctgtcagtgatccgtattatgctgccgaaggtattgcttccggcgaccacggcgcttggcaccatggatccgcgaggaagagaaaaaggactggagcggggagccaacgtggtgatgcccaatctgtcaccggtgaagaaccggaaagcttatgaactttatgacaataagatctgcaccggcgaggaagcggcggaatgcagaggatgcctgtcacgcagagtggagagtgtggggtatcatctggtcagcgaccgcggcgatgcagtggaatgagtgctgcaggtcagcgcatggcggaggaccgggcactgcaggagcagtgaactgcacatggaaaaggagaagaaatatgaaattcacatatccggcaattatcagaaagcaggacaacggaacatggaaagcatggcttccggatctggcctgctgtgaggcagtgggggatactctggatgatgccattgaagaagttaatgcagcagtctatgactggatcagtctggagctgtctgaggacgaggcggatcttccgcctgtatccgacatggatgacctggacactatcgagggcgatgtgaccagaaatatttgtgtcaatatccggttgtttgatggatgggatgagtagaagttgttatatttgcacaaaaaaattacggaaattggtaaaaagcgtcaatatccgtaaagaaaatgtcaaaatctgttatggcttgtaaccctgatctgtgagataataagaacacagaaaacaaagaggtttttttcgcaaagtttgataactctgtggaaagaacctctttttttaaccaaaaatgaagggagaatgtaaaatggcagaactgacagaaatctccgggaaagtacgacagtacatgaaggagcatgaagaggaatttcttgggcaatttcgtcatctgcaccagcatccggaacttagttttcaggaacatgagaccacagcctacattaagaaaaaactggagggctggggaattgaaatcctggatatcggacttgagaccggtgtggtcggacttttgaaggggggaaaggaaggaccgtgtattgcacttcgtgcggacattgatgcacttccggtgctggaagaatcgacaagtgagtatccgtcacagaacaagggcgtgatgcatgcctgtggtcatgacacacacatggcatctctgctgggggcggcccagatcctggcagaatttcgtgatgaactgaatggaagtgtcaaatttctgttccagcctgcagaagagatcaatcttggcgccaagaagatgatggagctgaattgtctggaaaatccaaaggtggatgcaatctttggtatgcacaattcaccggagatcccggtaggaactgtggcagtcaaaaatggaccactgatggcggccgtggatcgtattattttcaccattaagggtcatggcggacatggcgggatcccgcagcgtaatgtggacccgatcgtggcagcggcagcgatcattcaggcgacacagactgtagtgagcaggaatgtaagtccgatcgattcggcagttatctctatctgcaatgtaaaagcaggagaaggaaccaccaataatgttacaccggacgaagtgaagatgtatggaactgtacgtacttatcggaaagaggtacaggctatgatcgacagacggcttcatgagatcacggaaagcatcagcactgcttacgggtgtgagggaacactggaatatctctatgagctggcagtgacagacaataacccgatactctatgatattgctcatgcggcagtatgcgatacaggagctgagccggtagatcctattccctcaacgggtggagaagatttttccgtttttacatcgcagtcagatgtacctggatttttctactggttaggcgtgagaaatccggataaggattgcgtatattcatggcacagtccgcattttaaggcggatgaaccggccattgccattggtgcgggaacgtatgccatgtccgtatttgaagctgttgatgcacttgccaaaaagtaacgaggaggaatgaactatggagaatgcaaagaaaatattgaaatgctggccgttgcacgtgacactgttgattgtagtatttgcctgtgagtggattaatacaatcaaaatcccgacacctgttggaaatattttattgcttccaatgttgtatgcgattgtgatcactctggtgctttctcttcagaaaccgatcaaatggatgaagcaggaagcatctgaggtgagcagtgattttgtggtttttggtatttcactgtttctggcgaaggttgcagtcaccagtggaactcagatccagcaggtgatcgaagccggaccagcattaatccttcaggagtttggcaatctaggaacaattgttctggcactgccgtttgcattgcttcttggattcaagagagaagcagttggtatgactcactctatctgccgtgagccgaatgttggctacatcgcacagaaatatggtctgaactctccagaaggacgtggtgtaatgaccacttatgtagttggaactttggtaggaactattttcatgggtgtgatggcaagcttccttgcaacaatcaatattcttcatccctacgcgttggctatggcctgtggcgtcggaagcggcagtatgatggcagcatcttcagcatccctggctgcagtcttcccggagatggctgatcagatcacggcttatgcaggaaccagtaatgtattgtccaatgcggatggtattgtaatgacggtattgatcggccttccgatgtgtaatttcctgtataaaaagctggctccgctgtttcatggaaaagatgcaggaaagacagaatagagagggaggactgacagatgaaaaaactgacattggataaagtagttgaatatgtgctgatcctggcaattaccatggtactggttcttatcggtaactgtatcaatacgatcacagatggcaacccggatacgtttgtatcggttctggatggaattcctggtatgctgatcttatttggtatcgcattagtaagcctttgtattgcacagtacacgccgaagattccggcaatcatttatattactatctttggaattctgctggcaatgccttacaacactgtgaccggtccgtatgtggcagaacaggtggcaaagatcggacttcttccggcagcttgtccggtactggcatatgccggtgtgtctatcagtaaagactgggtagagttcaagaaaatcggctggaagggaatcttcgtttctattcttgttatgattggtacttatatcgggtctgcagtgatcgcacagcttattctgaaagcacagggtatcatctaagtagatggattttgatgtttgtataaaagcagaagtaaaaaatgataaataacagaccggatttgagaatagaatcagtctgtggaacatgatatattgattatatcaaaggacaaccaaaaacgaaaacgcagaggagaataaggctatgattaaagtaacaagacagacagacccggaacttgcggcactggttgatgaggagttaaatcgtcaggaacataatattgagatgatcgcatctgagagtaccgcaccgctggcagttatggaactgagcggcagcgtatttaccaataaaacactggaaggatatccgggaaagagattccaggcaggatctgaggtggcagataaagtagaggagcttgcatggaaacgtgcgaaggagctgttcggtgctgagcatgtaaatattcagtcttactctggatcaactgcaaactacagtgtgtttgcatctgttctgaatccgggtgatctgatcttaagtatgcgtcttgaccagggtggacatctgactcacggttcaccagctaactgggtaagtaaaatctacagacatgtattctacggtgtggatccgaagactgagctgattgattatgatgagctggagaagatcgcaaaagagaacaaaccgaagatgatcattgcaggtgcaagttcttattccagactgatcgactatgagcgtatctctaagatcgctgaagaagttggtgcatatttcatggtagatatggctcacatcgcaggacttgttgctgcaaaagtcatcccgagcccgatcccatatgcagactttgtatcttcttctacaaccaaaaccttctgctctgcaagaagtggtatggtattctgtaaagagaaatatgcgaaaattcttgataaaggaactttccctggaagccttggctctctgatgttcaacactatggcagctaagacctggtccttcaaatatgcagcatctcaggagttccatgatatcatggctcaggttattgtaaatgcgaaatgcctggcagaagagcttcagaaatacggtttccgtattgtcagcggcggaacagacaaccatctgttagtagttgacttaagaagtaaaggtctgactggtaagaccatgcagaatgcactggatgcagtaggcatcactgtaaataagaacatgattccgtttgatccggagaaaccgggtgtaacaagcggtatccgtattggtctgactgctgtatcacagagaggactgaaagaaccagagatccgtgagatcgcagcaatcatcaaccaggtagcagaggatccggaagatgaagctaacttaaaggcatgcaaggcaaaagcggaagcattgattgcaaaattcccgctgtacccggctggatcttttgatgactgatcaaaagtaaaataatgatatagaaagaggggctacacgcggctgaatgatttcagagtgtgacagctcctctttcatggtgtataataatcacaggccagttgacaaaaaggagagacttaatatgcgggtgcaggagacagattggggatatattgaatggatggaaccggaatatccgggaatgggatcagaggaagcgtctcttcggacaggaaccgtctatgtggaaccgggaaagaccatgctccggcatgtacattatgaggagcagtttgtctatgtgctggaaggcagaggcattggttatatcaatggagagccacagatctttgagccgggagccagattccatatgcctgcaggctgcacgcacgaatttgtcaacacaggcgatgtgccgctggttcatctgctggtggcaagtccggtatccatcgatccggacagtctgatcgataagaccaggccgctgccgggcagcagtgccaatgatcagctctatgcggctgtggaggcagtccgcacacagtttctggagagtctgcacatggcatttgtgattcggaatgcatctggtcgtgtcgtattgaaaagtgactattttccagaaccctgcatcaaaaaatgcgggattgaaaaaggaaatcatccatattgtctgaagcttgaccagaattgtggggaagcatcggaaaatacatttgtatgtccctgcggactgactatttttcaggtgccggttctgtgggatgacagacttcttggctgggtgcagggtggatatattgtgcagtctaacagcaagcaatcatcagaagaagtgtatatgtatgatatgccggagagcggtagttttggtattttgcagttgcttcggaaggtggcgaaggccatacgtaatttctgcgaatttgatcagtaccggcgggaactatttgagacagaaaagaatctgagtagctcgctggatattcagaaggatctgcagatgcatctgaaagattccgagcttcaggtgacggatctgaagatcaataaccattttctgttcaatacgctgaacagtatggcggcccaggcactggaagggggcatgaaacctctctatcagtcgatcattgacttgtcgaagatgcttcgctattcggtgcggatccgtggccggcagattccgctggcggtggagcttgattatctggaagcttatctgaagctgcagaaactgcggtatccggtgggattttcttataaaatatccatggatccggaactggagcaggccatcgtgccgttcaatttcctgcagcctgtggcggaaaatgcatttacccatggattttccaatgaaaaagagaaaaaactgacggtgactataaaggcggggcggaagcagatccattttcagatctggaacaacggtccggcgctggatgaggaatggtaccggcagatcgaactgcagattcagagtggcagcagtcatggactctctatgatctatgagaagctgaccagcgcttatggagataactgtgtcctgaaattgcaggcaggtaagactgggggaacggtagtgacgattgagatcccttgcaagaactggatagacggagaggaagagaacgatgattaaagctgtgatttgtgatgacgagctggctaccagaaatattatctgtcattttctggaggaagagcagctccccattgagatcgtgggaaatgcagaagatggggaggaagcgattcaactgattaaagagacatctccccggctgatttttctggatattcatatgcctcagaaaaatggatttcaggtgatcgaggaagtgtccagggaagtgggggcgcagatcattgtgctgactgcatttgcttcttttgaaaatgcacagcaggccctgcgcctgggtgtcagtgatatcctgtccaagccggtggattttgagcagcttaaagcagctatctttcgcgctgttggatggaaattcacatccaacgagacggttaatttgatgttggaatatattcataatcattataaagaaaacatggaactggaggatctctccaaagtgacatacagcaccgagagccatctggcccggctgttcaagaagcatatgggtattacgattctctcctatattcatcagcttcggatcgaggaggcctgtcgcctactctccggtcatgaatgtgatattcaggaggcttcgtttcgggtgggatatgcaagcctcaataatttctataaatacttcaaacgctatgtgggtatgactccagcaaagtttttggagaagtaaaagaatgcgacagcttctttacttataatttac

SEQ ID NO: 2143 - DNA, 12716 bp, Unknown
  16S sequences of unknown bacteria
ttgtcaagggggaagcccggtcccccttgaccgtattttggttccttttgtacgcacaaaaggaacgccccggcggcgagccgtaccggttttgcaccctgcaaaatcaatgccccgccgctaggcgaccacaatcttggcctaatatttcttttacctacttttcttcatagaaaagcaggcccccgccgggcaggcgtgctcaccaagccttgcaaaaggctccgccccgccgccaggtgcccaccaactcgacctaaaatccctttgcctgcttttatttctttcgcaccaggtatgcatggatcgcgaaaaaaccgtccgactgttttccctttgcttcggggcagggcgctggaattcgccgggatccgagcggagcatttgtcagaccatggaaaaagcagcaaaagcccggccgtttccggcgaacgcttttgctggacaggcccggtccggccgctataatggggaatagaggaggcgagaaatatggcccttttgaaccgggaaaaacaggcggcggtgcagcagctccccattggggagatcacccccagcccccaccagacccgccgggatttccacgaggaggagctggcggccctggcccagagcatcgaccgcagcggcttgctgaatcccatctcggtgcgggcgctgccgcaggggggctactgccttattgccggggagcgccggtggcgtgcctgccagatgctcggctggagccgcatcccggcgctggtgtggcagaaggatgacgccggtgccgccgccctaaccctggcggaaaacctgcaccgcagcgacctgcactacatagaggaagccgagggcatcctgcggctgatcgttcaatgcggcatgacccaaaatgaggctgccgccctgctggcgatgagcccctccgccctgtgcaataagctgcggctgctgcggctttccccggcggtgcagcaggccctcatcgaaaataacatccccgaacggctggccagggcgctgctccagctgccggatgaggacctgcagcagcgggccatccggcatatggctgccgaggagctgaatgtccgccagggggaggagtacctgcggcagctcctgcaccggcagcagcacccgccctaccggggccttttgcgggattaccgtatcctctttaccaccgtggaccgcgcggtggaggagatccggcgctttggcgtggcggtgaccacccgccgccgggaggaggacgactgcatcagctacaccatccgcatcccaaaatccgccaaaaaggagcgggagccaaaggaccagctttcgctttacgcgtaaatttacctgttcctctcactgagagtaacataaaaccccttcccaactgatcgggaaaagacgcttccggtaccacgccgggggcgccttttctctttttgcgtcccccgcaaacaggggcggcactgcttttctgtgaaaaaagtagtaaaagaattttggggccgggttggcagtcgcctccggctcatttcattcgccacctccctttgcacaagggaggctttcgccgccaggcgcccacaaactatcccccgcataagaaaagttttttgcaaaatccctcccagaacggggcccggatttttagcccacctctaagcagggcagctgttttctctccgcacaaagtatgagtggattgtgaaaatgtttcacgtgaaacatttttgcaggggaaagggttcccaaggggaattattgtgtgctataatggggacaatcgacccgaaggaggcacatcaatggggaaaatcatcgcgatcatcaaccaaaagggcggcgtgggaaaaaccactacggcggtcaatctttcggcggcgctggggcagctgggctgccgtgtgctgctggcggacctggacccgcaggggaacgccaccagcggcgttgggatcaataagcgggaagtgaaggtttccagctaccatgtgctgatggaggagagcggcgcggccgaggctatcctgcccacacggttcaaggggctttccatcctgcccagcaatatagacctggccggcgccgagatagagctggtggaaaaggaaaaccgggccaaatctctgcgggcggcgctgctgcgggtgaaggaggactatgactttatctttattgactgtccgccttctttggggcttatcaccgtaaatgccctgaccgccagcgattctatcctcattcccatccagtgtgaatactacgccctggagggtctgacccagctgatgcagacggtgcgcaccgtcaagcggctgtataatagctccattgccgtggagggcgtgctgctgacgatgtatgacagccgcctgaacctgaccaatcaggtggtgggggagatcaagaagtactttgcggataaggtgttccgctccacggtgccgagaagtgtgcgtatctccgaagcccccagctatggcgagccgatctgctactacgataaggcgaaccgcggcacgctggcctaccagcgggtagcggaggagctgctggagcgcaaccggaagtaaaaatgtttcacgtgaaacaattttgcttcccattcaaaccttggtgcagggggagagttgtcaactgcttttgggtgggatgaaaaagtttgcgggcgcctaacggcggggaaagtgttttaggaagcttggtttgtacggctcgccgccgtggcgttcctttttctcgtgtaaaaggaaccaaaacacgcttggggctctgccccaagacccctgtcgctggctgtgctggatacgaattgatttttgacggcagtcaaaaatcaatccgtactgcgcacagaatcgctcccaaggtagccacgggcgtatctgccctttccccccaccccctttcccgatggcgggaaaggggcccggatgggctggcaactataaaccgagagtaacactctcggggtgttagggcttgtagagagccaagccgctgaccttaaagtatttgctttccctcccccttgtccccctcctccgaggaggggacaggggtggtggttcgccgttctgcgctccagcgcagcggcgataaaaatgtgtcacagacaccttttaagcccatctgcgtgcagtacggatttagatttttcgaccgagaaaaatctaaatccgtagccagcacagttaagcgtcaaaggggtttgcaaaggggaaagcccggttcccctttgccctgttttgcttccttttgcaggagcaaaaggaaggcccctgcggcgagcggtgctaactatgcctttgcaaaaggccccgcggcgccgacaggcgagaaaaattgtgataaaagagggaggaacctatggcaaagaaaagcggactggggaagggcctggacgccctgttcctggataacgagacggcggagagcagcagcctgatgacactgcgcgtttccgatattgagcccaataaggaccagccgagaaaggcctttgagccgaacgcgctggcggagctggcggattccatccgggagcatggtattttgcagccggtggtggtgcgcgcgctgcccggcggggtgtatcagatcatcgcgggggagcggcgctggcgggccagccggatggccggactgagcgagatcccggcgatcgtgatagaggcggatgacgccaaggtgcgggagctggcgctgatagagaacctgcagcggcaggacctgaccccgctggaggaggccgagggctaccgcagcctgatggagcacagcggcatgacccaggaggaggtagcggcgcggctggggaaatcccggccggtggtggccaatgccctgcgcctgctgaacctgccgaagggcgtaaaaatgcagctggatgagggctttttgacggcgggacatgcccggctgctggccagcctgccggaagcggacgcgatccggtggggcaatgatgtggtgctccgggggctgaatgtgcgggagctggagactgccctgaagaaggagcgcaacgcggccaaaaaagcggcggagcggaaggcgaacgccaatgaggacccgtggggcgacaaggagctgcgggagatgcagctggccctgcaggaggagctgggacgccgggtgaccatcaaccgcaaggggatgggaggcattctgacgatagcgtacagtgatgaggatgatctgatcgacctggtggataagctgctggacggcgactgagcggccgggcggcatcgcgcggaggatcggtcggcccgcagggccggccgccggaggcggccgcaggcggcggagccgccgaaaccgtccggaggacggtttgccctgcgggccgtaagcctggatgctgcagagaccggaaaagtgcggctgcggactttgctgacggatgagccgggcggatatgcgctggcctgcgggcaaggaaaagcggtttgcgggggtcggcccaggctgggaccgactttttatagaaaagtgtgcgaaggacgcgaaaaagcttgccaagtggaaggcaagtgggtataataaacggatagaaacacacagaaagaaggaaattctgatgctggatattaaggtaataagacaggacccggagcgggtaaaggctgcgatgaagagccgcaacaaggacatggataaggagatcgatgagatcctggagatcgatgtggagcggcgcgccattaatgcggcggtggataacatgaaggccgagcagaaccgggtctctaagctgataccgcagtataagaaggagggcaaggatgttgcccccattctggcggagatgaaggagctttccgataagatcaccgaggacggcgccaagctggccgagctggaggaaaagcaggatatcatcatccatgccatccccaatatcccccacgagagcgtgccgatcggtaaggacgacaccgagaatgtggagctgcgccgctggggcgagccgacccactttgactatgagccgcaggcccactgggacctgggtgctgatctgggcatcctggacccggagactgccgccaaggtgacagggaaacgattccacttttaccgcgggctgggctgccggttggagcgcagtatcattgcgttctttatggatacccacagcgcccacggctacaccgagattttcccgccctttattgccaataaggacagcatgaccggcaccgggcaactgcccaagtttgccgaggatatgtataagctggaggggctggactactacctgatccccacggcggaggtgcctgtaaccaatatgtaccgcggcgatatcatcgatggcagcaagctgccgatgagcttctgtgcttattccgcctgcttccgtggcgaggcgggcagcgccggccgtgacacccgcggtctgatccggcagcatgagtttaacaaggtggaattggttaaatttaccaaacccgaggaaagctatgccgagctggaaaagctgacccacgacgccgagcgcgtgctgcagctgctgggcctgccctaccgtgtggtggtgctttccaccggcgacctgggcttctccagcgccaagacctatgatattgaggtgtggatgccgagctatggccggtatgtggagatctcctcctgcagcgactttgaggatttccaggcacggcgggcttccatccgctacaaggagaaccccaaggacaaggccaagctggtgcacaccctgaatggcagcggtgtggcggtaggccgtaccgtggcagccatcatggagaactaccagaacccggacggcagcattaccgttccggaggtgctgcgcccctacatgggctgcgaccggatcaccaagcaggataccgggatactgtaataagtgaaaaaatgagcagtcggcgggagccggctgctttcttttttggggggaagaaaaaacttccgttggagagaggtgggcggggcctttgtaaaaaaggctccgcggcgccgaaggcgagatagaactaaaacagtgagacccctgcggaggggtaaaaaaagagagccttgcggctctctctttttatgcttcagctatgaatcagccaacgaagttgaccttaacattgctcagctcggctttctcggggttcgacatctcgaagttgttgtcaacggtgatctcgccgttaacgatcttggcgagctcggcctgatactgctctacggtgaagttcttgaggctccaggtagcggtgggcaggccaacagcgttctccttagcgctcagggtggtggacttgccggcgatgtcagcaaagctgccctcgaacacataagccaagccccactgtacgccatcggaaaggcccttcatggcggaggtgatgatggtctcggagaggggggattggtcggtatcaacgcctaccatgtaagcatcattttcggcagcagcctgagcaacggactgatacatattaccgccgcagcagaagatgacctcggtgccattgttgtaccagccattaacgagagcctgcagctcggaagagggggagtaggagttaccatactgccaggtgtagttcagctcaacggtcttgcccatctcagcggcagcagcattggcgccctgagcgaagccgtaaccgtagcgaacgcaagcggggttggtgccgccgccgccgccggtgaagccgagcttttcaaagccttccttaacaacagcgtaaccggccaggtagccgcactgctcctcggcaaagacgataccggcaacattagcgccgacagaaccgccatcaacaaagaagaaggcaacatcgggatactcggcagcgatcttggtgagagcagcctcctgcaggaagccggcggtaacaacagccttggcaccgttgtcgcaggcagccttcatggcgtcatagcggtcctcatcggtggccttatcgccattggcgggcatgtagtacttgtagctgaggttgtggttggcagcatacagcttaacgccatcgaaggtgccctggttgaaggaaccatccttcagctggccaacatcggtgacgaagccgatctcatacttgccgtcctcggtggtcatctcatcggcgatctcatcggcgttggtgatgacagcgggggtgggatcgggggtgggagcgggcttctcgccgcaggctaccatggcaagtaccatgaccagagcgagagcgattgcaagaatctttttcatctttttctcctccagaaaattttgtttttgccgcgccgccggtgtggcggcacgaaagcaactatattatagcaaccaaccgggacgggcgcaaccttattttagcctttttgtggaattcgcaagaaagcaacgcggaaatttggcggatttgttttgcgattctgtgaataggaggaatggttactggaatgggagctgcttttcaaataagaaaaggagaaaaagagtttttagggccaaggcggggggcgggcaggcgtacaaatgaataccttttataaaatttcgcaacgcctttaggcgaccacaatcttggcctaatatttcttttgcatccttttcttcacagaaaagtaaccccccgccggaggcggagaaggggaacggaggggcggatatgggagaaaaaggtggtaaattgaacaaaaaggcgtgttgcatttctatgctggggggcagggtccgccttgcaatttgcccggagagactatataattataatgttgtaatatgcaatgcgcacaaggaggcacagaccagaccaaacaaacaggaaggggggatggagcatggaacaaaaccacaacaatgattacattattgaaatgcttcacatcaccaaggagttccccggcattaaggcaaatgacgatattaccctgcagctgtggcgcggggagatccacgcgctgctgggcgaaaacggtgcgggcaaaagtacgctgatgagcgtgctctttggcctgtaccagccggaaaaaggagagatccgcaaaaacggcgtgccggtaaagatcaatgaccccaatgacgccacggcactgggcatcggcatggtgcaccagcacttcaagctcattgatgtttttaccgtgctggataacatcatcctgggggcggaggacaccaagctgggctttctgcagaagaaaaaagcccggcagaaggtgaaggagctctcggaaaaatacgggcttgccattgacatggacgccaaggtggaggatattaccgtggggatgcagcagcgggtggagatcctgaagatgctgtaccgcgataatgagatccttatctttgatgagccgaccgccgtattgaccccgcaggagatcgatgagctgatggagatcatgcgcaacctggccaaggagggtaagagcatcctctttatcagtcataaactcaatgagatcatggcggtggcggaccgctgcaccgtactgcgcaagggcaaatatgtcggcaccatcgatacggccaagaccaacaagcaggagctgagcaatatgatggtgggccgcccggtccagctggaggtgcagaaatccccggcgaagcccggcgaggcggtgctggaggtagagcacttttccgtgcccagcaagctgcacaagaaggacgccgtgcacgatgtgacctttaccgcgcgcagcggggagatcttgtgtatcgcgggcattgatgacaacggccagaccgagctggtatacggcctgaccggcctggagaagcccagcggcggcaccgtgaagctgtgcgggcacgatattacccacgcgaagataagagagcgcggcaaggagatgtcccacatcccggaggaccggcacaagcatggcctggtgctggactttacgctggagcagaatatggtgctgcagcgctactacgagaccaaattccagaatcatgggttcatcaaggcggacgcggtgcgtgagtacgccgacggcctgatcaagcaatttgatgtgcgcagcggccagggccccattaccgtggcccgcagcatgagcggcggcaaccagcagaaggcgatcgtggcccgtgagctggaccgtgataaggcgctgatcgtggcggtgcagcccacccgcggtctggatgtcggcgcgatcgagtatatccacaagcagctggtggcggagcgggaccgcggtaaggcggtgctgctggtttctctggagctggacgaggtgatgagcctttccgaccgcatcctggtgatgtacgagggtgagatcgtgggcgagctggaccccgccaagaccaccgtgcaggagctgggcctgtatatggccggcgccaagcggcagcataacacgcaggaaggaaagggggagggcagcgatgagtaataaagtaaaatctccgctgatgaaaaaggcccccacctattcgctgcgggcctccatcatctccatcctcatcggccttttgaccggtgcggtggtcatcctgatcgtgggcgcctttaacccgctgatctcgctgaagggtgcgtgggacggcatccggctggtgctctttggcgtgctgagcaccgggcgtgacgccgccggtgctttgaccttcggcttcaatcccaccaatatcggcaacatgctgttccgggctacgccgctcatccttaccggtgtttcggtggcggtggcctttaagaccggcctgttcaatatcggcgcgccgggccagtacctggccggtaccacagcttccctgttcctggcgctttccatccccagcagcagcgttcccgcctggctcatctggttcatcgccttcctgggcggtgtgctggccggtgccctgtggggcgccatccccggcctgctgaaggcgacccttaatatcaacgaggtcatcgcctgcatcatgaccaactggatcgcggcaagcctggtgacctggctctttgatatcagcaacctgaagaacatggtggagggcaacaagaccgggtatgtctacaagacgacctacaacggcgtggcgacctccaagatggggctggataagctgttccccggcagccaagtaaatggcggcatcatcatcgccatcattatggcgatcctggtttacatcatgctggaaaagacgacctttggatatgagctgaaggcctgcggtgccaaccggcacgccgcccggtatgccggcatccacgataagcgcaacatcgtctgctcgatggccattgccggcgccatggcgggcgcggcgggggctctgtactatctttccggcaacaccgaatttttctggaccacctaccagtcgctgcccagcgagggctttgacggcattgccgtggcgctgctggcggtcaataaccccatcggggtcatctttaccggcatattcatgtcgctgctttccatcgcgggtctgcagctgaccaacctgacggcctacaacgagtacatcaccgatgtgatcatcgcggtgattgtgtacctctcggctttctcgctggtgatcaagctgtggatcagccgccggaagaaggagggcaagtccatcctgccatggaagaaaaagcagccggaaggcgccgggctgctgcctgacgcgcagccggcggaggaggcggcggcagccgccgaggacgccggtggggccgccgagccggagggcgaggcggccgggactgcggaaaccggaaaggaggccgaggcgtaatgtcatttctcatcagacagacattgatttatgccatcccgttgatggtagtggcgctggccggcatctttgcggagcgcagcggtatcatcaacctggcattggaaggtattatgatctttggcgcctttatcggggtgctgtttgtacggatgatgcaggcaatgggctggtttgaggcggcaaaggccgccgataactgggtggcgctgcaggggtatctgctgctggccatgctggtggcggcgatactgggcgcggtgttctcgctgctattggcgttcgcggccatcaacctaagggcagaccagaccattggcggtacggcgctgaacatgctggcgcccgcgctggtgctgttcctggtgcgcctcatcgccaagcagaaccagctgctgctgctcaagggtgactccgcctcctggttcatgataaaaaagacgatgctgggctttgacagaaccgcggagctgaacttcttccaggagaccttcctcaataaggtgtacctgagcaactatgtatgcgtgctggtattcatcatcctggccatcattctttacaagacccgctttggcctgcggctgcgggcctgtggtgaaaacccccaggcggcggattcgctgggcatcaatgtaaagaagatgcgctatgccggcaccaccatttccggcgcgctggccggtatgggcggctttgtctacgcggtgaccaccgccaactgttcggccaacggcgatgtggcgggctttggcttcctggcgctggcggttatgatctttggtaactggaagccgctgaatgtggcgggcggcgcgctgctgttcggtctgtttaagtgcatcgcggcgtgctattccacgctggatatcaacggcgacggcatctacgcgctgacggagctgggcctgaacgccaacttctaccggctgctgccgtatgtcatcacgctggtcgtgctggcctttacctccaagagttcccgggcccccaaggctgagggcattccctacgataagggacagagataaaaaggcaaaaccaatcgtaagcaaagggcggctcctgcgggggccgcttccttttggccgggggatgtcattgacgggcgggcggaaaattggtatgctattagaatgatctcccggtatggcggccgcagagaaaaggtatggccgcagacccgcgaaggcgcgcaggcgcggcggagcgggggagggccggccccggctttggcggggcggcccgacggagagcggagccgtgcctgcgcgcatccggaaggccgggggaagaaagcattttgggcaagagagataggaggttccggaatggagcatcttgatgcaagactgggtaccatagcggctatggtgccgcgctgccgggcggtggcagatatcggctgcgaccatgggctgctggtggcggctctgctggagggcggccgctgcgattacggcattgcggccgatattaaccccatgccgctggagaaggcccggcaggagctgacccgccggggactgctggcacagagcgagtgccgcctgaccaacggactgtgcggcatcgcgccggtgggggtggatgtggtagtgatcgccgggatgggtggggagctgatcgcggatatcctttcccggtgggactacaccgaaaacccggccattacctaccttttgcagcccatgacccggccggtacacctgcggcggtggctgtatacccatcgctttaccctgcgggaggagcgctgctgccgggcgaacggcaagctgtatacggtactgcgggcgcagtacaccggctgcgctaccgaggagactccggcggcgctgtactttggggcgctggacctggaaaatgacccgctggccggggaataccgggagcaggtgctgggacgcctgcggcggcgcattaccgggctggtggaagccaagcccggccccgaacgggacgctgagctggcggaagcgacgaagctgctgctggcgctgcgataaaactgaaattctgcagggggcagggcggg

SEQ ID NO: 2144 - DNA, 1674 bp, Unknown
  16S sequences of unknown bacteria
ccgccgccaagcgcaaaggcatccattgcggcagagagccaaagcttccgccggatgattttgaggaagtcgtcaaaggatggcgcgatcattcatacagcggcaaggaagctgccaaaaagctcggcgtaagccgaacttatctgtacaaatacgcccgcgcgcgcaatctgatgtgatcggcgtgtcctttcgatgctggaaaatcattatatttatcgatttgatgtgcacgatcggggagaggggcatagatcatgaagacaagcaatgaattcatcatgagagaaattgccggagaatacgtcctggtgccgataggaaagcgcgcgctgaccttccagggcctggtgaccatgaatgaagtcggcgcgctgatctgggaaatgatggaaaaagaaagtgacatcgaccagatcgtcagcggcatcctggacgaatatgaagtagatgaacagacggcgagaaaagatgtgctcgatttcatcggctttttgaaggactgccagatcatagaagactgattgcagatcatgccctcgctgtcttgaggaaagagggaatgaaatgaatgaatatcgaaaactgcttatgcgccagatcgaccacgcctttgcccaaggaaaatatccatttttttatggcatttgcggcatgggaaaacatgaagcgctgcatggatacgcgcagcgccagaaacgcgcctgtaagacattgaacggagaaatgccggatgatccatcctgcatctacatgatcgaccagtttgatgacgaacgatatttgcggcgattgtgtgaagcattgaagacacagacagcttgccatgtctgtttcatcagcgaacatatgctgcctgcctgcatgtatgagctgatgctggaacggatccagctgtttccggcagacgatttctgtttttcactgtcagagtgtcagcgcctgctcagatctgaacatcttgacgaggagcagatcaaagcgatcttcctgcacagtgatggctgccttgcggccatccgttatcatctgcgccgtgaacaggaggatctggaaagatattggaccgcttatctttcacattgttatcagctgttttctgatgcgcagcagaaactgatgcatcaattgagcacgatcggctcattggaacgcgaaggcgcacaggaactgctacaggctgaccctgagatgctcagacagctggtgaatgccggcatgctgagagaagaagcgggcatcctgcgtgttcctgcctgtctgcgctggccgctgtcagaagatgaagcacttttagacagcctgtttgaatatcatctgcgcaaagggcagatcgtccgcgcatggcgctgcgctcgttccttatcccagcaggaaaagctgtttacggctagaggaggggaactggcgctgatggcaaaggaagatgaattgcctatgctgcaggaagcaagccagggatacttcctcatgcaggcgatcgtcctgtttcgccagcattgccagctgcagctgcatacgctgctgcatgctgccgcgcagcgagatgaggcgtatttcctggcgtggctgctatgcgaagacctagagctggatgcgtggatccaggctgccagagaagcgcagatcgaactggatatgccggcggggctgtggatcagcggctttctcaaa

SEQ ID NO: 2145 - DNA, 5503 bp, Unknown
  16S sequences of unknown bacteria
gatttatactgaggtaatatttaaaatttgtgtccagtttttgttgactagtgcaatttctttgtgatactataggtatgtaagggcaccaggagaggaggatgggtaagacaagtgccggagaaacagctgtaagttttttgtcacgaaaatttacgtgttttttaattttacggaaacatagagtacagttaatattttgtatgtgcatgcaagatgatatgcaaaaggaaaaggaggagaaattgaatgaagaaactgctgaagtttacgcttgcggcatctatggcgatgagcgccatcccactgcaggcgcaggccaatgaggcaggcggagatgtcgtcatcagtgaaaatggcacggaagtgacaatcggcaatggttatctgtcgcgcacctttactacagaaggcgggcagcttcggaccaaagccatcaccaacagccggatcaatgaagtgtttgagccggcatcagggtcagaagactttatcatcaatctggtggatgacacccaggacgtagaggagatcatcattccgccttccgcaccgctgtcgcgtgagggctggagcgcgcagctctataatgcgcagggcgttgcctttgatcaggtagacaggctgtttgacggtgatccggatacctatgtcgatcagtatcagaatgccggcatgccgatcaccctggagatcgatctgggcagcgtacagaaagtcggctcgttctcattccagaaacgtccgggctacagtgatccggtatatggcatcaatggcacgatgggtgagtataagctgtatgtgagcgaagacggcgaggtctgggaagaagccggtgcaggtgaatttacagaagaagactacaacctgcatgaggaagacggcctgtataatgtcggagacctcgtctatggcaatttcgatcagatccatgagacgcgttatgtgcgcatcgatacgctgagcgatgcgctgggcacgaccgaagagtttaccggcgcggagatcatgctttatgaagatcaggcatcaaggagcaccgagacgatcctgcccagcgaggagatcggccgtgacggctgggacattaccctggcaggtgcagcagctgccaacctgatcgatggcattgatgccacgaccgcagtgggaagtgtgaatgatgagatcatcatcgacctgggcagtgtttgctcagttggttctttctcttatcagaaacgccctggttatcatcagagcgcctggggagtcaacggcacgatgggagagtatgcgctgtttgtcagtacggacggcagcgagtggactcctgccggaaccggctcgttcacccgtgaagaatatggcttgcatgaggtcgtgctcgatgagccgcagacaagcgacggcatcacgcatccgaccggaacgaccttatataatgtcggcgatcttgtctatggcaattttgatcagatctatgagacacgctatgtgaagatcgtgccgaagagcgatgtgctgggcggtaccgatgaattccacggtgcggagatccgtctctatgcggaccagaagatcgtgcccgagatcgtggaagaggatcatgatatccgtgccagcgaactgagcgtggaagacgtgagcgtggaagataatacgctgcgcgtatcctttgcgccctttgcactgcaaggcgtgaactgggacatcgatatggtcgctgccatggaagatggcaaacactatatgaatacatggctggagatcagcgcggatgatccttcggtcgcagccatcgattatatcgatcttgatcattttgtcatcccggaagatgccagtgatgtatggagcatcccggatgaatcgcagatctcttcgatgtggatcggcaagcatgagctgatgctgggacagccgatctatgcggacggtctgttcttcggctcagagttccccgcacaggaaacagatgtcgaagatgacgcgatgaagatccgctattattccggaaagaccatcgcgaagatggcagaagatggacaggatgtccgaaacggaaacatgttccgcacatggaacaatgtggtcggcgcagcgcagggcacagagaccgctgtcgtacagacagatttctttgattacatcgaagatatcgctacgccttcgacattccgcaagcagtataattcctggtatgacaacatgatgaatatcagtgattccagcatcgaggcttctttcctcggcacagaaaaaggattggcgcaaaacggcgtagagccgctggacagctatgtcgtggatgatggctggaacaactataacaatgagatcggcggagtgaacgcgccggctgcatctggaacgacgcagaaccagaccggattctgggagttcaacagcaagttccctaacgagctgtatacgtcgaccgagctgaccgacaagctgcagtccagctttggcgtatgggtcggcccgcagggcggatacaactatttcggcggattctcccgctatctggaagcgatgggcactggctatgtccagcataacagcgctctgggcgatgtcgtctgcaccggctcacgcaagtacatccagaattttgaagaccgcttcgtcgattatcagacccgctttgacatcgattattggaaatgggacggctttgcgtccagaccatgcaacgcggaagatcatgatcacatggtcggcggtgacaacaacatgtatttcaccagcgatatgtgggaagcatggaccgatctgttcgagcatgcccgcgctgcccgcgccgctgaaggcaagggactgtggatcaacgccacctgttatgtcaacctgagcccgtggctgctgcagtgggtgaatacgatctgggtgcaggattccggcgataccggacaggccggcgatacctccgctgcccgtcaccagcagaagatctactatcgtgacgatatctactataatttatatatgaccaatgagatccagtttccattgaagaacatctacaaccatgatccgatctacggtgtctcggatgcttccaacgcaacgacggatgtgttccgggaattcctgtttgacaacgcgatgcgcggcacggcgttctgggaactgtactattcgccgagcatcatggacgatgccaaatggcaggtgacggcagatgcgcttgattttgcggaaagcaatcatgaagtgctgaagaatgccaagctgttcaccacggaaggcagccgtccatctgaggatgtgtatggctactccgcatggaacgatgagcagggcttcgtctctttcgtcaatccgactgcggaagaacagacctttgcccttacgctgaatgatctggtcggcgtgccgcagggcatgcacgatctgcagcaggtgcgcatctatccgtatgcgtctcagccggatgctcagcgcgtcagctacggagacacgctggaagtgacgctgtcgccgttcagctcgcagatctatcagttcggcatcacggatgaggaagcgccgcaggtcgtttctgcccgcatcatcgatgaggataccatcgaggtgcgcttcgatgagcgagtcaacgcgcagatcgaggcagaggtcgacggcagcgcggcagaagcgcagctgagcgaggattaccgcaccgtaaagatcgcggcagaaggggtgggcgaaacagcgtcgctgaagatgagcggtatccgcgatatttacggcaatgcggctgaggaatacaacgcagatgtccgcacgagcgcagagatcgcttccgcaagtcacgcagaggatgtctctggcgccatcgaagtgcaggatgcagaaggaaatacgtatctgaacctgcgcggcaatgcctatgcgctgagagaagacggcatcagcggaacgacggacttcagcgtatcgctgacgctcaataccatcgataccgataccgtgctgctcaagcagggagaagactacacgatcggcatcgatgcggacggatatgtgaaggccagcgtaggcggcgtcaccctgagcagccaggagagcgtcacgaccgtgaccgaaaaggcgagcggtacgtttggcacatcggcttatcaggaaacgaagacgaggaccgatatcatcggtaaggtcaatgacggccagaaccacacggtcaatctggtgcgcgaagccaacggcatgatcaagctgtatgtcgacggcagcctgagcgcatccgcttatgaggaagatcggctgaatgagcagatgagcggcagcgccatcacgttgggcgatgcatcttacagcggctatgtcggcgatgtcctcgtccgcaacagcgcgatctactatgatgatgcgcagcagtatgcccaggatcacgcgatcgccctgagcgcaaagccgctttccaaagagggctggagcgcggaagcatgcagcgagcatacttccgtgccaggtactggcggtgatggtgcggccatggatgtcgtggacggcaacaataacacatactggcacagcaactacagtggcggagatacgtgtgagaacacacatacgcttacggtagattttggtcagacagtgacctttgataatctggaatacgtggccagaccaggtgcaggcaatggcacttggacgagcgtgacgatcatcggcatcgatgaagagggcaatgagcagacattgatggaagagcaggaagtgacgctgacaaacaatatggcggtattcgcatttgcggcgccggagacattccgcgccgtgcgctttgagctcaccggcacaggcggctatggctccgcagccgagatcaacgcgacgtgcaatgtcgagcaggtaaacatcagcgagatcgccgcgctccagcaggaagcgcagcagctcttgcagagcgtcgatccggcagactacacggacgaaagctatgacgcattcaaggcggtcgctgatcagatcgcacagctcaacccgttcgtcgatgaaggaacagatgtcagcgccctgcgcactgcactgcatgacgcgcatcaggcactcgtgccgatcagcggtgagccagccagcgatgcagccatgcaggcactgcgtgatatggtggaaaaagccatcgcgatgggttctgaggatgcagcgctgaacgaagcgatcaccaacgcacaggccgtactggccaaggaagcgccgaccgctacggaagttgtcactgctctgctcgatctgagcgaagcgatgcaggatctgggcggatctgcagatgtggatgccctgagagcagatgtacaggcaacgatcgacttcatcaacgagaacatcctgaacgatgtagaagggctccgtccgggcaaggtgcaggcgctgagagacgcagtccaggccgcacaggatgtcgtcagcgatccaggcgcaaccgcagatcagctgaaggcagcgaacaaagcgatgagcaagacagcgcaggagctgtgggagatcgtgacgaaggctgaactggaagcactgatcgaagccg

SEQ ID NO: 2146 - DNA, 12213 bp, Unknown
  16S sequences of unknown bacteria
ctgggaggccttttgctctgccatggattgcgaatatccctcggacaaaaatttttgtacctgatttttatgcagctcttcttgctttgcacgggtgcgataggatgagcatatcagaggagagagcccggcgcggcgggcatcgtccatcatatcttgtagcgcggcatatgctctgcggtcgatggattgcccatttttaagctgtaccaggctcactttccatccggagggaagggggtgcttgctgtttaccagcgtcaaaagctcattgccgttggcagatccgttgcttaccggcgaggcgctcggagcgctgccgggatccactacatccaagtataccgaagaggaggagcagcgtcccaagaaaaagaacaaaacacataaaataagcaccaggataaaggcagaccgctgcctacgccttttttgcctgcgccggtattcactggggcgcagtcccccatatcccatgacaaacatcctttctctcacatgatcgctttttatgaaggtagtataggggggcaaggcataggaataggcgcagatttgcatcaaagctgcatcatatattgttcatgctgcgcatggctttcagcgccaggatcacggcgttattttcctggaatacaaaataatagagtttttcatgctcttcatccagcaaaagataacggctaaacgcagcaaaggctgactgcgtatcaaaggaaaggggctggccgttgagccgaatgttatattgatagatttggtttgtatccgcatccatcgtaagggtacaatgataatcctctactgaaaaggaatagtcaaggatgtttacgatgcgagagggatggtctacatccatataggtataggacgtagaataatacatcggcccatcatcgagaggaaggtcaggaaatgcgcccagcgactgtaacttttttagctctgcaaacaccttttcctcggggataagatcattttttttagaagaataggattttgaattctggcgttccgtaagaacgatgttagagccgatgcgcccataatcgcagattagagagattttctccgcggcgctcaaaggatgcccctcctcaaagggttctgctgtgggcagcggttccaaatgggccacaccaagcatggagttatcctgtaggcggcaaaggaaaattggcaggaaggctgcaagaaacagcagtaaaatggccagaaaaaacggcgcgatggttttaagcttctgcaggcaaatattccccccttaaccaaacgcgtgcgcatgttccttggcccggctggctgacaaattctagcagtccgccatgcaggcggagaatttcgctgcatacggccagccccagtccggcgcccccttttttgcgggaacgggatttatccaccatgtaaaacgcttctgtgattttggcgagctcctcctgctccatcccgcagccgttatcgatgaccaaaatctcatagccgtcatcacatctgcggcccagcagagagatctctcccttttgcccctcatcgatggctttacgggcgttatccagcaaattgatgcagactgtggccatcagatccggctctatggtcagcagcgcatactgacactttacggtaaatcgaatgtgattttgctccatgacgggcaaaacggtttggtagatggattgaaaaaactgtttgctggaaacgcggcgcatcggcaggtcttcacgctttaatacaataagatccatcagtttcatggaaagggcttccaaccgtttgccatcctgaacgatctggttggcaaacaggatttgttgttcttctgtgagctttttggagcgcagcatatccgcatagccgatcatggaggttagcggcgttttcagctcatgggcaaagttgccggcaaacatttcctgcctggtagcggtttcctttagattgtccatggtctgcaagagcttgagcgacatggcgttgaaatcggatgcaagcgtgccgatttcatcgttgttggccacgcggaccgggtttttgaaatgcccggtagccagctgcttggtagcgcgggataaggcccggatggggcgcatcagccagcgcgccagaaagaagatgacaagcgcacagccgccgaataggaccaggatcagcatgataaacgtgcggtactgcccctgcttatgctgaaataccggcgtaatatctcggtagttttcaatgtaaaatacagtgcctgccagcgttaagggctgggcggtctgtatataataacggccctctatttccacaatccggtgcccacggtccgcagcggtaagggagggcgctagggattcctgtacggcaaaatgaatatcttgaaaaacggtctttccgttttgatcgcttaggcggaaagggatattgccgttggcattttgaatggaaatgcttttcgccacgttttggagtatgtaggatagctcatcggccagcgtgccggcttcatcggatgctaacatatccttttccagaatggtagcggagtcaattccgtaaatggtactgagaatacgctcaaatgagatatagagaatatcattctcttgaaaagaaacctcaatttccctgtctaatgaagtatggaagctggattggatcaaaacataaccgccaatgccaaaacagacggttacaatgagcataatgctaaagtacagcttccaaaaaaagttcacttaggttacctccagccgatagccgatcttatatacaggcacgatcttatcttccagccccagcttttttctcatcctttgtacatgtaggtctaccgttctgctatcgcccatatacgtttcgccccaaaccctttcgtagatgcgatctcgaaacagggcaatgtttgggttttgcaaaaaaagcaccaaaaggtcgtattcttttaccgtcaggctgacgggctcgccggattttttgacaatgcgggacagggtatccactgtgatatcatacacgctcaatatcttattggctttatgataccggcgcaacacggtttctacacgcgccagcagctcgatgatctcaaagggctttatgatataatcttccgctcccaggcgcaggcctttgacccgatcgctgacatgtgccttggcggtaagaaagatcacgggaatctgtaaagggcgtatgtattccagcagctcaaacccgttgattttgggcagcatcacatccaaaagaatcaaatcataaagattgctttccagcagcgtagcggcctgctcgccatcataggcgcaaaagcaagcgtagcctgcatcggtcaggttcaatcgaatcaattcagaaatgggtttttcatcctcgacaatgagtattcggttcatagccatcctcccttgcgcagaaaaaccttacatcaaagttgcgtcaaagttgtatcatccatctcatcataacacagggacaagaagggatgtctgaaaagaaagaaacgaccggcggtaaaaatcaccagccggtcgcgtatcaagagcttacttttcaaattcgatttccaatccatctgttaagcgttccatcagatagtttagttgcttttgctctgccacggttaaaagcgcataggcacgcatctgcgcttggttaagctgaaccaacagttcggaaatataagccctgccgctttctgtgagccgaatcaccttgcggcgcccatcgctgggatggaaagagcgcacgatgtacccgcttttttccagattgcgaaggataccgctcatcgtttgtcgcggcagatacagccggtctgcaatttcagaaggaaatccgccctcgggatattgcaaaagcttttccatcaccataaacgtggaaaaagcaatgttgtgtttccagccccaatgatcgtacaatcgctcatgttttgtaatagaacgcgttagatccttgtagcgcagatatgcgtcggtttcgatactgtcgttttttttcatggcagcacacgctttcttttttttgttttattatattgtttcgtattatttctgtcaaacaaaaagggaataaaagtgcaaaagaaattatttcaagaatcccttgacgtataatactataaaggataatattaaatagtattaaaaagaagggggcattcatgtgaaagcggttacgattacgcaggtgcaaaaagtgcaggtcatggaatattccatgccggaggttgggccgaacgatgtgttgattcaaatcaaggcttgtgccctatgtacgatggaacagagaatctatctagggaagaaggatgtaggcggctatcccgtgattgccgggcatgaggccagcggcattgttgtacaggtaggccaacaggttaagcattgtaaggtaggcgatcatgtcgtgtctaccgacccttactgcggaacctgctattactgccgtacggggagggccagccaatgccattccggcattgccgacgctgtatataagcgtccggatggcgccatcaatatggtgggctacttagcggaatatattgcggtggatcaaagccgcgtcatcgttgtatcggatgcactgccgtttgagcaggcagcgctgacagagccattggcatgctgcctgcacagcgtaaacaaagcagagatccagctgggggacgtcgtggttgtcatcggagcgggcgttatgggcctgctacatgtgcagctggcaaaaaggagaggggcctatgttattttggcagaggtagacccggccagaagggaaaaagcgcttgccattgttgcggatgatgaatttgaccccacaaagacagacccggccgcctatatagaaaagaaagtaggcgtaagaggggtacaggttgtattcaatacaacggcggtacacgaggtatgggcacaggcgttgtccatgctgtccccctatggaaagcttattgcatacagctcgcaatacccggatacgccggtgccgatccatatgggagaagtgcataatacggaaattgagatcatcgggacggtatcccccaaccaggcggatatgtataatgcggcttggctcatcgaaagcggcctgattgacgtaaagcccgtgatccaagaactggttcccatggcgcagggcgcggaggcatttgaaaaagcggttgtgccaggtgcctatcgaattgttattacgatgtaaaaaccatgctgtatggtcaatgtatagaaaagaagagaaacatgctgattacaatgaaaaaactgctggatgtggccaaaaaagagggcggctttgccgttcctgccccgaatgtattttccatggaaacaacagaggctgcataccaggcggccagggagatgcaggccccggtgattttgaacgtatgggatgcgggggcggaatggattgaaaagcaggccaatctggcgctgtattttgaaaagaagtatccagacgtcatcgcggcgctcaacctggaccatggccagtcttatgattccgaagttgctgccatccgcagcggatttacctcggtaatgagcgacaggtccatgatgccgtttgagcaaaatgtagaacaagtcaagcgcattgtggatacggcgcatgccgtcaatgtatccgtagaggcggagctggggcatgtgggccagggttatgaatacgagcagacgcgcgatgcgtggctgaccaacccggatgaggccgtggcctatgtagagcagacacagtgcgattgcctagccgtagcggtagggacctcgcacggcgcctacaaaggaacgccaagactggattttgcccttctggaaacgctcaacagcttggtttctgtacctttggtgctgcacggcggcagcggcacgggagatgaaaacttggccaaggctgtagcggtcggcatccaaaaggtaaacctttgcactgatctaatggatgcctacgagagaaaggcaaaagagaaggccaagaccagcggtgaatttttagagatttatgaggccggcgtgcagggctggaaggaagagctgatgcggtatatggagctgttttctgcaaagggcaaggcggttttgtatcaagaacatctttcccgggccgaagggctatattaccatgtaaaggatgaaaacttcaccgttcaaaaataacgttagacttggcaaaaaaagcggccgttaaggctgcttttttgcgcatttttccggcataaaagacattgccaaacaagagtgggttgattacaatggaaatagtattgagcctattttaatcgtttatagatccttttttcacggtatgtccgatcgatgcatcgtcgtatagttaagcaagggtagttttacaatagcatagcaaaaggaagaaggaggattcgtatgctgaaagacaaaagtgcgctgggacagactggccttgaggtaagccccctatgtttggggtgcggttcctacggcggcagtatgaaagagccgctggccgtagagatgatggattattattacgagctgggcggtcgttttttggatacggccgtaatttactgcgattggtttgaaggggagcgctcttcatcgcagaacatcatcggacgttggatgcaggccaggaaaaaccggaaggaattggtgctgtccgtaaagggttgtaatggcaagatcatcacgcccaccaacgacttggccacggcaccgcgcacagatactcggctgcatcgggaggacatcatcgaggacattgaggtttcgatgaaaaatctgcgtaccgattatctggatatttttacgctgcatcatgacaatgaatcagtggaaattgcagagatattggaaactttgcaggagcagaaaaagcgcggcgtgattcgtgcatacggatgcagcaactggaaggtagagcggcagcgggaagcctatgattatgccaaggcgcacggcttggatgggtttatggtggatcagatcaactggagcctcaacgtctttgcccccggctccaagggcgctgcatcctctactgtaatggggccagaggcttatcgctttcatcaggaaacgggcattccggccatggcatatggcgccaatggacgagggtatctgcattgcctagccaacggtctgcctgtacgcgagcaggatcataaggaatacgactgcccgcagaatgaaaagatactggcagtgctaaagcaggcggcacaagacctaggtgtggaggtaaacacgttggcgcttggttatctgatgcaggggcatggattccaggtcattcccattgtggggattaaatcgaaaaaggaaatggaaattgcggcggcagcagcggattgtcatctgccgcaggaagttttggatcagctcagtcaattgcgtggcttgaatggctagaaaaccgttgttttataaaaggtgagggcgtatactgagagcaaaacaaccggctgtataaatcggaaaaggaggcattcttatgtgcgatactctaggggcgattgggaaaaaatcggtggtctttgggaaaaacagcgatcgagacccaaaggaaccacaggtaacggaatggcgtcccgcgcaagctcatagcgaaaagaaagttaaatgcacctatatagaggtggatcaggcaacatacacccatggcacgctgctcagccgtccctcctggctttggggtggagagatcggcatgaacgaccagggcgtgatcatcggcaacgaggctctgttttccacaaacgaaggaaaccagaaggaagcactgatcgggatggatctgctgcgccttggtttggaacgtggagattccgccaaagcagccatggatgtgattctggaaatgctggagcaatacgggcagggcggcaattgtggatacctgagcccgctgtattacgacaatgcctttttgattatggaccgcaaagagctgtacgtgctggaaacagtgggtaagcagtgggcttataaaaagatggataaagcggcaatttccaactgcttttccatcaaagacgatgcggatgcctacagcggagcgcggtgcgatttcagccagtgggcgtcgccattggaacccgaacacggcggctttgaacgccgttgcttaagccaaagagccttggcaggcggcgaggggatcgatgtggtgttccgtgccctgcgttcccatgaggatggttttaacctgcctattatggaaaagaacagcagaaacgtatgcttgcatgccgcgtcggacggtggatcgcagtccacggcaagctgggcggccgattttcagcaagaccgcgttttgttgtatgtaacgggcggagccatgccgtgcgtatccctgtataagccgtatgtgtttgacagcgcagccatcgaacaggatgcatattccctgtttgatcaggcgtcttgggaggaacatgatgccaaggtgacggcgttggcccagcaacagccgccggcagagttttatgcagagcgcgatgcgttggagcaggcgtggagaaaacaggctcagacactgtccggtagggacaatgcggaatttctgcaggcatgtttggaagaggaaaaacagttttatcaaaagtgggtgcgttaatccggagattgtgaggacctgccatgtatggcaggtcctcttggcggtaggcacaataggagggccagtcgtttggagcttcgtgtacttagatattttttggcagtggcacgggaagaaaatatcacccgtgcggccaaggccttacatatcacccagccaacactatcccgtcaactggcgcagctggaacaggaactggggcagacactgttttgtagggaggcaggcaggccgtttttaacgcgggcgggcagattgttgaagcgaagggcgcaggaactcttgtctttggcggacaaggccgaggaagagataagggcgcaggcaaatctggtgacgggaaccatttccatcggtagcgcagagtccgcttctgcgcgcatatggcctcgtttgcttcgggcattttccaaggcatatccacaggtgcagtatgaattgtatactggcaatgccgatcatatcaaagagcgcatcgatcaaggcttgctggattttggcttgctggtagagccagtagaaattgctaaataccactctctatccctaggacaaacggaacaatggggcgtgctgatgcgttcggatgcgccgctagcggagagggaatttgtgacggcagaggagctgtgttcgcttccgcttctcaatgcacataggccggtggtgcaggatgaattggcagcctggtttgggaaagcaaaggattccgtgcatattttggccacctacaatttgataggcaatgcggcgctgatggtgcgggaaggacttggctatgcactgacaatagaaggggcggtggccctgtaccaaaatccagagctttgttttcgtccgctgttccctccgctggtggagcgcagcgtttttatctggaaaaaggagcagcccctcgggcgggcttcggctaagtttttggagatgctaaagagtatacaaaaaactggcatagaaaaaaattttgtgttagaataaaattcacaattgaatcaagtagcagacagcgtgtagtgaaaaacgtaaatccagttgtttttctgcatgctgtttttttattggagggatcaaaaatatgccaaaaacaaagggagaaaagctgtttttttccatcgtaatgtccgttgtaatggtatatggtatggaattgtacaatttggcagttcaggcaggcggtctgcaaaatgagctgtttggccgggtatttgcagatttgccgctgatgtgtttgtgctcgtgctggaggcttttgtggcaggcccgtttgcaaagaaaatgacgcttcgcttgctttcttcggaggaacggccaatttttataactctttgcattgcggtgctcacggtaagtctcatgtgcccaatgatgagcgcggtagcaacggtatggttcaagcatcccggtgtgcagtttcccgctgtgtggcttcagaccgttgcgcttaattttccgatggcctttttctggcagatgttttttgcagggcctgcggtacgggcgcttttccgtctatgttttgggcgcaaaattaaggggtaaaaacaaagccgttcggctcttgccgagcggctttttgtctgccgcgctgggtaggccttgcggctcctcttgtgcggatgcagcggctatgatacatttacttcactaaggatggaatcagtgagggagaagaacatgaaatttgtcatagagcatctgaaaaaacgctacgaaaaaaaggaggtgcttcaagacatagattttacctttgaaaccggcaaaatctacgggcttttgggcagaaacggcgcaggcaaaacaacgctgtttaattgcctgaatcgtgatatccgcgtggatgcgggttcgttttatctggaagaggagggcgtccgccgaaatgtagcggctgaggagatcggttatgtgctttccacgcctgccgtaccggagtttttaacggcacgagaatttctaaaatttttcctagagatcaacgaagatacgattgcgtctccgcaaagcattgacgactattttgatatgatgagcattataccggaggatagggataagctgttgaaagattattctcacggcatgaaaaacaaaatgcagatgctcgtcaatatcatcgcacaaccgaaactgctattgctcgacgagccgctgacttcgctggatgtcgtggtggcggaggagatgaaacagcttcttcgctccttaaagcagggaaggatcaccatcttttccacgcatcttatggatcttgcccttgatttgtgcgatgaaatcgtactcttgagccatggcatgctggagtcggtggaaaaaagcaacctggatggccatgactttaaggaaaagattatagcggccctgcgggaggaagaaaatgtataagacatggcgcatttcttttgccctaaaaaatacgtaccgggtcaatacaattctatatgcgttcaaacagatcccgttagtaaaaaggctgttgccggaaacgctgtatcgggtacggagcctcaagattttcgccaatatcctgtcgacgatctgggaattgctctcggtttttttagggaaatttttgtattttgtcaccatgataggcggcatagcctttctctatcaaaaagcggcgcccagttcggtatttttgcatatcctgttgctactttccgtgatcggcgcctttgccaacaccagcctgtttaacccaacgcgcgataaatactatgctatgatgctcatgaggatggatgcgcgaaactatacgctggtcaattatgcatatgctacgggaaaggtggtagtcggatttcttccgttcaccgtctggtttggcctaaaaagcagcgtgccgctgtggctttgtctatgtcttcccttttgcattgccgggatgaaggcgacggtaacggctgcttctttgcgcgcgtataaacgaaatggatgggtatacaacgaaaataggctgggtaaataccaatggatttgcatggcgctgttgttgggctttgcctatggcgggccggctttgggctgggcgattcctgtgccggtatcggccgccttgatgctgatctgtttgccggcgggccttatggctatgcgccaaatcgtttcctttgatgcgtatagggcggtaaaccagcagctgctaagccagttgatgacccagatggatagcccggcgcagatctcaaagcagatgagcgaaaagagcatttccgcagatacgacgctgaccagtggcaaaaaagggtttgaatacctcaatgagctgtttgtaaagcgccatcaaaaaattctgtggcggtctgccaagcgtatttcctttgcctgctgctttgctgtgctgggcctgctgcttgctttttactgtatgccccagatcaggctgcgggccaacgagctgctgctgacctttttaccttattttgtatttataatgtatgccatcaataggggaacgggctttaccaaagcgctgtttatgaattgcgatcacagccttttaacctattcgttttacaaacagccgaaatgcatccttcgtttgtttcgtatcaggctgcgcgagatcatcaagatcaatttgccgcctgcgctgattttgggtgtcgggctgtcggcttt

SEQ ID NO: 2147 - DNA, 12449 bp, Unknown
  16S sequences of unknown bacteria
gcccctgcgcggctaagccgcgcagtccggggtgcagggctttagccctgccagagggtgcggttcgcgtcgctgggcatacgccagtcgccgcgggggctgagactgacggagcctaccttgggaccgtcgggaacgcagttccgtttgaattgctgctggaagaaacggcgtaggaaggtctccaactggctgtcgatcttttcagcggcgtatacgccctcgaacgcctgaatcgccagcagacgcagcttttccggggaagcgccgctgtccatcatgtgatagaggaagaaatcgtgcagggcgtagtcgcccagaatgtcctcggtgcgctgattcagctcgccctcgctgacgggcagcagctccgggctgatcggcgtgtcaatgatgtcctggcagacgtccgttacctgcccgtcaaaggaatgcgtgctgatgtaccgcaccagacttttcaccagtgtcttgggcacggagcagtttacgttgtacatgctcatgtggtcgccgttgtaggtgcagaagcccaacgccgcttcgctcaggtcgccggtgcccagcacgatgccgcccactttgttggcatagtccatgaggatctgcgtgcgctcccgggcctgactgttttcgtaggtcacgtcgtggacgttctcgtcctgcccgatgtcggcaaaatgctgcttcaccgccgggccgatggcgatctcactggaactgacgcgcagacgctccatcagaatgtccgcattggacttggtgcgcgcgccggtgcccatgccgggcatggtaatggcgtgaatgccgctgcggtcaagccccagctcgtcataggccctcgcggccaccagcagcgccaacgtgctgtctaacccgccggaaacgcccaccaccagatgcttgcagtgaatggacgcaagacggctcatcaggccggtcatctgaatgtggacgatctcctccagccgtccatccgcgtccgtaccttggggcacaaagggcagcgggtccaaccggcggatgagcggcagcgccgcctccgccacaggcgtgtcgctcacaaaggcgggcctgcgctttccggccggcatctggtggaagctgccgttgcgctgccgctgatagcgaagccgctgcacgtcgatatccgcaatggccgtgccgccctcccgctggaagcgcagcccctcgctcaaggcacgtccgctttcgtaaacggcggtgtagccgtcaaagaccagatcactggtgctttcgccaaaacccgcgcccgcgtaggcgtagcccgcgtagagacggccggactgctgactcagcagctcacggcggtactggtgcttgctgaccagcgcgttagaggcgctggggttgacgatcacgtccgccccgtccaccgccagctggcagctgggcggaatgggcgtccacaaatcctcgcaaatctccacgccaaaggtgaatccgcccagatcaaagagctgatcgggccgaagcagggcggaacagacttctccgccgggcagggtgcaggaaagcgtttcgtccgcctccgcaccgctgacgacccagcgggtctcgtaaaattcattgccgttgggcagataggtcttgggcacaaagccgatgggccgtccgccatagagcacggcagcgcagttgtacaggcggctgcgcacgttcaccggcagaccgatgaccacagccatggaaccgtccgtttttttcgcaatgcgcagcatactctcccagctggccgtctgcaccagcggctgcagcagcaggtcgcccagcgtgtagcccgtcaggcacagttcgggaaagacggccagctgcacgccctgacggcgcagcggctccatggcgctgagaatttcctgttcgttggccgcaacgtcccccagatgaacgggcagactgacggcggcgacgcgggcaaagcctttgggcatgttgatctctccttttgcttacagcacgttgataagcatggttccctgctcgtccagctccacggtgagcaggccgtccttttccaatgccttgagcatatcgctgaagcgcttgaagcccagcgcccgctcggaaaaatcgggataggtggcctgcaggtcggccttgaggatgctgggattgatgcgatcgaagccgtcctccttgtagcggtgaagctgctcctgaataacggcgcgccagttttccttactcagctggggcgcggcctccttgctgctgggcgcggccgcagacaccatcacgttgaaattatcgctgcggatgcgcaaactgccaaactgcttgctgagcttgtccagcaccttgaggaaggtggcgcagccgtaggccttttcgttgaaatcaggccgcagacgcagcaggatgcccttcagttcgctggcgtacagctcgtccttgtcggtctgctcttccaggatgctgcacagaagtttgttgagttcggcctcgtccagcggctccttgtcgtcggcagcagcctttttcttgcccgtttccttgcggatgcgggggccgacgttctccaaaaactgaaattcgttgcaggcgttgatgaagatggtgctggcggcctcgctgcggctgatgcccagcacaaacttgcccatgctcttgagccggcccaccagcggcgtatagtcgctgtcgccggacacgatgcagaagctgtcgatcaacggattggtgaaagccacttccagcgcgtcgatcaccagcagaatatctgcgttattcttctggctgatgccgtagcgcagactgggcaccaccgtgaaggtattggaaagaagcacttccttcaggtcgctgtagcgatcggtgtagccgtacaccttgcccagcagaatatcgccgcgaatcttcaccttttccaatacattcagcaaggtggaaaccttcgcgccgcagttttccaagtccacaaacagggcgaattttgaagcgctgataacgctcacgctcctttctgaaaatgaatatcattcagccgcccagccgttgcagaaaccggctgggcggaaagatccgaagggttagattcggaaggtatatttgtcgccgcggatccattggcggctcaggtgcagcggctcgccgtgctgattgagcaccagctcgtccagcaccagcagcgcatcgcccacctcggtgtgcagatgcttgctcacaaagggcgtggcatgacccatggaaatatcatggatggcggaagaaggaatcacgccgtgagcgcgcaaaaactcatacaaagagccctccaccggctcgtccgccagaaaagcgtattcttcgggaaagcggttgacctccagcatgaccgggtcgccgtcgcacaggcgcagacggcaaagctccagcacccgtccgtcgggagcgacgcccagcttttcgcagtcctctgccgtcggttcctcccactgacaggaaatgggccgtgcttccgcatgatgcccccgggcctcgcaggaatcggtaaagctggtgatcatgctcagatcccggcgaatcttttcctcggccacaaaggtgcccttaccctgacggcgcaccagcagcccctcctgcaccagatccagcatggccttgcgcacggtgacgcggctgacgccataggtgtcgcaaagcacctgctcactggggatgcgtcccccggcaggataaacgcccgccacgatatcatttttcaaacgagtcataagctgctgatacagcgggctctggctctttttttccaaaaactgttcctgcaccagactttcctcctattcaatccccagggtcgccagaatcccggtttcatcgcagaaacgcagaatatcattcagaacgccggacggcatttccgccagtacgggcgcagcggtaaacgccagcggcagggcgaaatcccgcttgtattcttccagatagttgtcgttcaggtggaagaagtcgttctgattatcgtaggttcgatccaccagcgcgctttcgtccttcatttccacatcggcgctgtacagaagcgtgaaggcgggcttctccgtttcgggatgcagccagtccacgccgaaggtcacatggaagggcggctgggcggcggagcgtgtcagccggaactggaaagcataggcagtctcctccaccgcactgccggaaacggcaaagttcagcttgccgaccgcctgcgtgtccgtctcgcccggaagaccgtcggcgttcagcgtcaggtcgatcaggttttcctcctcaacggaaactgtcagccgtgcattcacgtccgtgccgccgttcgcgccgggggtctggtcgtattccagcgccagctcctcgtcgttttccgtgggcagggacagttggaaggacaggccgttttctccccgggtgcgggtgaacaggacatgcccgcccacctcgtagcggtcggtatcgccctgcgccgtgatggtcattccctcctgttcgggatctagccagtccagataatcttccagatagcttaatccgtcgtagacctgatcggccatgcccagatcgatcagcaacgccagcaggaagaagtaggactgctccgccttcacgtccgtcatgaccgtgtccagctcctgacacatctggtacagatcgtcgtaggagaccgtccgatttccctcgccatgcaggtaaggagtcagcacgtcctcatagcattccgccagataagccgtcacttcggggtaggtcagcagggcaatatactgggtgggcagctcgtagtattcataaggcttgagcataaattccagatagttgttcatctggaaatgaatgcttcgattgcacagcgcggggctgcgcacgtagcggaagccccagtaatcctcaaaggaaaactgtgtcagctcccggtcgttcaaaaggagctgcgcttccatatacatacggttgttgggccgggggaagcgctgcagatcgatcacgccggacagccgaagcttgctgagaaaggtttcccagccccgataatccgtcaggccgtcggccgggaaagcgcccgcatggagctggacgctcaggtcaaaatcggcgcgggtaacggcgctggaatccacgggccattcttcggcgagagaggccgcctcgcccagcgccgctgcgggcaaaaggcacagggccagcagcagggcgagggcacggcggacagcttgacggaacatgcggttccctcctttgcgttcacgatcgggtaagggcattactgtttggcgcggtaggcggcacgggcccgctgctcgtggttcagctcccgcttgcgcatccgcaggctcttgggggtgatctccagcagctcgtcgtcgtcgataaactccagacactcttccagcgtcagcggatgaacgctgatcagacgcaggctttcttcactggcggacgcgttgcgcatgttggtgacgtgcttctgcttgcacacgttgaccaccagatcatccgggcgggcgttctgaccgcagatcatgcccttgtacaccggggtctggggcccgataaacagcgtgccgcgctcctgcgtattgaacagaccgtagctggtgctctcgccgtcctcaaagcagaccagcgcgccgaaagcacggtgcggaatatcgcccttgacgggctcgtacttttcaaatacggagctcatgatgccctcgccgcgggtatcggtcatgaactcgctgcggtagccgaacaggccgcgggaaggaaccagaaactcaagacgcacccggttcacgccgtgcatactttccagcgtgccgcggcggcggccgatcttctcaatgaccgcgcccgcataggcctgaggcacgtcggccaccatgcgttcgatgggttcgcacttcttgccgtcgatctccttatacagcacctggggcttggacacctggaactcatagccctgacggcgcatgttctcgatcaggatgctcagatgcagctcgccgcggccgcgcacctcaaaggcgtcggggctggcggtctcgttcacccgcagactcacgtcggtctgcagctccttgaacagtcgtgcgcgcaggtgacggctggtgacgtattcgccttcccggcccgcgaaggggctgttgttgacggagaaggtcatggtcacggtgggctcggtgatggagacgaagggcagggcttccacatgttcgggatcgcagaccgtatcgccgatggagatatcctccagaccgctcatggccacgatgtcgcccatggaggcgctctccgcaggcagacgcttcaggccgtcgaaggtatacaggctggtcaggcgcaggggctggctgacaatgccggtatccttgttggttttgaccaccatcatgccggttttcagcgtaccccggttgatgcggccgatgccgatgcggcccacgtattcgttgtagtcgatggtggaaatcagcacctgcgcagggccttccatgtcgccctccggcgctgggatgtattccagaatggtctcgaacagcggccgcagatcgggagagggcttgtccagatccagtgtggccgtgccggtgcgggcagaggcgtacacgatgggccgatccagcgcggtctcatccgcgcccaactcgatgaacagatccagcacctcgtccaccacttcctcgcagcgggcgtcgggccggtcgatcttgttgatgaccacgatgacgggcagcttcaggctcaaagccttgcgcagcacgaaacgggtctggggcatggggccttcaaagctgtccaccagcagaagcacaccgtccaccattttcagcacgcgctccacctcgccgccgaaatcggcgtggccgggcgtgtcaacgatattgatcttggtcttcttataatgaacggcggtattcttcgccagaatggtgataccgcgctcccgctcgatgtcgttggagtccatcacgcgctccgccacctgctggttctcgcggaacacgccgccctgcttgagcatttcgtccaccagcgtggtcttgccgtggtcaacgtgcgcgataatggcaatgttgcgaatatcttcccgaaccataaaaatctccttctttcctaaaacaaacgtcagggatgggcaggggctccgcccctgcaccccggcaggaggcagtgcctcctgcacctccggcttgaccgtacttcgcacggccaaaaaagtaaaaatcaagttaggttagacaacgttcttttttcctgccgcaaaatctcttgctaagcggcaagattgtcagccaaccggctttttatcattcctacccgccagccgcgaggcctgtcgccgagcggcggcctttctcagccaaccagcatttcgcctgccagacccgcgagccgtggcacccgtcgtgccacggcggtaaaaccccggccagcttgcatgtctccctacgcccctgcgcggcaaagccgcgcagtccggggtcaaggggcactgccccttgcgcgcagtccggggtgcagggctttagccctgctgcctgctggcggtttcggccagttcaagaccttcgttgttctcctgcgccagacggatggaccattcgttctcgaaaagaagaacgtcccggccctcgctgtcgtaggcgcggcccgaggtagaggtcagcttcaggtcttccaccggctttggcgttttcaccacccagcgcacatagcggaagggcagacgatccatcaacatggtcacgccgtactccgtcttgaggcggtgctccaatacttcaaactgcagaacgccgaccacgcccaccaaaaattcctcccggcccgtttccgtgcggcggaaggtctgaatggcgccctcctcggccagctggtaaatgcccttctggaactgcttgcgcttcatgctgtcctccggccgtacccgggcgaaatgctcgggcgcaaagaccggaatggaggcaaaatgcagcttcggcccggtggaaagactgtcacccaaccggaagcatccggggtcgaacagaccgatgatgtcgcccgcataggccttttcgacggattcgcgctcgtcggccatgaactgctggggctgcttgagctgcatgggcttgtccgtgccggaatgatagaccgtcatccccttttcgaactcgccgctcacaatgcgcaggaacgccagccgatcccggtgggccgggttcatgttggcctgaatcttaaaaatgaagccgctgaagtagggcgcggtgggctccaccagaccgatatccgcctcccggggcaagggagggggcgtgatcgccaaaaacgcctccaaaaacggctccacgccgaaattcgtcactgccgagccgaaaaacagcggggtcagcttgccggacagcaccgctcccttgtcaaagggatcgcccgcctcgtccagaagctcgatctcgtcccgcagacggtcgcggtagtgcttctccagcgctttttcggcctcggggctgtccagcggaacggaaagctcgtccgccatgctcatgccgtgattgccgccggaatacagcagcacatggccggtattgcgctggtaaacgccctgaaaatctccgtccacgccgatgggccagttcatggggcaggaacggatgcccagcacgttttccagttcctccatcagggcgaagggatccttcgaggcccggtccatcttgttgacaaaggtgaagatgggaatattccgcatccggcagaccttgaacagcttgatggtctgttcctccacgcccttggctgcgtcgatcagcatgaccgccgcgtcggcggcgaccagcacgcggtaggtgtcctcactgaaatcctgatggccgggggtgtccagaatgttgatgcggaagccgtcgtattcaaactgcatggcgctggatgtcacgctgatgccgcgctgcttttcgatgtccatccagtcgctggtggcgtggcgctcggccttgcgcgccttcacgctgccggcctgacggatcgccccgccgtagagcagcagcttttcggtcagggtggttttacctgcgtccgggtggctgataatggcgaaggtgcgccgtttcaagatctgctccattgcttcgggagccagtgtttcgggactcatgaaggcttgttccctctcttccttgcctgaatagggtaagtcataatacaatgtactattttactatgagcttccggcactgtcaagcaaacatgttgcaaaaaacctcaagcgccgcaaggttttgctttcatgacagatcaggcggagcaatggcggaaagtgacatgtttttacctttccccaacgcgattttccgccttgcccgattgattttcgccgtccgccatgctaaaatacaaatggtgatcttgaaactgcgctgccgaaaggcagtttttcaaaaaagtgcagttagttaaaactaatttcgtactatttccagttcacgaaggaggaagcaaaatgccgtttttcgacaacacccgcaaacccacgggtttcggcgggaaggtcatggtcgccgccatgaatctgggccatcgggcgctggcggactgggggctttcctttgggccggcggccttccaaaaggcgctggactgcggatgcggcggcggggccaatctgaaaaagctgctaaaatgctgccccggctgccatgtcaccggagcggactattccgccgtcagcgtggaaaaatcccaaaaggtgaaccgccgtgccatcgaagagggccgctgtcaggtggtgcatgccagtgtggcgacgctgccctttccggcggaggtcttcgatctggtcacggcctttgagaccgtctacttttggcccgacctgctcgcctgtttccgggaaatttggcggctgttaacgcccggcggcacgttcctgatctgcaacgaatgcggcggcaacgatcagggggagcaatgggaaaaacggatcggcggcatgaaaatttatcgggccgggcagctgaaagccctgctggaagaaagcgggtttcgtcagctccaaattcatcaaaacgccagaggatggctttgcatcacagcacagaagtgagggaagatcatgtccaaacaggcaacggaatttcagaaaaaagaaatgagcaagatgtaccgcggcaaggagatcttcaagcccctgaacaccggctgggtagacgagcacgtcgcctgcgtgcgggagtgggtggcgaatatcttcttttaccgcaagggcgacgccacgttgatgatcgacgcgggctataactacgaccgtctggaagaaaaaatgggctggctgggcatcgaccccggcagcatccgccatattctcatcacccatcaggacaccgaccacgtgggcgtggtggaggccgacagccccgggcttttccgaaacgccacgctgtatgtcggcgagaccgaaaaccgctacctgaccggcgaagttcgccgtaaggtgatctatcatctctataaactgccgcaggtgaccatccccaacgaaaaagtgctgctccgggacaggcagatctttgagctggacagcattcaggtcgaatgctttctggtgcccggccacacctggggacacatggtgtatctgatcgatgggaagtaccttttcaccggcgataccctgtggttcggggcggacggcggctacagcttcatttcggcgctggcggaagacaaccgtctggccgtccgttcactggcggtgctggaagcgaagttgatggaacgggggctgaagcccattttcctcaccggccataccggctggacggacaattttgactttgcgtttgcccataaggacaagctgtgctctccctttaaaaaacgcgtccatgaccccaatgccccctacgacgcttacgacgagtcggacgacaccgaggaaaaggcccgcagcggttttctgccaggtgttggccggtaaatctgaaaaggagaacctgaatccatgaaggacaacgagctggtttttgaccgcagctgccacgttctctacaccaaacgctgcaaaaagggaattctggaaaaaattgcccggcattacgcccccgaagaacgggaggccgtctgggagcgggtgcagcggcagtacgtggactttctctctgactggcgcaccgatctgggcggcagcaaaaacttccataacggtgcgggcggtacttacgactgcatcgccctgatggcctactacgtcatctgcgaatccgcgaccgatctggcggagatcgaagaaatggaggccaatttgtttctgccggccttccgaaagatgaagttcgtggactgcaacaagccgattttccagaaattgatgtaccgtgcttttcagaacgccaaaaagcagtgcgacaaatggggcgattatcagatgaacctggctccctttgagccgggcaagcccatctattatgagtttacccactgtcccactgcggaatttgcgcaaaaacacgggctctcggaggtcatgcccgccctgtgcaacccggattttgttggcatggagctgattcacgcccggctggtgcgcaaaaccacctgtgccaacggctgccggtgcgactacaccatctgcggcgaccgggatccctatttgaaagaccaccccgaataccgggatgaagcaggctacaggaggaaccgatgaaatatccgattcagaaaaacaccgttcaggaaacgctggtcattccgctctacggacggaaaatgtgttcagaaaaatatccggggcttttccgggatgaaaatgcccttcgcctgatggagcagatcgactatgacttttcggagctggagaagaattcccggagcgtcatgcatcagtttggctttctggaagcggccatgcggcagaacgatctggcatgggaggtgcgggactatctgaaaacccaccccaacgcagcggtagtcaatctgggctgcgggctggacgctacgggccgcgcctgtgacaacggctcctgcaggctctacaatctggactttcccgacgtgatcgccgtgcggaaccagctgcttcccgccggggagcgggaggaaaacatcgcctgtgacctgaacgacctttcgtggtttgaccgcattgacgctgccggcggcgcggtcttcttcgctgctggtgtgttctattattttctgaacgagcaggttcgggcgctgttcacggccatggcggacgcgttccccggcggcaggctggtgtttgacgcagcgggaaagaaggccgttcggctgatgctgaaaacgtggatcaaaagcgccaacattcaggacgtgggcgcctatttctccgtctcggacgcgaaggcagagctttcccggtggtcagctcggcttgccgtttccagccggggctacatgctgggctatcacgacctgaaagacccgtccgtcagcggtttcttccgctttttagcccgcttgggcgacggcatgatgaaaatgca

SEQ ID NO: 2148 - DNA, 17362 bp, Unknown
  16S sequences of unknown bacteria
cttttaaaaatttacggggcgaatatcggcaaaatcaaggcttgtttagaggacggaaaaagatttgatattttgcaaaatgccctggccgtttttgaccgggcaaaaaaaggcgacggctacgcagtgagcaaaatctgctacgggtatgttaaaaacaaggacggttttaaattgttgcttggtgatttaatcgacctgtgccggcaaaatttgtcggaaaaaatcgcaaaaatcataaaagtttgcgaagattacacggatttactgaacacaaatgtaaatatgaatttatgtgtggaaaatttttccgttgatgcggcaaaataaggttttaccgccgtattttaccgattggcgcaaacttgaaattttttaaaaaataatataaaatcaatatgtaaatcatttttatgaaaggacagtgtttaaacactttaaatatatggtaaaagttgtaagcgtccgttttaaagaaaacggtaaagtttatttttttgaccctgcggggcttgatattcaaaggggcagttatgttattgttgacaccgcccgtggccttgaatgcggttatgcggttcagggcagccacgatgagagcagtgaaaaaatcgtaaaacccttaaaggcggttgagagggtggcaacaaaacaggacatcgaaaagatgaagcaaaaccgccttgacgagaaaaaagcctttgacatctgccttgaaaaaatagaaaaacacaagctggaaatgaagcttatagatgtggaatacacctttgaccgaagcaaggttctgttctactttacggctgacggcagggtggatttccgtgagcttgtaaaagaacttgcaagtattttcagaacaagaatagagttgcgccaaataggcgtaagggacgagagcaaattgatgggcggcgtaggcgtctgcgggcagcctttttgctgttcaaggtttttgtcggactttacaccggttagcataaaaatggcaaaggaacaggggttgtcccttaaccctacaaagataagcggctgttgcggcaggcttatgtgctgtttgagctacgagcaaaatgtgtatgaacaccttaacaaattgaccccaagcataggctcttatgtaaaaacagccgacggcaacggaattgttgttgaggtaagccttttggcaagcaaacttaaagtttctcttgacaaaaaccgtgacggcgcaccgaaagaataccttgtaaaagatgtatctttaatacgtgccggcggcaaacaaagccgggataaaaaaattgacaaagagttaaaagcattggaagattgattttaaataagccgtgtatcaaaactctaactaatgtcaaaaatgtcaaaagtgaaaaaaacacttgcggaattttacttgatgttgtaatataaatgtagagcggtatgctttaatacaggtgttacacctgtgtgaaatggctaaaataagacggaggtaaatattatggcttacaaaatttcagatgcttgcattaaatgcggcgcttgcgcaagcgaatgccctgttggcgcaatttcagaaggcgatgcaacttatgtaatcgatgcagatgcttgcatcagctgcggttcatgcgaaggcgtttgccctgttggcgcaccaagcgaagaataattttatttatcaaagaaaactgcgggaaaccgcagttttctttttatatataaaatcatagattatatggcatttattttcttgatattttattgacttatgtcctttgagggaatacaatagtatttaaaatacgaatttcggcactgccgaagagatgaggaaaagtatggatatttcacaaattatcacccaaatggtagttttgtttttgatgatgggaacgggctatcggtgtggcaaattaaacattattgacagcgatttttccaaaaagctgacaaatcttattttgacaatcacaacgccggcaatgattattgcctcggttgccggggacatcggcatagaaaaatctgttgccatacagataataggcataagtctgctgctttttgccatatttattccacggggatttttggttgcaaaattgctccgtgtgccgaaagaagattttaaactttacctgtttatggccgttttttcaaacaccggctttatgggttacccggttgtaagaaccattttcggtgattatgcggtgttccttacaagcatttacaatatggtacaggcggtatttttgtacagcttgggtatttggcttatggataattcaggcgacggcaagtttaacatcaaaaacataataaacccgaatatgattgcctcgattttggcattgattatcttccttggtgatattcccatgcccacggttattgcaaaaacctgcgattccataggttctatcacatcgccggcagcaatgctgcttatcggcgcagggctttcggtaatgccggtaaaagagatatttacggaattcaggctttatccttttgcggctgtaaaacaaatcattttgccttttgcaatgtttatgctgttcggtttgtttgtaaaggatgccacgcttttaggtattgtaacggtaatcgccgcaatgccggtggcaagcgtttcggtaatgtttgccaaccagtacggcggaaacgccaacatggcctccaagggcgtgtttattacaacaatgtgttcatttataactattccgattttgtgtatgtttcttgcaaaacggttttgattttacataataattttaaagctgcaaacttcggtttgcggctttttgttttataacgcagaaaaaggagccgcaagggctccttttaaataatctgttacaatttaagcaaaggtcgaaaggccgttaaatattgccggaaataacaatggtacttgtgccgggtgtaaccgaccaaacgcctgttgttgcgttttgggtgtatgttgcggcaggcactgtgatattgcctgcaatgcttgaaaatacgcctgttgtgccatcgtaggtgtaatcggttgtaacagcccatggggcaccgttaaatgttacggctatgttgctaagcacagggttaaatgtatcggttacaataacattgtccgtccgggttatggcagttgcgccacggttcataatcgtaaatgtataggtcagacggccgtcttctgccaccggcacagggtcaacggatttggaaatcgagagatccggccgggtatttgggctaattgtctcctctgcggttataggcgctgtgagaccgccgccggatattgtaaccgtatttgtaacccgaccctgagggccaaggggcgcatactcgttaagctgagcctggtaaactatcacggcgttgccgtttgccggtattgataatccgctaagttccagcggcgatgtacctgctattgccggcaatggctgaattgcgccgtttacatagtaaattaagctgttcggtacatatgtcagcggatacaaagttcttgcgccaaattcgtatgcccctaaattgtccgaaaaagccagccccgttgcggcggtgccgccgtttacgatatttacggcatatgtgattttatcgccgcttatatagcttttaaccgccgccgttttgcctacggaaaggctttcggttatttcgcctacggctatgtttgaaaggtaggttgtgtcgttatatatcaaccgtgcctggttagtaaattgtgccataattttctcccaaaaatttatttgcagaaacttacatctgcacttttattttatgttggcaaggcaaattttgtgcccttgaaaataagggttttaaaatatataatttaagcataaattacaatatcgagagaactttatgaacaggaatttaaaaaagacaataaccgcccttatacttttggcggttacggcgataaatatttttttggctaaaaatcaaccggataaattcttcgccacctatatacctttttcgagaaaagcggtaaatgccgccgcaaaaatcacatcttttgttcctttttccatttgggagattatctccgggtttttaatctgcctgggaatattttggcttgtttgcggtataagaaagaaaaatttacccggggctttatcgaatatctttctcaccgtaacggcactggtatttatttttataaatatttgggggcttaactactttgccccggcagaccccgccagatttggcctaaaaaaagaacagtacaccacggagcagctgcaaaaggccgccgaatactttttaacccaggcaaatgccttggcattacaggccaccgacagctatgatgaagaaagcatatcggcagaagaatttaacgccgccgcccggcaggcgaaagtgtgctatgaaaaacttcgacagaaaaacaaaaattttgacggagaatatataaaacccaaaatgcttacatcaagcggttattttgcaaaggaaggcactttgggcatatttatatgcgtaaccggggaaagctgtgtaagccgatatgtggcaaagctggatttaccctatgtaatttgccacgaaaccgcccacaaaaaggcatttgcaagagaaaacgaagcgaattttcgggcgttcttggcgtgtgtggaaagcgacgagccggggtttctctattccgcatactacaacgcctttgtgctgtgctttaatgcactggcgaaaaccgacccggaaaaggccatagccctgagagaaaaaataaacgataattttatggaggacatacgcaccgttgcccgacattatgaccgacttgaaaatcgggaaatcgttcggtcatcaggggagagatatgacgcctaccttaaatctttcggcgtacaagagggcaaacagtcttacggcatggcggtggatttgctggttatgtggtactatcagtgtaaaatatgtgaataatacacaaaaaagctataacatattctccgctttttgcactttggtctattgacaaaacgccctatatagactaaactggtattgttaagttaattcggcgtaaaaccgaaaaattattaagagaaaaaatcgaattttggctttaaaattcggaaggagagttttattatggaagagaataaggaaaagaaaagcggttcttttctgaacatcccggaattctggatgaaacagcgtaaagcatggcgtattacggtttaccgcacatcaatggagcgtttggcttacaagatgattttgccttacttgtcacttttcatcattcttttgggtgctacaaaaacacagtacggttatatcacatcagcgggccttatcgtaggcggcatcatgggtccttttgtgggtcagtcaatcgaccgcttcggtcctaaaaaggtttatctgatcggtatctacatactcataggcgggtatttggcattgtctgccgccaagatttggcaggttgccgctttgggcttgttcctccactcaatcggtggcggtatctcaggtcagtgttgcggtaacatctgcggtaactgtcttgaaaactgcgacagagcaaagggtatgcttatttgtgaatcccttgccgcaggtattttgggtatgatcggcccgatgatttcaggttgggttttggtttcacttatgcacgttgagggtgcacctacagaccctaaccaggttagacctttgttcattatctgtgttgtaattgccgttatctcattgtttatggttattttccacatggatttcgcaaacggcggtctttcacaccggaagaagaacaacattctcaaagacggtattgatattttgaaggcaaacaaaaactgccgcaagtggattattatcggtgctatcggcggtatgcctatgtcacttgttacaccttacctttcacttttcgcaaaagaggctaagggtgcagacgttgcaatcctttcacttatgacatctgccattgctttgacaagtgtcctttgcggttatcttttcggtatcatttcagacaaagtgggcagaaagccggtgctctttgttacaatcggcctctatcttgcaggtttggcaattttgattacaacaaacaatcctaagatgcttgttttggttggtatcctccggggcttccaggaaatcggcgctacactttcagcctcaatcggtcaggaaattatcacagataagctccgtggtcgtttcatgggtatttgccgtttgtcaactgccttcgtatctgctgttttggctgcgttctcaggtattatctgggataacatcggaccacagtgggtattccttatctatatgatttgcgagttgtttattcgtgttcctatgcttatttcaatgcctgaaacattgcactaccatgtaacagacgcagacttccggggtattgaataatatccattcgcagttgcttttgtaaacaaatatgtaaagtaatcgtgatttaaaaacgactttataaactgaaatatccgctcgataacttcgggcggatatttttatatggatatgtaattcaggacatataaataagtccgcccaaaggcggacttatttttaaatttaaacttaatccagttttaaaaccgcagtaaaagcttcgcttggaacttctaccgtgccaagctggcgcattttctttttgccctctttttgcttttcaagcaatttctttttacgggtaatatcgccgccgtagcacttggcaagaacatcttttctgtaggctttaacggtttcacgggcgataaccttaccgccgatagccgcctgaataggcacttcaaaaagctgtctcggaatgttatctttaagtttttccgccagttttctgcctctctcataggccttgtctgcgtggacgataagggaaagggcatccacaggctcgccgttaagcaaaatatccaatctgacaagttttgacggcataaattctttaaattcgtactcgtagctggcgtagcccttgctgcggctctttatggaatcgaaaaagtcgtacactatttcgcccaaaggcaaatcgtattgcaggtcaacacgggtttcgtcaaggtaggacatatttttaaatacccctcgtctttcctgacaaagctccataagattacccacaaattcctcaggtgtgtagatatgtgcctccacgaaaggttcttcgctgtttgcgatttttgacggatccgggtagtttgtagggttgtcaatcataacaacctctccgtcggtcatggtaaggcggtattcaacgcttggggcggtggtgataaggtcaaggtcaaattccctctcaagtctttcgatgatgatttccaaatgcaaaagacccaaaaatccgcagcggaaaccgaagcccaaggccacagaggtttccggctcaaaggtcagtgaggcgtcgttaagctgtaatttgtccaaggcgtcacgcaggtccccatagtgggcgccgtctgccgggtagataccgcagtaaaccataggtgttacctttttgtagccgggcaaagcctcatcggcggggttttccgccaaagttaccgtatcgcccactcttgtatcacgaacgcttttgatgctggcggtaatataacctacttcaccggcagagaggctctctgagggaacaagctccattgcgcccattctgcccacttcaacaacgtcaaattcggcgccggtttgcataagctttatgcgctgtccccgttttaactgcccctctttaacccttacatatacgataacccctctgtatgaatcatagtagctgtcgaatatcaaggcctttaacggtttgtttacatcccccttaggtgcgggtatgtcggttgctatgcgctccaaaacttcttcgatgcctataccggcctttgcgcttattctcggtgcgtcaaggcagggtatgcctataacatcctcaacttcgtgagccaccctgtccgggtcggcgcttggcaggtctattttgttaagcaccggtaaaatttcaaggttgtgttccacggcaaggtatgtgttggcaagagtttgcgcctccacaccctgtgaggcgtctattaccaaaattgccccctcgcaagccgcaaggctgcggctgacttcgtaaccgaagtccacatgacccggcgtatctatcaaattgtattcgtattcttccccgttttgggctttatatctgagagttacggctctggcttttattgttatgcctctctccctttcaatgtccatattgtccaaaagctgattttccatcaaacggcgttcaacggtgccggttttttccaaaaggcggtcggcaagtgtgcttttgccgtggtcaatatgagctataatgcaaaaattgcggatattttcctgtttcaaagaatattcccccgtaaatttaatagttttattttaacataatatcgtaaaaagttaaatagcttatttttatttatagataatcaacaaaaaattccacaaattttttacataaataactatgtaaattgatataaaaaattgtataatagttgtatggaaaataaaatatctaattttccgaaaaattattttcgggaagaaacggaggatacatttatgagatatgttattgttggcggcgttgccggcggacggggtgccgccgcaagactgcgcagacttgacgaagaagctgagatcataatgcttgaaaaaggcgagtttatctcctttgcaaactgcggcctgccctactatttaagcggcgttattgcagataaggaaaaattgcttgtgcagacaccacaaagttttacaggcagatttaatgttgatgttcgcattttttcagaagttgtttcagttgacggcgcaaacaaaaccgttcatgttaaaaatcacaaggatggcacagaatacgatttgtcatatgacgaattggttctctctcccggtgcggtgccggtagtgccgagaatggaaatcagcgaagatatgccgattttcacactgagaaatatcccggacacctatgcgataaaggactatcttgacaataatcacccaaagacagcctgtgttatcggcggcggatttatcggcgttgaagttgcggaaaaccttgttgaggccggcgttaaagttacgatagtagagggcacagaccacattatgcctaatatagacaaggatatgtcctacggtttgcacggccacgtgcgtgcaaagggcgtaacattggcaacatcaaagtttgctaagagaattacaagccggggcgttgaacttgcagacggcggttttgtgccatgtgatatggttgttatgtccataggcgttaaacctgccacagcatttttacagggcagcggcgttgagcttggccaaagaggcgaaattttggtggatgactatctccatacaaatgttgacggcatttgggcggtaggcgacgccataggcgttaagcattttgtaagcggccggcacacaattattcctcttgcctcaccggccaataaacaggcaagaatagttgccgacaacatcaagggcagaaagacaaagtacaacggcacacagggcacaagtattgcaaaggtatttgatatgacctgtgcatcaacgggactttccgaaaaggattgtatcgccttgggcatagattatcttaaaacattctctgccacaaacagccacgcaggttactaccctgaccctaagatgatgatggttaaacttgtgtttgaaaaggaaagcggcaaggttttaggcggccagattgtaggttacgacggagttgacaagcgcattgatgttttggcaacggccataagacggggtatgacggtttgcgatttacacgaacttgaacttgcttatgcaccgccattttccagcgcaaaagacccgattaacatggccggttatgtaggggaaaacgtatggcttggcgaagaaaagtttgttatgttcccggatgttttggcaatgggggacgatgttataaaacttgatgtaagaacccctatggaatttgaaagaggcagtgttccgggatttatcaacattcctctggataagttgagagaaagatataccgaacttgacaagtcaaagaaagtgtatattcactgccagtccggcttgcgtgcttatgttgcctgccgtattttggaaaatttgggttacgattgttacaacatcttcggttcctggatgtggtacacattgtggcaggcagaccttgcggcaacggcaaaagaaaacgagcttaccacaaactgtgcaagacccgaattaaattgattttattaaaagaaaattttgttgaaaagcggcgcaatgcgccgctttttcatttgccctgatcggtccatcggaggcccttttatcaatctgtttaacttatacaaatcggcggaggaaaaaatataaaatccctttgattttgataattgacaaattaaatgtgaaaaactataattttttattataaattaaacaaagattgcgccggttgagtatgggtagccaccctgcccgacagggcgctttcacttttagaaaacaaaggagtgatatgagaatgactaagtatatttttgtaacaggcggcgttgtttccggcttgggtaaaggcattacggccgcaagtcttggcaggcttttaaaacagagggggcttaaagttgcggcgcaaaaacttgacccatacataaatgttgacccgggcacaatgagcccataccagcacggtgaggtttttgtaacagaggacggtgcggaaaccgaccttgaccttggacactacgaaagatttattgacgaagacttaaataaattttcaaatcttaccacaggtaaagtttattggaatgttttgaacaaagagcgcagaggagaatatttgggacagaccgttcaggttattcctcatatcacaaacgaaataaaagattttatctacaatgtgggtaagagtaaaaaagccgatgtggttataaccgaaataggcggcaccgtaggcgatattgaaagtcagccgtttttagaggcaatccgccaggtaagacaggaagtaggcaaggacaacagcttgtttattcatgtttgccttgtgccttatatttccggcagcgaggaacttaaaacaaaaccggcacagcattccgtaaaagaattacagggcttgggaatagccccggatattatggttttacgcacagacaagccgttgtattccgcaatttatgacaaaatttctcttttctgcaatgtgaaaaaggattgtgtgtttgaaaatatgaccgttcctgttttatatcaggctcctattatgcttgaacagcagaatttttcctccgttgtatgccgtgagcttaaacttgactgcccggttccggatatgagcgagtggaacgcaatgcttgataagatttcccgccgtgacaaagatgtaaaaattgccattgtaggcaaatatgttcggctacatgacgcatacctgtcggttgttgaggctctgcaccacgcaggctacgaaaacggcgcatttatagatataaaatgggtggactccgaaacggtgacaaaagaaaatgttgccgaaattttgtccgactgtgacggggttatcgtccccggcggctttggaaacagaggtatagcaggtaaaatcatcaccgccgaatactgccgcgagaacaatctgccttatttgggcatctgtctcggtatgcaggttgcggttatagaatttgcaagaaatgttttgggcattgcccatgcagactccggggaatttgaccggaacagcgcaaacaaagttatcgactttttgccggatcaatccgacagcaccgacaagggcggcacattgcgccttggttcttacccctgcaaaacggcagacggctctctcttgcagaactgttacggcgaaaaacttattcacgaacgccaccgccaccgctacgaatttaacaacgattaccgtgggcaaatggaggccgcaggtatggtgttaagcggcacttcaccggatgactacatagtagaggccgttgaattgccgaagaacgatttcttcatcggcgttcaataccacccggaacttaaatcacgcccaaacaagccggcccccttatttgtcggtttggtaaagcggcggcttaacggcaaagaaaacaagcaaaagtaagtaacacataattttaaacaacaaaactgcaggcaggttgcccgcagttttggttttaaatacagccgattatttattttgtattaaccctgtaatacccttgattgtgaccgcaaacaggacagattgtaggggctttttcgccttcgtataaatgtccgcaggaagtgcagatccaaagagttttcacgggtctttggtaatattcccctttttccagcagatcggcatattcggaatatctctgttggtgctgtttttctattctgccaacggcctcaaataattttgcaatccggtcaaaaccctcttcttttgctgttttggccatatttggatacatattttccgcctcgttaagttcccctgcggcggcgcttttaagattgtccagggtgtggggaatatcgccgccgaggattattttaagccaaatttcccgatgttctctctcgttttcggcggtttcggtaaatatatcccctatagttttgtacccgtccttttccgccttggcggcgtaaaatgtatatttgtttcttgcccggctttctccggcaaatgccgccattaaattggcttcggttttacttcctttaagttccattttgttatattcctttcgtgtaatactgtttgtattatatgaaaatggggcaattttattcacatttcatcaagtgcgacggcaaggctgtcggcaaaaagctgtgcggcgtaaaccgcctgatccaacattgctccatgggtgcctacttccaccaaaatactgcctgttgtaagctgctgattgtaatttcgatagtcaaaaagaatacttctcataagccccgggtacaatttagaccgccggttttgtaccgccgttgcaaactttaaattttccttgtagttaggcatattcatacttccgttatccgcaccgcttataatcattatctgcgcccgttttttatcgtttatcgtcaccaccgggctgataatcgtaccttcacgctcggcggcgtcacggtgaacatctaaaaccacctttattgacggatatttttcaagataatattccgttgtggctttgcttttgtcgtaactgccgttgtaagaggggtaatcgtgcaatgtgtcgtcttgtattgtgttataccccagccgattaagcctttccgccatggccgcccctaccgccgtcatattttggcttttgtcggtactgcgaaaagagtagtttgggtcataaggggtatcccggcttggcaaataactttcggtggcgtgggtgtgcaggattaaaatttgcggctcttggctgtttttttcgcatttaaaacccacgggggaaagcattatatcctttacttctccccggggtaaatccgtaagatttttaacatagcaccgatcttttttcaagattatatcgctttcggcactggcgaaaaattcctctttcaccgaataattgggatttatcacagattgccgccgattattttcatcttcggtttgagatttgtccccggaagatgtgaaatccgacagggaaaagttccgaaacgggtttattcccgaggcggtttgtacggtttcatcaccggatattataaaatttacagcggaaacagggtgcataagggctatccgcagccccgcccaccgattgaatgtcatcataaaaatcaaagacggggccaaaaacaggccgattttgaaaaaatttttaaaaatccgcaaaaaaacaccacctcaaacaatattttccctttaaatgtatgattatgtgtgctataatatgccagttgtgagagtattttaaaaattagcttaaaaaatcaaaaaaaatacttgcattttagcaattaaaatgttattataatttatactgtcacagtaattgaagggggtgggatcatgccaaatattaaatctcagaaagacagagttaagcagaccaagaaggaaaacgctagcaataaagctgtgaagagtaacctcaaaacagttattaaaaaagcaaatattgctgtagctgctggttccgctgacgctgataaggctgtagtagaagctgtttcaacaatcgacaaggctgcttcaaagggcgttcttcacaagaacactgctgcaagaaaagtttcaaagatgatgaaaaaagctaacactgcaaaggcttaatagtttttaacaacgaataatgaccgctcgcaagagcggtttttgttttatatttctttttcgataaaaaattcacaatttaaaggctatttatatttaaaatcccttttaaaattttaccttatgtgctattattagacagataaaaaatcagagggagaaaagtatatgaataataattcttttgagcctattcgtgatgcccgggccttgggcaaaccgaaaatgcttattttgggcttacagcatatgtttgccatgtttggcgcaacaattcttgtgcctattcttgtagcgggctatttcagcaaagcctgcggtgaggaaataacacggggacttaccgtagcggtaagtttgttctgttccggtatgggtacgcttatattccacatctgttcaaagatgaaagttccggcttatttgggttcgtcttttgcctaccttggcggtttttataccgttgcaaacttaaaccggggtatttacgccgatatggcggtaaacgataaagttgcctatgcctgcggcggcgtggttatatccggccttttgtacttggttttggcggctattataaaagccgtaggcgtaaaccgtgttatgaaatttttgccgccggttgttaccggcccgatgataatttgcataggcctttcacttgcgccgtctgcgatttcaaacgcatcggaaaactgggttttggctcttattgcccttggtgttataattattttcaacatttggggtaagggaatgtttaaaattattcctatccttatgggcgttgtgattgcatatgctgttgcggcggctatgaccgttgccggcataacaaacccggacggaacggcgattataaattttgccgcaataagcaatgcggctgttttaggcgttccggaatttaaactttgcaaattcgacattacatcaattttggttatggcacctatcgcccttgccacaatgatggaacacataggggatatgtcggctatttccgccacggtaggggaaaactttatagccgacccgggcttgcaccgcacacttttaggtgacggtatagcaacatctttttcgggtcttatcggcggccctgcaaacacaacctacggggaaaatacaggtgttttggagctttcaaaggtttatgaccctaaggttataagacttgcggcggtttacgccattatactctcctttattcctaagttctccgctgttatttcaacaatgccaagttcgattatcggcggcatttcctttatgctttacggtatgatttccgccatcggcgttagaaatgttgttgaaaaccaggttgaccttacaaaatccagaaaccttataatcacaggggttatatttgtctgcggtttaggtttttcaaacggtataacatttacaataggcgaaacgcctatcacacttacggctcttgcaatagccgctttggcaggcataattttaaatgctgttttgccgggcaacgattacgaattcggcaaaaaccccgacggcgacaagagcagaggagtatatctttccacaaatgatgaaaaataatattttaaaggagatataaacatggatttttaccacgaaaagaacatcaccatctttaaccatccccttattcggcacaagatttcttctttgcgcaataaggaaacaggcacaaacgagttccgtaaacttgtaggtgaaattgcaactttggagggatttgaagctctttctgacctgcccacagagttgaaagaggttgaaacacctattgaaaagtgtatgacccctgttttacggggcaaaaaaccggccattgtgccgattttgcgtgccggtttgggcatggttgacggtttgcttacacttatacctgccgccaaggttggccacataggtatgtaccgcaacgaggaaacccatgagccggttgaatactattgcaaattgccaaggcctattgaggagagattgattattgtaaccgaccctatgcttgcaacaggcggttccgcttgcgatgcaatttctcagattaaaaagtacggcggcaagaacatcaaatttatgtgcattatcgcagcgccggaaggacttgaaagattgcacagagaacacccggatgttcagatttatgtaggggctttggacagagagcttaacgaaaacgcctatatttgcccgggtctcggcgacgccggcgacagaattttcggcacaaagtaattttttaaaaattaactaaaaatatttccgaacagtctttttacaaatcacactttgtgtggcaaaagggctgttgcggcaaattatagcaaaaaaagaggggcggcgcccctcttttttattatatttttttattatatttttttattatatttatagagataaatttaataagactttctctctttactgggcagaatttttgcgcccatgggcacaggctttgcgataaacgcactgcgaactttacccctgaaatattcataggctgattttgctttttcccgactgtcgaatattccgaaaaccgcccgtccgctgcctgtcataacactgcccaaggcaccgtgttttataagtgcctccttaatgggcagggtgtccgggcttgcggcggcctcttccaggtcgttgcccaaatagcgagccacggcgtaaatatctttatcctttaaagcctgaacaagtttttcggtttgtatatccgactttttgccgagtttatcataatttgcaaaagccacaggagtggaaacccctctttccggcatacagatcacaagccagcactccggcataggcggagcgtaggaaataatatcgccgacaccgcccacccttcttgtgccgcctacaatcataaaaggcacatcactgcccacctgtgaggcaagccgacacagttttgtaatgccgaaattggttttatacagcttatttaagccaaccaaaacagccgccgcatctgcgctgccgccggccattccggctttt

SEQ ID NO: 2149 - DNA, 16708 bp, Unknown
  16S sequences of unknown bacteria
atttcttcgccgggccacgccaacatgctccggtttttcccgtatagccggcggccgcgttggcgccttcctccctgcgaggccttatttcttcgccgggtcacgccaacacgtcccgcattttcccagcttctctttcttctactccgccagcacataggctttccggttctggcggccccagcggatgcactccgccgtgctgcgcatgtacaggtccacgatgtgcccctgcaccgcaccgccgcagtcgttggccaccgcaattccgtaaccctcgatgtacaggcgcgttccgtaaggaatcacggacggatccaccgcacaggtcccgtagtggactcgctggcccgtagagccgtgggcattggttcccgcatagtaggcggtggtgttggcggtaaaagtactttttacttttacttcccccttttccccggtttccgaggtgccgcaccgaagagtgtgatcttccggttttgcgatccatttcttcagctttgtctgagtgccggatttctttccattgatataggtggtggtgtaggtatagaggccctcgccgtcccggccgccggtttcctgcaccgtgcccgaagacaggcccggatccagcaccaccttatccccggattttactttttgggtgccttccgtcaccttccgatgcacctcgtccacggtaattttcgtgtccgcccgaaccggtgaatccagctccggagagatacggtcgtccttatcgtagcggatgtcgttcagcttcaggttctcccgaacggtaccggatttcagggtaaaatccttcatctttccgtgaatttccatttgggtgtgaatacactcctccacggtgattttcatcttattggatatgggatactcccggcagggatgcaccgtatcgatttccgacgcaccaatcttggcttccttcagcacggcccccaccgtggtctgccgcgtgagggcggtgacggttttcgtctttccgtccatccccgcataggaaacggtgacctgctccggtatcagccagctgatttcctgccacagcagaattcccagagtcagaagcagaatcacacccatggttcgggtgtgccgatcccgattgaaaatctgatacaggtttttccgttttttcttgccggctgccgtctcatttctcattttcttttctccgctcatcctcttttcgtctcgctcggtctagtttgccgagcttcctcggtgaatcaacttgctgcggtcgtccttccgaatttgctcccgaatctccttgtccagcggcatcggaatcaggtcctccgccggctcaaaagatttcttgaccaccgccttcgacgcctcctccaggccgttctccttcagaaatttccggaacgccgctttggcataggctgcatccttccgaaacaggtataggtgaaaggtattcggttccgtgaaacgcagcacctgccccatatcgccatagggaaccgccatcagcgcctctccttccgggtaaaaatagaatccgtggttcatgtcctccacgtccgcaattttccggaccgtcagagtcccccgggtctgcttcgggttcatctccattcgataatccagtacgtccatctactcacccttccgtcccttcagcagcggcttgatgcctttatagatctttcccgccatttcggtgccgtaaatcttcaccagggcattgttcaccgcttgcttcgtcttatgcacccgaagggtctccgcaattcggctcgcctcgccggaaaactccggaatcaagctcttcacatccccctgaaacacccgattctccttggctgcggcgtttttctttttttcgccccgcttctccttcttcttcagcttgctcttcttgtccttcccgctcttcgcctcttccggctgcggcagttcctccgggatttcggcggccgcctccggcgccctcttgagaatggtttttttcaccgccttgcgcaggtccggatgccgggacacgttcacattccgcttctgccagaaatccaccaccgcatcgaatccggtatccttgctgatgataacgaactgttccccgccgttcttggcgatctcataccccagccagctcaccagctgaaaatccagggcgttcttgccgccggtcttaatcggcatgtacgtcttccgaatccggctccgctccagctcctgatgcaccgtaatgctgatagtgctgtgctgctccgaatagaaaatcagcagctccgatccgtcatccagaagctccagcccctcaaacccattgctggccacgttttcaaaatcaattaaatacttcatttaaagtccctctttctatttcaatctttttgtcaatgataacaacacgatcggcgccccggcagcattttgccgaaggcccacactgtttcttccataaattattattatatctcaatttcccataaaagaaaagtttcttccaatcccgggtttccgctatccgattttcaaatagtccgtcctgttgaactccggctttaatgctgatatgatagcggtataatatttctacatatcgaaagtacgttatatatccagttatatataatgtatcgaataaatggaacacacgaggaacatctatgaatcatacagagaaacgttttcggaggaagaattcccgcattcttctcatcataattatcatgatactgctcctcctgggaggagtgctgctgattcgctatcaggcccaccgccagattggcggactcagccgcaaacccgtcatttccttgaagggggacaccaccctaaggctgtatcccggcgagaaattctcggaccccggtgtcacggcgaaggattatcggaagaaagacatttcctcccatattcagacggatttggatcaaagcagttttcgaaaggacggcactctgtggaaatcctataacggaacgatcacctacacgctgaaggattacggcaaccgggtgaagaagacccggaaggttcgcacggcataccgtaagccggaccaaagttctccaagctacggtcacggcatcgcggtctgcatgtttcacaacatctacgatgcgaacaatcccccggaagatctgaaccccaactacatgtccacggaagaactgtccgccatcctgcagtatctcatcgatgcggattattatttcccatcctggcaggagctgcgggattacattgacggaaagatcgatttgccggtgaaatccgtggtgctcacctttgacgactgcgcaaaggatttccagaagtacggaattccggtgctggaaaaatacgacatcaccgccaccagtttcgtcatctgcgccaagaacggcaaagaggtgcttcagaaatacggcgatgccaagcacatcaacttccagtcccactcctacaatatgcaccgtcccggcggaaccatcggccacggaggtgtttttaccgccctgtctcaggaagagggcgtagcggacctgaagaaatccatcgacatgctgggcagcggcgaggccttcgcctatcccttcggagattacacggacacctgtgaagcggcggtgaaggaagcgggtttcctctgtgcttttaccaccgaatacggaaaggtacacccgggagacgatccctacctgctgccgcgaattcgcgtgaacgggggatgtaccccggaggaattcgctcgggacatttccgacggccaagaaccaacagaacaacagactgaacgataaagaggatgccatgctgaacaatcgtaaaaacattattcgacatttgaacaaccatctccgggccaacggacacgtaatcggtgcgtcttccggatgcgggcataccgcgctggcttccgttaccggcgggtccgatatggtgctggccctcagcgccggatgcttccgggcgtctgggcgcccgtccttcggcagttacctgtgctacggaaacagcaatcgaatcgtcgaaagttttgcggcgcgtgagttgctcaccctgctcccatacaccccggtgctcttcgggctgaactgctcggatcccaccatcgaactccgtgactacatccaagaaattcagaattccggactttccggcatcgtcaacttcccgtcggtggcactgattgacggtatttttcgggaagcgctggaggaagaaggtctgggatttgacaatgaggtgaaagccatccgaattgcccatgaaatggattttttcaccttagcctttgtgtgcagcaaagagcaggcggaagccatgatcgatgcgggagcagacgtcatctgcgcccacctgggactcacgccgggaggcgccatgggtccgaaaaaagcccaatccatagagaaggcaaaactcctggcggacgaggtgttctccgcatgcctggagaaggcgccggaccggattcgcatggtctacgccggtccgattaagtcaccgatggacctccagtacttctacgagaacacggcggcgcagggttttatcggaggatcctctttcgaacgaattccttcggagcgagcgatcatctcctccactcgcgctttcaagtatcccatggacagtgcactggacgagaagcgggaggccgccatggagggaatggaatcttcccgaaactacatcgagttcgtacagcagcacattcgccagagctacgagcagcccattactctgcaggcgctctccacggtgctgcacgtttctaccccgtatctgagcaccctgttcaaaaagaaaatgggcatcagctttacggaatacctgattcgcttccgactcaacaaggcctgcgaactgctggaggtcagcgaactgccgattcaggaagtcgcccttcgggtggggtatccggattcggtccagttcagcaagattttcaagaagtataagggaatggcgccgcgaaactacaaaaccatgctgcggtcgaaacaacacgcgggagtcacgcaaaaacaaccataagtttttcttacaacaaaaatgttatataagcacaatttttagtaatcaaaacatattttttactttttcgttcgtgctagaatacaattaagaaaaggcggacaaggaggtatacaacattgaaaacagttgcagtactcggaacctttgataccaaaggcaaggagctcaagttcattaaagaatgcatcgaagagcacggtttgaaaaccctctgcatcaacaccggtgtattcgaacccgtggtagaaccggatatcagcagcgcggaggttgcggcggcagtcggtgccgacatcaacgccatcgtggagaagcgcgaccgggctaccgccacagaagttttagcaaaaggaacggagaaattgattcctcagctctatgcagagggcaaattcgacggcatcatttccatcggcggatccggcggaacctcactggccactccggcaatgcggcagcttccgctgggagttccgaaagtgatggtttccaccatggcgtccggtgacgtttccccttatgtgggaaccagtgacatcgtcatgattccatccgttgtggatgcggaaggtctgaatgacatttccaaagtaattttcagcaatgcagccaacgctgttgtgggcatggttcagaaccggaaggaaatcgaaagcgacggcaagccgcttctggcagctaccatgttcggcgtaaccacgccgtgcgtaaaggcagcagaagattaccttcatgaacagggatacgacgtattggtattccacgcaaccggtaccggcggcaagtgcatggaagcccttatcgaccagggattcatcaagggcgtgctggatctcaccaccaccgaatggtgcgacgaagtagtgggcggcgtgctcaacgcaggtccggaccgtctcaccgcagcgggcaagaacggcattccgcaggtggtttccgtgggtgcactggatatggtgaacttcggaccgatggatacggttccggcgcagttcaaggatcggaatctgtacaagcacaatccaacggttaccctgatgcgcaccactgccgatgagctgaagtccatcggccatgagattgcaacccgcttggcagatgccacgggcaaaaccacgctgatgcttccgctgaagggcgtgtccatgattgacgtggaaggccagccgttctacgatgcagaggcggataaggtgttgttcgatacgctccgcaccgagctggcagattccaacgtggaaatcgtagagctggatacggatatcaacgacaaagaattcgccgttgcagcagcaaagaaactcatttcccttctgtaagaagaatcggaaaaatcggacttatgaatctatttttatgacgaaaggggtacacaatgaatagacttacaagagaagaaaatatcgcaaaatttaaggaacagattgcaagcggcaaaatcctggtaggcgttggcgccggaaccggaatcaccgcaaagagcagtgaagccggcggtgcagacatcctgattatttacaactccggacgctacagaatggccggccgcggatctctggcaggcctgctgtcctacggcgatgccaaccagattgtggttgagatgggtgcggaggttctgccggtagtaaaggaaactccggttctcgccggcgtatgcggtaccgacccgttccgcgttatggacatttacctgcagcagctgaaggatcagggtttcagcggtgttcagaacttcccgaccgttggtctgattgacggcgtattccgtcagaatctggaagagaccggcatgggttacggcctggaagttgacatgatccgcaaagcccacgagctggatatgctcacctgcccatacgtattcgatgcagagcagtccgctgcaatggccgaagccggtgcggacatcatcgttgcccacatgggcctgacctccaagggaaccatcggggcaaagaccgttctgtccctggacgattgcattccaagaattaaggctattatcaaagcagcaagagacgtaaatccggatgttatggttatctgccacggcggcccgattgcagagccaaaggatgcgcagtacatcatcagcaacattccggaactggatggcttcttcggcgcttcctccatcgagagattcgctgcagaaagaggcattaaggctcagaccgaagatttcaaggcaatccagaagtaatcaagtcgccggtacattgacaacttgtgggattgacagcatagagaagggattgcggttttcgcagtccctttttctgtgatagaatataccataaaaaaacaatccggacggcaagggtgtccgggagaactccggagattacgaaaggatactctcatgaaaatgaacgtactggggaccggctttgcgctggctacaaaaaattacaatacctgctttgccctggaggaaaacggcagcctcttcctggtggacggcggcggcggaaatcagatcctccggcagctggaacaatccttcctggactggcgggatgttcacgacatcttcgtcacccaccagcatgtggaccattttatgggcatcatctggatgatgcggcgaatcggttacggaatggagctgaatgattatgaaggggaggtgcgcatctactcttcccggacggtgattgacaaaatcgacaaagtggcccacctgctgctccggccgcaggagctgtgccatatcggcagccgcatccacctcattccggtggaagggggcgaaaccgctcaggtgctgggccatcccatcaccttcttcgacatcggaaacccgaaaacgattcaatttggtttttccctggaatacgaaccgggaaagcgcctcacctgtctgggggacgaattctgccgcccggagggggaaaaatacgtggcaggcagtgtatggctccttcacgaggcattttgcctggaatccgacaatgacatcttccatcctcacaaaatcgcccactccacggtgaaggatgcctgtgagctggcggagcggtattccgtgccgaacctcatcctgtaccacacggaggagtcccacggggatcagcggcaaaagctgtatctggaggaaggacggaagtacttctccggaaacctgctggtgccggaggatttggatgtgatttcaattgactaaagtacattggattgccaaatttacaatgcgttcaaaaaatcaaaaatactaggtgcgattatgtttagtaaatttaatatgtttccaatcgtggaagggaaagaatccagagcaagcctccttggcaaggctgcaataataagcggtttcattttaacttttgtgatgcatatggtttataaagaagataaatcccatatactggcctttttaagtgaagtgtttgtggcgtatttcctattggattacctcttcttaagtcttggtaattgcatcaaatgtaataaatggttggggaaaaaagctagaattataacggtgtttttagctcttgttgcattaatttttacgttattactttgcatccttgaacaagtaacatttttcacgcttctgccatatagtgctattcttatgtacgcaattgtgggatatcgaaattataacaatgcaaaaaattagttcttcacttttttctcgggggttgtgccggcgagtcggaaaaatcatgagcatgttggcgtgccctgacggagctctaagggtttgcgggcatgcccacgccaacaagggtgccggcggatcggtaaaatcatgagcatgttggcgtgccctgacagagctctaagggtttgcgggcatgcccacgccaacaagggtgccggcgggtcgggaaaatcctgaacatgttggcgtgccccgacagagctctaaaggtttgcgggcatgcccacgccaacgtaatcatgtcaattattaagaaaagaatgtttgccttatgcaaaaggcaatccccgaggaaaaagtgaaaacccgaaaaaaagggattggacgccgcgtccaatcccttttttcatattacctcattatgcggaataccggttccggttctccatgccctgcaatgccggtgcggaatagctttccccgtctgtgaaacggctttcgccgaagctgaggaagtcccgaacagcaactaccttgtccgctagggagacgatgacgccctcccggcaagtaggaagctccgaagtcaccggccacatgtgggtccggataatctcttccgacttctcactcagatccggaagcagcttcttcgccacttccacagattccaccgggtgctcccgatagcattccttgttattatcaaatttctcgtcccggtccagaattcccagatcgtggcacagcgcccctttcaccaccgattcgctgtccgtatgtacgtgaatcttcttcagcagatagcaaatccaaacgctggctgccaccacgcgcatggtgtgcattcccaccgagcttctcaggtggtgccgctgattcattgcctgttcgaattccggagagtctacgatattctttccgtatttattcagataagatgtaacaacctttcctgccatagtgctcctttctgactcttgaccattaccgtccttatactatatctgaattctggtgttccggtggcacatttatgtggttttcttgaagtccacggcctcctcaaaacacccaacataataattttaccattaagagcagcggaaaggcaatgctttttatgagcgaagcacaacaaaaaattgaatttcttgtcgcgacagattatttttattaaaagaagtttcgatggattttaggcaattccgggtcctccgtctcgccgctacacgatggggctcggcaattcctccggctcctccgccccttcttttatggtatacatcgtcagccggtcgccttccatcagtgtcacattgcctttgggcacgatgccccggccatggcgctttaggagaacgatgaaactgcggcgggaaatgtccagagaccgaatccgctctcccacccacgggtggctgcggtgcagcacgatttccttcaattccatgttctcgttgctgcgaggggattcgccgctgagaatcagccggtcgccggcccggagccgtacgtcaccgtggggcattttcgtctccgtcccccgcaggattaccgcaatcatcaggccggacggaagcgccgtctctcgaaccagccgcccgcaccactcatccttcggcttcagcatcacctgaacgaaatgaatgtcagcctccagcccgtactcgctgagcttctgaatccgctgatattgctccacaaaaccggcggaaatgatacccgttggaatagccaccatgcccacgcccaggaaagcgatgaggatgccgaaggttttgcccaacgtggtgatggggtagatgtcgccgtaaccaatggtgagcaaggtggaagcggaccaccagattccggagaaggcatttcggaacacctccggctgagcgtcatgctccacgctgtataggcacaagctggaggccatcatcagcaccaatatgataaaaaaagaagacagaagctgctgacgtttccgaacgagcacctgagaaatgacattgagggagtcgtagtaccggttgatgcggaagaggcgcagaatccgcgccacccgaaacatccggaaggcggtggcgcctcccgggaacatcaccggcaggtaggccgggagaaaggacagcaggtcaatcaggccggcaccggatatcacgtacttgcccatggcacggccttttcctacatttgggtacagacactccgccgtgagcagccgaagaacgtaatccacgccaaagaaggccgtggtcacttccagcaccagcatcaatccgatgccgtaggcctgcgccaaatggtcataggtcatcataaaagcggcggtcagattgacaatcagcgccagggagctgaagatgtcgtaacccagactcaggggatccgacaccgtgccgatggataccattcgaaagagccggtgctgcaggcggccccacgaggtttcttccgttcttctttttgtttccatacattaaatcctcattccaaaaatccttgatttcattatagacagtcccgcatcccgatgcaattgtgaaataatgtcctattattcacaagttttaattaaatctgaacaattttcagcgtcaccctctattttaaaaatatccccaaaacagaaaaagaacgtatccgatggatacgctccgttcctgaatctataaggtttatggttaatggttggctttttcacagctaagctctatctcttagcaaatataatatactctattttcggacaattgaaaaacagtaattttttgtatttaaacaagtatttacttgtggtataatgtttaatcattaacagatctgcttagttgaaaaacacaaaaaaggagttttccatgaccaacagcgaacgcgcctttctggcgctcagtgaaacacttaatttcacccgcgccgcggacaaaattttcatcacccagcagggaatcagtgagcacattaagaaactggaagaggattacggaaccacgctggtaattcgaaagccgaaggtgcagctgaccccggccggtgaagtgctccgggatatgcttctccggcaagaagccatggaccgggatgtgcgccagaccatttcggaaatcaacagcggtgacgccggcgaagtttccatcggcatcagcgtctctcgggttcgtgcttttgccgccgacatcatcatccggtaccacattgcccatcctcatgtgaaaatccacctgtattccgacatcaccatgaagctggaatccatgctgttggataacaaactggacggcatcattgcggtaaacgccgtcccgcaccggaacctgcagaaggaactgctctttcaggatccggtatatctggccgtaccggaccacatcgctcgggcgcggaccggcgacgccacaacggtggacatcgccgattacgccgatctccctttcattcgggatttgtccgacagcaccaccagttttcttatcgacccattcctggagagccggaatatcgagctgaacaatattatcaacgtcagcgaatacgccgttcaggcctccttatgcaagcgattcgatgccgccatgttctgcgccaaatccttcgcgtactacaaggaaggctccatcgttcaagccggcctgcgaacgctggaactggagggactgggccataccgtggacatcagcttaatgacctcccggaaccggcactacgcccgctgtgccacggacttcttccagaccatccgggattccctggataccttctacgagaaggttatgtagggactataacgcaatttccccggccaaagcgcagtgcgcggcggtgaccggtgacgccagatagatctgcaccttgctggtgcccattcggcccaggaagttccggttgttggtggccaccaccacctcgtcatcggaaaggatgccgccggctcttccgcagcacaggccgcagcccggcgtggtaatcatggcgccggcctccgacagggtttccagcgtgccgtccgccagtgccgcccagtacacatcccggctggccggcgttacgattagttttacgaacggtgccaccttcttgcccttcagaattgccgccgctgcctgaaggtcttccaggcggccgttggtgcaggaaccgatgaacacctgatccaccttgattcccgcttccttttccaccggccgaacggcatccacctgcgacggacaggccatcaccggtctgaaatcctccgcccggtaattcagcacccgcgcgaactccgtgccctccggtgacgactcgtaacacaggctgcccgtttctccttttaggaaacccggagtccccggaacgtgggaacccggttcgacggaatctgccgctttggccgctgcatccccggtgagaaccgtccggaaaatctcgtcaaaagcatctttatagtcgtctccgaaaatccccttgctcattggatgggcatcggtgaaatgcagcgtctcccgattcggatagcacagaccgcattttgcgccggcctccaccgtcatgttggacattgtgaggcggctggccaccgacatgcggtccacggtgctccccgcaaattccaacgactgataggtggcgccgctggcggagatatcgccgataacggtaaggatcacatctttcgacgtcacgttctccggcagggttccctgaatgttcacccggatggtttccggcacacgaagccacagctcgccggttcccaggattcccgccatctccgtgtagccgattcccgtggagaaagcgcccagtgcgccgtaggtaaccgtgtggctgtccgttccgaacaccacatctcccggctgcacgtacttctccgccatcagctgatggcaaattccgtcggtgcggtgaacgtttttgattccgtatttccgggcaaacgcgtccccccggtggaagtgccgcacatcgtccacttgactggccggcaccatgtggtcgtacaccaacaccatgcggtccggatcccacaccttcgtgaatcccatctcttcgaatttgtccgccacaaaaggaatgaaaatatcgtgcaccatcacccggtccacctttgcggtcacgatgtcccccggtttcgcatccttctttccggtatttctccggagaattttctcaattaatgtcgccatgttctcctcctattccagcccgttccgctttctcatcgccggaaccagcccgccggcatccagaatttccagaaggttttcaggcaaatccgcaatgggatacgtcgccccgttcacccgaatctgtcggcccacttccacgtccatcacatccccttcctgcacgtgatcgatcagatcgctttcgatgagcagaagtccgttgttgatggaattccggaagaaaatccgggcaaaggatttggccacgatgcaccgaatgcccagggccttgatcacctccggcgcctgctcccgagaagagccgcagccgaaattttttcccgccacgatgcagtccccgggctccagcattcccgccagctccggccgcagcggcgaaaaggcgtagggcttcatatcctccacggaagggagggccagatattccgtgggcatgatgatatccgtatcgatatcatcccccatggtgtatattttcccgctaaaatgttccattttgttactctccttctccctaaaaacaagcttccgcaatctcaccggccaccgccgatgccgtcaccgtcgccgcattcgccagatagacgaaggaattccggtcgccggcccggcccttgaagttccgagttcccgtgctgatcagcacttccccttcgccgatcacgccctggcagctgccccagcacacactgcagttgggattcatgacgatggcaccggcctccatgaaggtatccagaatcccttctctcgccgcccggttatagatatcccggcttgccggaaccaccaagaagcgaacgccctccgctactttctttcctttgataacctcggctcccaggcgaaggtcctccagccgcccattgctgcaggaacccaggaaggcttcgtggattttcgttcccgccacctccgataccggcgccaggttgtccacaaaatgcggtttggccaccaccggctgaatctccgaaaggtcgatatcgtacacttcggcgaattccgcatccgggtcgctctcatagcaggccaccggctctcggccgtgcgcctccaggtactccaaagtcacctcgtccaccggcatcagtccggttttggccccggcctccactgccaggttgcacaggacgaaccggtcgctgacggacagccccgccagtcccggccccgcgaactccatggccttatagttggcgccgttggcgcctatttttccgataatcgtcagaatcacatcccgagcggtcacgcctttccgcagcgtgccggtcagattgaaccgaagggtctccggcaccatcacccaggatttgcccgtcaccatggcgtacaggtaatccgtgcaccccacaccggttccgaaagcccccagacacccgtaggtgcaggtgtggctgtccgccccgaaaatcagctgccccggccgaacgtatttttccaccatcacctgatggcaaatgccctcgccctcgtagaaatcgattccgtgctcccgggcgaaatcccgcatcttcttctgggactgcgccgtcttcacgctgtcgcaaggcacgttgtgatccaccacccacaccagcttggatggatctgcaatgtgcggattcttcaaattgttgtatttatcaatggtcagatgtgtggtgccgtcgttgctcagcatgtaatccaaagtcaccacgtgaatttcaccggcctttgcggcgtccaccccggctgcccgggcgatgattttctctgcaatcgtcattcccatttttctctgtctccctgtctgcttctgctaaaaatactctcgtctcgtcctgcggtttccggcgctacgcctcatccaaagaagcgatcagaccgccctgatccaaaatcttctgcatgtacggtggcagcttggtgcattcgtaggtgcttccgccgctggtcaccgtgcccgcatccaagtccagttccatttcatccccatctttcacgcagtcgtacagatcccggcacacaatcaccggcaaaccgatgttgatggaattgcggtagaaaatccgggcaaaggatttggcgataaccgccttcacccccagcgctttcagcacgccgggtgcctgttcccgggaagacccacatccgaaattctcgttggccaccacgtaatcccccggcttcactttgttggcaaatcccggatccagggattcaaaggtatgtcccttcatctcctcaatggtgggatacagcaagtactgcgatgcaataatctggtccgtatccacatccgaatcaaaacgatatagtgttcccattgttctatctccctttttgtatgtatttttatgttttgatactaaattttataatatattatatcagattcaacaatatttgtgaatgactttacataattctgcccgcccggcgctttactttttccgacaggccgaccggcccgccaggtgacaacaaatgggccggcgggctgctcggtttgcgtacgactcccctgaaacccattgatttcggttttcatacgcaaaccaagtgccgggtaaatgaaaattgccggcacgtcaggcccctcggtttgcgtacgtctcctctgaaaccccatgatttcggttttcgtacgcaaaccccgtgccgggaaaatggaaattgccggcacgccaggcccctcggtttgcgtacgtctcctctgaaaccccatgatttcggttttcgtacgcaaaccccgtgccgggaaaatggaaattgccggcacgccaggcccctcggtttgcgtacgactcccatgaaacccattgatttcggttttcgtacgcaaaccccgtgccgggtaaacggagttggccggcaccggcggccggtccggtttgcgtacgactcctctgaaacccattgatttcggttttcgtacgcaaaccccgtgccgggtaaacggagt

SEQ ID NO: 2150 - DNA, 30361 bp, Unknown
  16S sequences of unknown bacteria
ggtgctgaagatacttggctggaagcggcccgggaaaatagggcgatgccgacactcttcctttttttaattataaaaagtggttgtatatacgtgccttaacaaggcccgttagtcaagcggctaagacgtcggcctctcacgccgaaaacacgagttcgattctcgtacgggtcaccattaaaataaggtatatatggggatttagctcagttggtcagagctaccggctcataaccggtcggtcccgggttcgagtccctgaatccccaccacttttttttaattttaataggggtatagctcagcaggtagagcagcggtctccaaaaccgcgtgccgagggttcgatcccttctgcccctgccaagtctttaggtcgatttagatccgaccgagaaaaaacgagaaaagcggagatttcgagagatttctccgcttttttcgcacctaacttttttcgaatttccatagatccattttctatttttcttcgagtcgaaggattcgaactaccgaaaacgcactttttcatgaatcgaatacggaacacaagcgaccggaaggacttgaacccacgacagggtttcaaattcttccggttttttgcgttagacacaaattgtttacaaatagtcccttccaaaacagatccatcccttctccgcaaggactcgaacccacgaaacgctaaaaaaagatttttttgaaatagatccattgagccgacaaaaggattcgaaccagcgaatcccaaatattgccccactgaagacaaagaaaaagccttctgcgtacatagccaaatgcttatcagccaagcgtttggctttttttatttgcagaaaggatgatatgctgattattgtcagacggctttcgacaattacgccaagtctgttggagagccgacgatttcttctcacaggttaacccctattgaaccacgcgactatcgcgtggttttcgttatacaagaaaacagcgcagagacactgcctccacgctgttttttggtgatattagtagttatcttttctaacctcgaaatatgccttgggatgcttgcatacggggcaaacctcgggtgcagcagtaccgacaaccatgtgtccgcagttacggcactcccaaacggttacaccgctcttctcgaatactgccttctgctctacgttgttcagaagtgcgcggtatctctcctcgtgagtcttctcgatagcagcaacagcgcggaactgtgcagcgagctcggtaaagccctcttcctcagcgtccttagcaaagccgtcgtacatatcggtccactcgtagttctcgccctcagcggcgtgaagaaggttctcggcggtatcgccaagctcgccaagtgccttgaaccaaagctttgcgtgctccttttcgttatctgcagtttgaaggaagagcgctgcgatctgctcgtatcctgccttctttgcaacagacgcgaagtaggtgtacttgtttctcgcctgagactcacctgcgaatgcttcccaaaggttcttttcggtcttcgtgcctgcaaagggattttttgcctctgcgatcttttcaaacttggatgcgggtaccttgcaaacggggcacttaaaatcgtccgtcatttctccctcgtgaatatatccgcaaactgtgcatttccatttagccattttctttgtttctccttttataatttctttattgatgtcgcttgagcgatcagtgtacatagtatggagcatttcttccgcaagctcactgagcggtttgccgtaaaattcctcgtaaagctcctttatttcagggttttcgtggctcgaacgaagagtcatagaggcatctctcttataaaggctctcgattcttgccttacggcttgcgtttgcatctgctgcaaaatctctgggctgaccgccaccaccgatgcatccaccggggcaggtcatcacctctacgaagtggtagttcttctcaccgctcttgattagttcgatgagcttgcgagcgtttgccgtaccataaacaacagctacgtttacagtggttcccttgacgtcaaggcttgcttctctgatgccctcgtatccgcgaacgggcttaaggtcaagaagtgcgctcggagggacctcacccgtgatataggagtatgcagtacgaagcgctgcctccataacacctccggtgttaccgaagatcacgcctgcccccgatgcttcacccataaagcggtcgtaatcgctatcctcaagagaagcaaagtcgatcttcgcttcctttgcccaaagagcaagctcgcgagttgtaacaacatagtccatatcgcgcatttcagggataccgagcttcttgcctgcggcattcatttcctcgcgtcgaatctcgaatttcttcgcagtacagggggtaagtgctacgttaacgatcttcttcggatcaatacccatcttctgtgcgaagtaggtcttaatggtgggaccttgcataccgatggggctcttggcagttgatatgtgcgggagcatttcgggataataggtttcagcaaacttcacccacgcagggcagcagcttgtaaactgaggcaggggcttatctcctgtcgtaatgcgacgaacaagctcgcttgcttcctcaacaatggtgagatctgctgcgaagttggtgtccaaaacgtaattggcaccgagagcacgcataagggcgatcattttaccctgcacgaagcttccttttgccattccaaactcctcaccgagagcaacgcgcacagagggagaagtgctgacgataacaatcttatcgggatctgcgatagccgccttcacgtccgggtattcgtagacctcggtaatgctggcggtaggacagacgtttgcgcactgtccacagtggatacagatcgcctttccttcggtttgctcaaaggaatatgtaccgtgaacaccgatttcattcgtgcaaacctcacggcattgtccgcacttgatgcaaagatcttctttgcggcagatacttgggttatccgattcaatcggaacccgaacagatagtggtaaatgctctgtcatacactttcctcctaattattctttattttttaattataccatgaccttttgagtttgtcaatggattgatgcaattttaagtgaagatatttatttaataaaatattttagaggtgaataacgtcgatttggcagagaaatcagcgcgcaagaattaagtaaattatcatatgattttttagcacaagatatatagggataggacttaattgattttactacatagattcgtttgcaagcatggtgcgaaagcccgatagacctaggatcacttttggcgcccatcatcgccaaggggcaagcctaccctcatggcaaaaattatggactattttgtagtggcaacacaagaaaaaagcagattgcgtaagcagtctgcttttttcagttaaatccgccgccggcggaagaaatccacctttagtggatgaaatcgcttcgcgatgaaatcccgcttcgcggggagctaggaggcggatttggtttcatctgcggcggtactccgaagatatgttctgcggagacttgcggaaatccgtatttatataatttctgtcattttgttcattcggtcgttgtcgggcaaacggaaaaatcatcgaaaacgtgaggaaagagagcgttgacggctttcccgattgacaaaagaggcgtaagatgatataatcaaaataaagatacggcaatgcgattataatgctttcaaagacagatgatgaggtgaaacgttatgaacacggcgataatatatgcgtcaaaacaccacaaaaatacggaaaaacttgtccttgcgatagccgcggctcacgaagttgcgcttttcgatgcggaaaaagacagtattccgtctttggatgaatatgattgtataggttttgcaagcggaattgcgtacggcaagttttatccgagcgtcagcgtggcggcggaaaaatacatgactgcggggaagaagatatttttcctctatacctgcgggagccacaatcgggatatggcgcgcgttctgaaattcctcggcgaagagcgcgggtgtaaagtcctcggtagtttcggttgtccggggttcgacacgtacggtccgttcaagcttatcggcgggataagcaaaaaccgtccgaacgaaaaagacatctcggatgcggtcaggttttttgagaccgaagtctcagcagaggtttaaccgtcttccgcaagatccgaaatagcgaagagtctgatctgaaaataaaagttgcggtcttccgataaacggagatcgcaacttttttctatcttgcttttttgtcgaaagacggattgaacgcataaaaatttcgacaattcagtttatcctgcaatatgcgcaggcattcgccgaaccgctgataatgaacgagttcgcgggcgcgaaggaattttatcgggtcgcgcacgtcggggtcgtcggcaaagcgcaggatattgtcgtaagtcaatctcgccttctgttcggcggcaaggtcttccgtcaggtctgcgaaggtgtcgccggtggatgcgaaagttgtcgccgaaaacggcgcgccgcttgccgcaaccggataaacgcccgcggtgtggtcgatgaaataatctgcaagaggactgttttttatctcgctttctttcagccctcgcgtcagttgatgaactattgttccgaccatttcaaaatgtgaaagctcctccgtgccgatgtcatttaacgcggcgcggagttcttcataaggcatggtgtatctctgtgaaagataccgcagagacgcgcctatctctccgtgaggtccgccgtattggctgatgatgaactttgccatggcggggtcggggttcttgatttttatcggatattgcagtcgtttctcgtaatcaaacattgtttgttgtccgtcctttccttattgccacggccacggtgattttatccattcgttccagctttttgtcacgtcgttttttcgcagaggtccgcattgcgaggcgtattcgcgcctcaaaccatccgccttgtcgcggtaagcacagaatgctttcatcgccgtttcgtcgttcgggtgcgtgtcgaggaaaagcgcggtgtcgtgcgcggcaaaggcgtaagctccgagttccgcaagcagttcgtttctctgttttttcatatcacatacctcctgcaaggaacggtttgtcaagcgcggcgaatatcgttcccctcgtgtaacctttttcgggggcgtaaatatcgtcaaaaacctgcatgggagtgtacgacgttgcaatcggagcgttcgccccgtctatgcagaaatacgtccggcattcctcacagccgcggcacggcattgctatcgtcggaagcccctgttcgtcttcaagaaataagttttcgggcatttgtctttcatcctttcttttcgggcgcggtaaaacgtcgcccacgggagattttttgctctccaataatattttattagcgtatgaaaaaaattgttaactaaataaaaaaacacggtaaaggtcttgattattttccttttatagtgtataatacaatggaagcgggtcttgcgtgattccgtgtctcgaaccatgtcaggcagggaactgagcagcattaagggaatttcgggatgcacagcaaggaacccgcttcttttttgattatgaaagggtgtgaacaaaggtgtatcaggcactttaccgcaaatacagaccggcggtcttcggtgatgtgataggacaggaacccgttacaaaaacgctgaaaaatcagataaaaaacgcaacctttgctcacgcatatctttttaccggaacaagaggaacgggtaagaccacctgcgcccgaatctttgcgaaagcgataaactgtctttctcccgttgacggcgaaccttgcggtgaatgcgaggtgtgccgaggaataacggacggcagcgttaccgacgttatcgagatagacgcggcgacaaacagcggcgttgacagcgtgcgcgaacttcgcgaggaagtcgcgttttctcccgttctcgcgaaatataaagtttatatcatcgacgaagttcacatgctttcgcctgcggcatacaacgcgcttttgaagaccatcgaggaacctccgtcacacgcggtattcattcttgccacgacagaggttaacaaggttccgtcaaccattgcgtcgcgttgtcagagatttgatttccgccgcgtcaacgtgggaacgcttgtggaacatctcaaaaaggtcattgcgtccgagggggcggaaatggacgacgaaagtcttttgacggttgcacgtctcggcgacggttccgtgcgcgacagcctttccgtgcttgacaaggttataggactttcatcggcggaagaggttcgcgaggttctcggcgttatcgacacggaacttatacacgacctgatgaaagccgccgcggagcagaatatagacgctctttataccgctgtaaactcactttacaacggtgcgaaagacctcggcgttctttgccgtgaactgcttgacgaatacagagcgcttcttgttgtcaaaaacgtccgcaacagaaaaggcatacttgacctttatgacagagatgaaaaacggcttgaagaaattgcgggactttataccaccgaacatattctttatgcgatagatattgcgcagcagacgctgcaagaactttcgcgcagttcaaacaagcgagccgatatggaaatatgccttttgcgaatttcccgcccgaaactgaatgagggcgtcaaggcgttgaccgcaagggtcgccgaacttgaaaacgaacttgaaaaactgaaacgcggcggaatcacggtatccgctccgtcctcgtccgtgcctgcggcggggtatgccgaagcaaggagaacggatactcccgcacccgctaaaaaggtcgcgaaaaacgccgatatgacacctccgaccccggaagatgttttcggcgcgtctccgacatcgtttgttcccgcagatgatgatttcattcccgcaccgccgcccgatacgggtgacgcacccgtattgcccgatgtttccgagtattccgaacctccgaaaaacgccgcttccgcacctgcgcccataaaaaccgagcagattgcggctcccgtaaaaaaggctgctcccacggaagagatccatgacggagaatatagagagttcggctcatgggaggatttctgcaaacttgtcgcagacgacgatatgttcctcggaatgatgctcaaaaccgcgtgcagcgccgtttaccgcaacaccgagctgcttattctctgcaaaacggagcaggacttgacggatatagacaattcgcattgccgcgagagcatgaaaaaggcgcttgacgctttgcgaaagacccattacacgataagcattaaaatcggcagaaaaggcgaatatctcaatgccgaagaatataaagaccttgaaaacaaccctctgttcgattttgaatagagcgtcaataccgagaaaggaactcttattatgaaagtaaggatccccaaccagggcggcggacaggccgcgatgatgaaaaaagttcagcagatgcaggaggatatgcagaacaagcaggcggaactcgaagccgccgaatatgatgttacctccggcggcggaatggtgaaaataaccatttccggcgcaaaagaaataaaaacgctcaaaatcgacccgtctgtggttgaccccgaagacgtcgaaatgcttgaagaccttatagttgccgccgtaaacgaggcaataaacaaggttgaacagacggcggaagaagaaatgtcgaagatcacatcgggtctcaatatacccggtctcggcttctgatatggcatacaacgtcaatccgctcgatgtgctgacggagcagttcagaaaacttccgggaataggcaagaagtccgcacagcgcattgcgtttcatattttgcgcatgacggacgagcaggcggaagagttcttgcgctcaattgaggacgcaagaaaagtgattcacctttgcccgatatgccagaatctgaccgacggcgaagtctgttccgtttgtgccaacgaaaaaagagataagtccgttatatgcgtcgtttcatcgccgcaggatgttatttcaatagaaaaaacgaacgagttcagaggcgtttatcatgttctgcacggagttctttctccggttgaccatatcggaccgaaagacttgaaaataaccgaacttcttgcccgactgaacggggatgaggtaaaagaggttatcgttgccaccgctccgaccgtggagggcgacgcaaccgcaatattcttggctaatctgctgaaacctctcggcgtcagcgttacgcgtttggcgttcggcattcccgtgggaggggacattgaatatgcggacgagataacgctttcgcgttcgctggaaaacaggagagagatgtaatgcttcttaacgacagacctgtttccgccgcagaagcgtcgcagcagtcggcgctgacgcttgcatatctcggcgatgcggtttttgaacttcttgtccgtgaaatgcttgttatcaattcccacaaaaccaacggcaaacttcattttgaggcgacacatttcgtttcggcaaaagcgcagagcgaatttgtcgataaaataatgggaataatgacgacggaagaacttgccgtttacaagcgcggcagaaattccgatgccgttcccccgaaaaacaccgacgttgcggtttacaaacgcgcaacggggttggaaactcttttcgggtatctttatcttttggggaaaacggagagaatagaagaactttttgaactgatggtcaaataggaggacttttcccgtgaaaaagaaagtcgtcggacttatttgcgatatcggcgttatctttataggcggaatcatatacgccatagccataaacacgttcagcgcaccgaataaaatcgttgtttcgggcgtgacgggtatcgggtctataatgaactatctgttcaatatcccgataggcctttttgttgttgccgtcaacgttttgctgttcctgctgtctttcaaattcgtcagcaaaaaaacgcttttcaaaagcgcgatagccattgtcataacatctgcgcttatagatataaccgcggctatcccgtggttcccgaaatataccgaagacccgctgcttgcctgtattttcggcggcgctttgacgggtatcgggctcggaataatctttatgcgcggaataacgacgggcggcgtcgatcttatcgcgctgcttctcgaaaaacttttcccgtttatttcttacggcaggctgcttatttttatagaccttgttatagtatgtgctgcgggacttgtttccaaaagccttacggcggttctttatgccgccatcatcgtctgcatttacggctttatcgtggataaactgctgaacggtcttgacagcgcaaaggtcgtttatataatcagcaatcacggcgacgcgatatgcgaggctgtaacaaaaaatcttcaccggggcgtgacgagaataaacgctttcggcggatatacgaacgaacccaaacccatgcttatgacggtggttcgtccgatggaactttttaagttgaaaaaaatcgtaaaagaaacggataaacacgccttcgtcattgtcggagacgttgccgaagttgtcggaagaggtttcaaaacggaggaggacggtttgcaatgaaattgctcgaagaaaaaatagtcagagacggaacgataagaccgggaggaatagtcaaggtagataattttttgaatcaccaacttgacgttgaattgcttgacgagtgcggcaaggaatttgcccgacttttcaaggataaaagggtgacaaagattttgaccatcgaggcttcgggcatagcgatagccatttgtgccgcacggcacatgggcaatatccctgtcgtatttgcaaaaaaggcgcagaccaaaaacgttgacgatgacgtttatcaaacgcccgtcatgtcgttcacgcacggcagagagttcatggttcgcgttgcgaaaaaatatatctctcccgatgacaaacttctgataatagacgatttccttgccaacggcaaggccgttctcggtctgcttgacatcgcggaacaggcgggcgcggaagttgcgggcgtcggaatatgcgtcgaaaaagtctttcaggacggcggcgctattgtacgcgacatgggcgttgaagttcattcgcttgcgatgatagaccttgacgaaaacggcgaaatgaaatttgttcagtcaagatagcatacatataaaaatttagagttaaaatatacggagcgtccgaacagggttgctccgtattttgctgacaaagaacagataaatggtgacatttttttgtatattggtttatgcgccttgaagtccgatcagggttttagtataataaaaaacaagcaggtgcaatgttttattgaatagcataaatgccttgttatattcagcctgtgcggtatcgtttgatgattgataaaatatttgagaaaggaaatagacaaggtggaaattacggataaaacggaagaaagtcttttttcggcaaatgactgcgttgtctttgtttccgaaattccgagcgaaattgaaatcggaaaagttttttcggatgagcgcaacgctgaaattgcatcatgtcgaaatgaaaatttgaaaaaagcacggtatacggattggaaacttcttgaatacgccgcaaatcgcgtgtttgaaatcgcgcccgaaaggctgattttcaaaaaaaagcagaacggaaaatgggtttgcgacaaattctttttttcactttctcatacggataaaaatgtcgccgttgccgtctctcccgcgccttgcggcgttgacatcgaaaacattgcccgcggcattaaatatgatataaaaactcttgaaaaaatgagaaaatacactttttcggaggaagaaaacacacgcgtcgaaaagtcttctcttgaatttctgaaaatatggactgcaaaagaaagtatctttaaagcatacggagaacagagtttttatccaaaaaagacagacactttggcagaaaaccatgcaacatatgtctttgagcaacgggacattgttttgtctctttgcggtgaaaactctgatttggcaaaaatagtttttgtcgaaccgcgaaacggttcgttctcggaaatccctgccgaaaaacaataaggatttcggtcaaatcaaataattccgacaggtacggcactttccgatttaaaactctcttttgagcagaatttatccgttgacaataaagaaaaggggctgtaaaaaaacgcaagtttttttacagcccctttgtataatgtgtttgggttttcctttcgtcagcctgttgagcggttatctttcgctcatcgggatatattcttcgtgctcgccgacggatttgtatgctggacggattatcttgcccgcgtttgttatttcctctattctgtgcgcgctccaacccgcaatacgggcaaccgcgaatattggggtaaagagttcaacgggaatgccgagcatttcgtaaacaaagccgctgtaaaagtcaacgtttgcggaaacgcctttatagatatgtcttttttctgcgattacttccggtgcaagacgctcgatcttgtcataaagcgcaaacgatttttcgcggtgctttgctatggcaagtttttccacaaaactcttaaagatcttcgctctcgggtcggaaatgctgtaaactgcgtgtcccatgccgtatataagccccgcgccgtcaaaggcattgccgtcgagcagatcttcgagatattttcttacttcgtcgtcttttgaagcatgaacgtgcttttccatatcctttatcattttgcagacttttatgttcgctcctccgtgcttgggtcctttgagcgaacaaagcgccgcggcgatagccgaatatgtatccgttcccgacgaggtgacgacgtgtgttgtgaacgttgagttgttaccgcctccgtgttctgcgtgcagtatgagcgcaacatcaagcacacgcgcttcaagttccgtatatttgcaatcgggacgcagcatatacagaatgttttccgcggttgaaagatccgggcggggacggtgtatgataagcgactctccgtgtttgtagaagttgcatgccgcataactgtaaacggaaaatacgggcaatacagccgtcagcataacgcattggcggacgacgttttctatggacgtatcgtttgctttggggtcatacgggaaaagtgaaagcacactgcgtatcaaggtgttcatcatgtcttcggacggagatttcattataatgtcgcgcacgaagtttttcggcagagtataaaaagaagtcagatactttttgaaatccgcaagttccttttctttcggcaatttgcccgtcagaagcagatacgttgtttcttcaaacccgaaacgcttgtctttcaggcaaccttcaacgagtttttctatcggatacccgcgatagtagagttcaccgtccgcaggtacggattttccgtcaacgatttttgaagcgctgacttctgagatctttgtcagtcctgcaacaacgccttttccgtttatatcgcgaagtccgcgttttacatcgtattttgcataaaggtctttatcgaaaagcggcagagtgcattcgtttgcaaagtcttttaaatagtttttttctttctctttcattttgagcgctcctttctgcttgcacggtgaagtattatgtctctattatacatgaaaagggtagagagaaaaagaaaaaaatgtaaaattttgtcataaaaaaaacaatgtgacggggctgtaaaaacatacgtttttacagccccgttcgatgtgatatagtaattcccgattgttttatgaatacatcccgtttgcgctcatatagtcgtaaatcgcttttccgtgtccctgttcctgtttttgaatgccgttcaacagattccttgcattttcgtccgtgaactcaaacacgcaggtgtcataaaggtgcgaagcatgtttttccgccgtcagcaggtcggtgcaaaggtaacaatcgttttgcttttcgggggtgtccgcaagttggtaagttgcggaaaatgtctgctgctcgccgcctgtcggaggcggtggaaccgcgccctgttccatttgaacaagcatatcgtaatgtgctttttcggtttgggcgagccgcgaaaacaaatttttcaactgcgggtctgacgccgctgcggcgtgctttctgtacttttcttcacaaagtttttcctggtctttcaagtctttcagcagcgaagtttctttctgcgtcaattgcatttttatcacctcgcaaaaagtatggtcgcggttttcggattttatacatataaaagcggcggaactttcgctccgccgctctgtatggtagtttattactctttttcgtccgacggctcttcttcctgctgaatcgcttcgtcttgttccgattcatcgggctgcaagtcctctgtttgaccatcttcttcgataagcttttcttctgctgtttctgtttccgaaaggcttacgggttgctcttccgtcgttgagcagtccgaaatttcagtgccgtcatattttgccccgtcttctttcttctcggttttttttcttgacataaagaatatcagcgcaagtaatcccgcacagaatatgcttgcaattatgccgagtgtcagtccgtaagtgaagaacgaaaattctatcgtatgttctcctgccgtgaggggaattgcgcacagtgcatttgcaaatggcttgatatcgactttctgtccgtccactttgaccgaccagcccttatcgtaggggatagatgttaaaagcacaccgtcttcatcggctgttacggttccgctgactgttctgtccgtatattccgtaacagtcatcatgtttttgctgagcgcggcatatgccttgttccatgcgtcatcgtcaaaaccgtaaactcttgattttatatctccgctttttcctgcggaaatattgatgtcgatatatatagtgtcgcccgcttttgctcttccccccgcaaggatggctgctctgccttggctcgggtatttgacttcatctccgtctcctatcgaaataacgatactgctgagacccgttgcggtaactccgaaatagatgtcctgatccttatccgagacatattcgagagaaacggtggagagctgtttgctgtttgtcggcgcggagcaggttattttgccgtttccgtaataagtcgcggtcatgtttgaagcgctgacctcgggggaatcaatttctttgaagagggttatgtcgagccccgttgcaaggtttatgagattttcctgcgcaacagccctttgcgatgaactgttcacatcgtaatcgtatacactgtccttgaccatgaatccgagagacaacggatacttgttctcataaagcgttgaaccgtttgattccgcaacaaaatcaagatgtgaatcctgcgcaacgcgcttgttgttgccgattatatatttgacgttgaacagtgcgtttatcacaggtgttccgtggttgtaaaccatgctgttcgcgcctttttgagcgtttacaccgagcgatcttgccaagtccgtcagtcttgtgttgataacggacgagaactcggaaattccgtgataatcgtaaagagccgggtcgttgaccgtccagttctgtgcggtttctattctgtaaaagccctcggatctgccgcgtgccgttgtcagaagagattgcacgtcttttgccgtcgcaatatatccgtctctgcttgaagagccgacttccgcaatgctgtggaacgaaacggcggcaacctcgcaaatcgcaactatgactattataagtttgctgccccactgtttgagttttccttttttgtatgcgtaaagggcaagtgtatatatcacaagcgatgcaatggctatgtatattacttcataagagaatttttcgctttttattgcttcaagcagtaggataaacgcaaaaattcccgtcgtaacgcccgcaaaactcttcttggagatgccttgaatgttgttgaaagatttgaaggctatcgttataagtacaaaagagaacaggaacgagaatctgtaaggcagttcgttcggaaaatggaaaccgtgccaaacgaaattaagtatgttccagttgaaactcagaagcagaaaaccgagcaacgcgccgttgagaaccttttcgcgtgtcgctatctttctgtttacaaaatatgtaatgccgagtatcgccgtcaaaaagccgcaataaatattcggaagaccgtttctgtatgttacatgaactcccggcagaagatttccgagactttcaatgaaagtttggtatgttgaaagcgttgccgaaaagccgcttcccatgtaggagttgttctgcattgcaaggaatgtcggcacgagcataaatgccgcaagtccgcagccgagcgcggagaacgcgacgacttccgccgttgttccgaagaactttttcgcacccttgtttttcggattcgagaagtacacaacggggtagtagcaaacgatgaatacgcagaccataaacccgatatagtaattcgagtacattatgagtccgagtattatcgaatagagcaggaatttgccctcgtttacaagcctgttgaatccgagaatgcaaagcggcagaagcataacgacatcaagccacatcgtgcaccacgaatagcccatgttgaacgagcacattccgtacatcacggcaaaaagaagcgttgccatatcgtttctgtcaaacgtctttttgagatatacgaacataaacgttgaagcaagcgcgatttttgttataaccagaagtgccatgccttcaacaaggaagttcgacgggaaaattatcgaaagaagattgagcggagaagcaccgtaataagcgatgatgggcaggaaacttgtgccgagcccgttattccattgataaagaagacttccgccctctttcagcgcctcgttcatctctttgaagaacgggaaatactgatgccacatgtcgatgacaagtatttgctgttcgtctttgcttatcgagaaaccgaagttcctgagcacctcgtaaacaaagtcgggaacaattttgttgaaacccgaaaagttttcgagagcataatacaaaaacataagtacaaacgggataagaaatgaaaaaactatgtaccagtttttgttgaactctttcttttttaaagggtttttctttttgcattcaaagcatttgatacccatgtcgcgtttccctttccgttatttaaaaacaatgactctttggaagtagtaactgataaagaacattataaatgttgcgagaggctgacacagccattgcgcaacgccgatagtgagaaagaaactgttcagaagcacggtgcaaaggaagacaacaacaactattgcatagtacttggcaacttctttggggtttctctttctttctttgaaaacaatatatttgtttattatgaaattgaatgcggaggagaggattctggcaacgatgaaagatataactattctgtaatcggtcaggttgtccaaaaaacttgtgttttcttccgtataaccgaatacggcattcagcattatcgcgtatatcgcaaagtctattactgtcgcagacatgcttgaaatcacaaatttgctcagatgcttaaaaaatacggaatatatttttacggagtccctgaacggacggaaatgcgaagatttgttttcttctatatataccgtctcgatgggaatttccaaaatctcgatatggcgcaggcgcgcttccatcagcatattcatttcgtattcaaagcggtcgccttttgttttaaggaactccgaaacaacatcgggcgaaaaaccgcgaagccccgtttgtgtgtcttcgacttttgtcccgcttatccatttaaataccgcttttgtgattttgttgccgtagcgcgaacggaacggcacgttttcttctttccagcttcttgaaccgagaatgagcttctcgggattttcgagagtggtctgcgctgtgcggcgtatatcttcgggcgtgtgctgtccgtcgctgtcggcggtcactatcgccttgaaatcgggataatgttcctgtatatatctgaatccttttttaagggcgaatcctttgcctttgttttcttcgtatccgatgacttcaacatcggggaatacacggcattcatcgaatactgtgtcaaattttttgtcgcttccgtcatttactatcagtattttctcgaacggatatccctgcaaattgtttaagagcttcgggagtttttcgtccggttcaaaagacggaatcagtatgacgacttttgacaaatccgacattttgtatttcctttcttttttatgcggcttgctgtttgtgggtattaccgtcgcttcacaatggcataattctacttatatcacttactatatcataaaacaacttgattttcaatagttttttttctgaaattttgcttacgcctattgaaaaagcgcgaaatatattgtatacttgcttatatcaacgaaaaaacacggaggaatcaagatgaaagttctttctcattccattatttacgataacccgcttccgcagcttcgttcgcgccaagccgcatttccatttctcgcgcagctcggcgacggcaccgttatctgctcttatcagataggcgaagcgttcgaaagcgttgacggaacaagttatatttcccgcagttcggacaacggaaaaacctgggaaggtccgtttcagatgttcgacaaatcgtgggaaacaactcctataaccgactgctgcaaagttaccgcgctcggcggcaaccgcgttgtcggcgtcggctatgaatatgacagagaccaccccgaatggcccatcggcaatccgcagacgggcggccttatagatgacagagtttacatcacccgctccgaagacggaggcaaaacatggtcaaagcatgaagaagttccgaatgcttggggacatcacaccgaggcttccgctccgataaccgttctcaaaaacggcgattgggtaactccgataacgggcttccccgattggaacggcaaaatgtcgtcccgtctttgcggcagacttctgcacagcacggacgaaggaaagacatggaatgacgataccgtttgcatggaattcgagggcgattgcgtaacatgctatgagcagagatgctgccagcttgaaaacggcgcgattgttgttataggctggaatgaaaatgtcaagacgggtgagagaatgaataaccatttcactatctcttacgataacggaaaaacgttctccaaacccatggatacgggtatcagaggtcaggcttcgagcgtttgcgcaataggcggaaacaaacttctcgcacttcacgcttgcagaagagacaccgataagcccggcatttacgcttatgtcgtgaaccttgaaaatggaacatgggatattgaagacgaacttctcgtctgggaacccgcaacgcccgtcgttcaggacaaaaaagccgccgaaattttcagcttcctcaaattcggtcagcccggcgccatcgttcttcaaaacgggcacatactcatgagccactggtttgctgagcagggacaatatatgaccctctccactgagatagaactgtaataacggttaaatttccgttacgctttgccttgcctctcgacgtatacccgatacgccttcgagactgcggcttcgcgaaaacgaaaattttcctcgttattcttgcgcttaatgtggtgggtaaagaattctttgtgttcatacatcacatctgcgactttgcggagccgaagttttacctccttatccgaaaacgccgtgagcgcgaagagtatcaggataatcaaaatgattttataaaaaggagatcttgttatgatctgcgataaacttacaaattacgaaaactacaaaggcataaacgagcgcgtttaccgcgcgcttgaacacgccgcgcacaacgatttttcgaaatcggttgcgggtaaaaacgacgttgacggcgacgatatctactacaacttcgttaaagagggcgaaactgttcctcttgaaaagaacacttatgaagcgcaccgcgtttatgttgacattcatgttgatgttgtcggcagcgagaaagtttatgtttcggatatatccgagatgaacgtgacgaaagagtatgatgcggagggtgattatctgcttgcggacggaaagccgcaggcgatagttgatctcaaagcgggctatttctgcgtatgtctgccgaacgatgttcatatgcctatggttgcggacggtcaacccgcgaaaataacaaaggcaatttataaagtcagactgtaatctgttctgtcggaattgtattaagacaatgaatataacggcgttgcatcatttcggtgcaacgccgtagccattgcaaaaacgctgaaaagtcaactgttttgcgggggttgcaaaatggcggaatatgtgatataatatataagtaaaattatatccgcgattgagacgttttttgtctgacgcagcaaacgaacggaagagaagtatgagagaaaaactgagaaattatatcgaagcaagtatatgtcctcagttcttttatgaggaaaagttgccgcatttgtggcttttcagcctgatattgcccgcattgacgggacttttttccatgctcagcgtcggccttgacaggtattccgcaggtctgtgcggcgcggataatgttgtcgaagtttcgttacttgggttggctctcggtgtctgctccgtctttttccgagcggcggtaattaaaataatctcggtctttaccgccgattccgtcgcttttcaggaactgtcttatgcaataggcgcatcgttcggcgttcctctgtttatctcttttatcggctttgtattgagagttgttttttcgcttgacgtttcgggagcgtttttgcttgttgtttcgttgacgcaactcattcctttgtattatttgatgatatatctgaacctcggcggaataaaaaaacggaagatgacggcgcttttgaccgtgactgccgtgggtatcgttcaactgtttgttttatggcttcttgtttgattcgttttttgccgggcacaaagggagaaaggtctgattatggaaaagaaacggtataagatatgcgggcttgtctgcgttcttgcaatgagcctttgcggcgctttgttttgcgacgcgggacttttgtcaagcgctctttacggagtattctgcgctcttgtcggtttcggattttggttcttcgcttccggttttatgcccgacgcagagggcaaaagttggcttcttttcgctccttttaccgcactttgtgccgtaggcagcgttctttttgggcgcggtgtcagccacatattcttttttgtcgcggcaatagcgatgagccttgacgcgtctcttgtcttttacagaaaagagggacgccctgccgcgtctatctttcgacttttcggtatatccgcgcttgcgggtatacttgtgaccgccgcatggcttttctttacgggaggcataatatgaaaaaaagattgtttgcgttatgccttattttattgatgttccttgtttcaatatgctcttttgcggagagttcccgttgccgctgcgacagactgcttgatgaaaacgggctttgcacgaaatgcgggaaagctccgtcggaatgcgtttgcgattgttggtgcgggcgttcctcccgtgtgatacagtctgatgcgggaagtattttgatatgtgaaaaatgcggaagcagttgcgcgctttgctcctgttcggacaagcgttacgcacagcgtcgtgaatctcttgaacttgacggcaagatagttatgaacgatctgccaaaatcgggtatcattgcgcaaatagcgtgcattgttgccgttttagtctctttttctcttgttctgtggcttttctccgcccgtaaaaagagcagtacgatggaacgtgaaaaaatagaaaaaaaacaacgccgcagtcacgcaaccataatggataagatagaaacgcaggcaaaatccgccgaagcaccgaaaaagaagtcggatattgcaactgccgcggaaaaaaatattaaatggcctctttccgatgtgggaataggcattgcggcatatgaattgacaaatgctgtcgaatttcatcgttcggacgtctcgacggtgacggatatgacgctgttttctctcgggtcatatctcgacgaggaaggaactctcgaatccgcgttcaggggcgcttacggcaaaaccgttgaaaaacttgccgccgtttatatggcgacgaggtctgccgacggaagcaaaatacgcgccgcacgcccgttttttgaagaagatttctttgagaaaaacgaggcggcgatctctgcaatacttgcggaaacgggggttgaccagtcaagcgtgcaccaactgctgaaactgccgtttgacatgaccgttcgaataggcagctcggaaccgcaggttcaacgctttgcgaaagaaaaatgcgatctgtatacggcggaatcgtcttccggttcttatctgaaacagagccgctttccgcagataacggaacaggggaggaactcggtatgatatatcttatttccgacagcgaacttcgggttctgtgttccgcttccggtcttgttccgaacgttcgctctcctcttgtcgaatttctcgctgaaaaaacgcagatcgagggcagaatgcttgatgaaaacagacggggacttgtcgaactcgggctgtttgaaagaaccgagacgaatgacgagatgcgcatctccgccgaggggctgttgctttcgcgcattctcatgcgtcccgaaaatgttttgactgtcggcagaaaaaaaagcgacgacgggctttggcattgctgctgccgaaaagggatctggtatgtgtttacgcgaaacgaggaacgcaaaataaataccgtttttgcgtatttcgatacaaaaatgctgtgcaattggcttgacggacagtttacgaaaggctatcacaaaacggtctccgtcccgttcggaatagaccttgaattgacttacagcgaatggttcatgtttcttatgtctcagtttgtttatatgaagcgtgaaacggaacccaagcccgatatatggtttgaccgctcatgtttgacggaagttaatcccgcaaactatctgaaatcaaatttccgtgcgctcggtcttatgaatgcaagggacaccgtggacaaggttcttgaacagacaaatcccgaactttttgaaataacgctttcgtctcttgttaagaaaaatgttttcacgtcccgtgtcgatgaaaacggaaaagaggaattcagcctgacgaatgttgccgccgcttggcttgacaacgacctcttgatagataccctgctttttgattttaagggtaaaaaaggctcttatacaatactcttttccttccgtgcgaccggggttctcgcaaccgtcgatacgggaaagtccgttcggttcgtatcgtcaagtgaaataccttgggcggcgtatatttccgccgccgtttactaaaaaactgatttacggagttattctgcatatatgtggtttgtttacattttgctggttttgataatcctgtccgggggatatgtttttcttgtgttgcctcgaccgaagcattttcgcccgcgttcggacgtgtttgagcagacaaaatttttcgcacaccgaggactttttgataacggtgttgttgccgaaaactcattgtcggcatttaaggcggcaaagaaattcggctgcggcatagaacttgaccttcgcctgtcaaaggacggcatacccgttgttatgcatgaccgctcgctgataagaatgtgcggcgtgaacaaaaacgtcgatgacctgaacgtcgatgaattgaaaaaattgaaattgcttgacacggaagactgcattccgactcttcgagaggtgcttgaccttgttgacggtgcggtgccgcttgttatcgagatgaaagcggcgggaacggacgtttccgtttgccctcagagcgagatacttctgcggcattataacggaacgtatgccgttgaatcttttaacccgtttgcgcttcggtggtacaggatacaccgcccggagatattgcgcgggcaacttgcgacatcgttcaagaattcaaagaacgatgcaaatccgttcgttgcgtttatggcttcgaaccttcttttcaatttcctttcacgtcccgattttatcgcttttgacatacatttttcatcgtctgtgcctttaaaaatatgctcaaaatattttgccgccgtgcccgtgggctggacggctcgcaaagaaacggaactgaacgcccccaactttgaaaatttcatttttgagggctttttgccccatgcggataagtgaaccgcagaaaagatatatttatgaaagtacttgtcgcaatgagcggcggcgtcgattcgagcgtcgcggcaaaaatattgaccgattcgggacatacctgcgtgggttgtacgatgaaactgtacaacaacgaagacgcgggcattccgcaggggcatacctgttgttctcttgatgatgtcgaggacgcacgaagcgttgcaaaaaaactcggtatgccgtattttgtattcaatttttccgatgatttcaaggaaaaagttgtgaacagatttattgacgcatattcgaaaggtatgactccgaacccctgcatagactgcaaccgttttatgaagttcgataaacttttcgaacgcgcggatattcttgaatgtgactgtatcgcgacgggacactatgcaagaatagaaaaagaaaacggtaaatacgttcttaaaaaggctgttgacccgacaaaagaccaaagttatgtgctttatgccatgacgcaggcccaactcgcacggacgctttttcctctcggaggtcttcacaagactgagacaagaaaacttgcggatgaaagcggctttgtgaatgcggaaaaacctgacagtcaggatatatgctttgttcccgacggcgattatgcccgtgtaatagagcgttttacgggcaaaaagaccgaaccgggcaattttgtggatacgaaaggtaacgttctcggcaagcataacggaattatacgttatacgataggtcagcaccgttggctcgggttatccctgtccgagaaaaaatacgtttgccgcataagacccgacaagaatgagatcgtactcggcaacagcgaagaacttttcagccgtgagttttcggtcggcgatttcaactggatatcaggcgaagcaccctccgaaccattccgctgcaaggccaaagtcagataccgtcagcaggaacagcctgcgctggtgacgccatgtgcggacggtaccgtagaagttgtttttgacgagcctcagcgcgcaataactcccggtcaggcggcggttctttatgacggagaaaccgttctcggcggcggcgttatagaaccgttttcggagaattgacaatgttgacgttcaacaacacttcttacgaccctttttacaatcaggcgtttgaggaatacgttttcgatacgtttcgggaagacgacatgctgtttttgtggcgcaactctcccgcagtcgttgtcggctgttcgcagaatatatgccgagaagtcagcgttccggcgctgcgtcggtcacacattcccgtagttcgccgcatttcgggcggaggcactgtctatcacgatctcggaaacatcaattacacatatatcaaaagtgttgacggacttcccgattacggcgactgtatacgtcccgttactgaggcccttaactctctcggcatccccgcgcaccaaaacggcgtctgcgatattgcaatcgcggacaagaagatttcgggcagcgcacagcgcgtggtcaaggacagagttcttcatcacggaacgcttttgtattcttgcgatctcggagtgcttgacggtttgaccacattcggtaaaaacgactgttttaagacaaagggaactctttccgcgataagttccgttgcgaatatatcggattatattaaaaatccgatgtcagtcgaagatttccggtcggcacttgcggaaaaacttttaccgtcggattgcaaaaccgtcgaactgacggcggaacaggctgcggaagtcgaaaaactgcgggacgaaaaatataaaagtcgcgaatggacatggggaactaccccgccttttgtctatgaaaaaacaggcgtttacagggacgaacccatatatgtttcttacaaggcaaaaaagggcgttgtctcggatgccgtggtcgaaagtccatggcttgacggtgctcttgcgtcggctcttatgaacgggtcgtttctttgccccgaagtctttgaagatatttgcctaaaactctccgatgacgaaaacggagaacttttcagcctttttatgtgagttaaaaattgcaacagtaccttttgaaaggaaatacataccatggaaaaagaaatcaaaatgccgaaactgcgtcccgaaatgaaagagggagtgctttgtgcttggctcaaagaagagggcgaccgtgtaagtgtcggtgaacccgtttttgaaattgagacggacaaggtcgtcaatcaggtcgaatcgaccgaaaacggagtcatcaaaaaattgttgtttgaagacggcgacacggttgccgttgataccgccgttgcgattatcgaggtcgagtaatattttatggaaagaaaaccagaatggctcagggtgcgctataaccgcgacgcagtcaatgaagttgcggaacttatgcgcgacctgaaactcaacaccgtttgcaaagaggcgaactgtccgaatctcggagagtgttatcgcaaacatacggcaacttttatgatattgggaagcgtttgcacccgtaactgccgtttctgcaacgtcacaacggggcgtccgctgccgcccgaccccgaggaaccagaaaacgtcgcgcttgccgcaaaaaaactcggtctgcgccacgttgttctgacttgctccaccagggacgatctgcccgacggcggtgccgaacagtttgcaaagaccgttgctgcaattcgcaggctttgtccctctgccacggtggaaactcttatttcggatatgaaattcaatacggacgcactcgatgttgtcatcgcgtcgcacccagacgtgctcaatcataacgtcgaaacagtaaaatcacttcaaaaagccgtccgtccgcaggcggattatgagcgttcgctcggcgttttgcgttattgcaaacaaaaagacccgacgcttctgacaaagaccggttttatggtgggactcggcgaaacggaagacgaaatatccgagttgatggacgatattctgaaaacggggtgtgatattctgacgataggacagtatctgcaaccgtcgcccgaacattatccgcttgcccgttatgccacgcccgaagattttgctcgatataaggaaatggctctcgcaaagggctttcgccatgttgcgtctgcgccgcttgcacgcagttcataccgcgcgtgggaagtgatggaggacgtgcatgatctatattgaaacaggctccgacgacgtttattacaatttcggacttgaatattactttaccgtagaaaagcaactgcccgatacggtttttctgttttggcgcacgaccccgacgcttatggtcggaaaatatcagaacgttgccgaagaaataaacaaaccctatgccgacgaacatggtataaaactcgttcggcgtatgtcgggcggcggaacaatatatacggatctcggcggctggcagttcacgtttatctgccatggtgcggaaaaagagatagagttcagccggtttatcgagcctgtcatagacgcgcttcatgaaatgggcgtcaacgccgggtttaacggcagaaacgatttgacgatagacggaaaaaagttttcgggtaatgcgcagtaccgcctcggagaaagtctcgttcatcacggctctttgctgtttgacaccgatatcgaacagatggtcgcgtcaaccaccgttgacagttataagattatttcaaaaagcataaagtctgttcgcgacagagttacgaatatttccgagcacctgccgtccgcaatgagtcccgatgaatttaaggagtgtatggtcagacacataatgcggggaagttccgatgtatataaagtaactgccgaagacgacagatgcattcgagagatagcaaaagaaaaattcgagagttggcagagcattttcggcgtcaatcccaagttcaatatcgaacggacgggacgtttcgacggcggaaagataacattcagacttgatgtttccaaaggtgttatcaaaaatgcctccgtattcggggatttcttctcgacgctcgacgcggagacgatctgttccgctttgataggttgcagatatgaaaaaggcgatgttttgcgagcgcttctttcaaacggaatagacggcgcggtttaccgcatatctgcggaagacatggcaaaaacaatagcagactgaaaaactaaacaggtatgtaaaacgcaagtttttacatacctgtttgcattcttcacttatacggtatttaatcgaattttacaagttccacggtataacccgcttccgtcagtttgtttaccagaccgtcgtcgccgagcatgtgcgcttcgcccacaacgtagaaaacgctcttgccgtttttcagaaaaccaagcgcttttttgaccatttccgcattacggtcggtcataataaatttgttatattcttccgcacattttatttcttcttccgtatactcgctctcatccgcctccgtaaacagaatttcttccattttagtcaaatcgccttttttccacgcgtcgaaaagcttttttattgactcttcgtattcttttacatagtcgtcagtttcaaagccgtgaacatctctttccagaatgagttcctgtgttttatccgaaagcgccgcttcgtcggcgtatgtctttttgtaatcttcgagttcgattatgtctttgtttgtcttttttgccttgttcaggaaccaacggtctacgccgttgtcgattttgtagttctttgacctatccgccagcattgatgagatcatcgagtcccagaatgtcggcttgtaataatccatcgcaaagttatatatgccgagttcagtcatcagggcaactgcatcgtcgtaaagttctttgtcgatatggtctttaatggtcgttccgtccgaataaacaaacggtttcatgctttcgatgagtgccgcggtatccttttcaatttctacaatatcgctttcaaccgcaagcgcggtgcatttttcaaacgcatcgagaatctgcttcggataattgtttgtgtcgtctgttccgacgtgtatcgagccgagcagataaaattctccttcatatccgttgcctgaaactttccagaaaagcggagtggagacttctccttgcggctcttgttccgtcgtgggctgattcgttgtctgttgctgcggttccgttgtcggtgtttccgtcgttcccgtgcaggcagtcagcgaaaataccaaacagagcaacagtacgagtgaaacgattcttttcataattttgatcctttcttcctttttgcttggttttctgtccgattgcattgtaccatttcagacaggatttgtcaatccttttatgctcaaaaaaggcgcaccgtgcggcgcgcctatatttttttgaatcgtagatcagttttcaagttgttttgagaaaagtgttgctgctgtttcggttattcgtacttccgtttcagtcggcgccgccccgtcatttcttattaaaactattattccgcctatgacgtcgctgtcaactatcagcggacatactattcccgcatggcagttttccgcgccgtcggatacaggtattctggtatcgcctattttgtaaacgtaagttcttcgctcttcaagcattttttctatctcgggcgaaatttttttgtccgcaagttgtctctttttctctcccgataccgcaagtatcgaatctttgtccgaaattaccgcagtattcgccgtgcccttgttcaccgtttccgcataagcatccacgtattcgctgatttctcctatcggagaatactttttaaaaataacttctccgtctttgtttgtgaatatttcaagcggcgcaccctctcgaattcgcatcgttcttcttatttctttcggtattacaactcttccgaggtcgtctgcttgtgtcaagtagaatccaaaaatttttaaaaaatcttatgtaacaagggcttccggactttcgacaaatttttaccttgcgttattataacacaaaacagcataaaagccagcgaaaagccggcttttacgtggtcatggaagttgaaaggcaacatcaaacttccattcgattttcagattttcgttgtcaaaaacaataacacgatctatatcgtcgtacatcctgtcccggagtttgtcgtccgattcatctgccgcagcagcgatatttttgatcgctttcattgctgtattgctttcttcctgcttttgcagcaggctttcgatttcgtcctcgatttgtaacaactccgtctggagtctgtccctatcctctgaaagagcgcctttcttttcgagaaaagcattccgggatatttcatcggaacgaaattgctcatacagcgaggcaacctttccaccgatccctccgagctgaactcggagggatttctgttgcgcccgaagaggagcaagtttatccggtcgcttttcatttactgtcctgcgatattcttcgctgatgatttgcagctgccgtttatatgtggtgaagacaacatcctctatatttgtccgactccaatgaatgcctgcgcacggagcgtctcttatatataacggcgtagcgcaggaataatattcgtccgagccaaaggtcttacgaagtctgcggccacagtgcccgcaatagtagacacggtcacggcggtcggttctgacaacatcgtactttttcaccttccgcaggg

SEQ ID NO: 2151 - DNA, 32759 bp, Unknown
  16S sequences of unknown bacteria
gtcgctttcgccgtcggacacgaaactttcggtaaaccccagatagtctacgcagcgcttatttacaaaatccataaacgcgtccgaatcggtttttttcacgcccgaatagtaattggcggcaagcgaaatcatatcgcgtgtacggtattttcttaaagaagcctccgccgcggtaaataaaaatctgaaaagctcggtacccgaaaggggaattttggactgcgcgtaatagggaatttcgtattcgtcgaaaatacgctttgcggtatcgaaatctccgctttcgtccacaacgcaaacgtcgccgtatcttccgcccatatacgcgtagtagcgaatgcgttttgccgcctccttatattcgcttgccttatcgggacagcccacggcgcgcaccgaagccgaaacgcggtaatcaatgggcggcgcggcgtttattaccgtaagagacaaagaatgtttgtctaccgcgtcaaggagttttttaagctgagcggtataatcctcgtaaagcgcgacataaacgtggcaatccttaaaagcaccgtgtttttcggtttcctcgcgcagtatttccattcttccgcccgcatcgacgtattttccgcgcgttgcctcaagatatgcgcggtacaaaagcgcaaggtccgccgacttatgaagtttgcctgcgccctcaagagcgccgggtcctatgtcgcttgctcttaaagcgtttacggcttcatacagtttaaccgcaaaccccggtcgaagacaggacttagagtaacacgtcagcttatcggcgttttcaatgcagatttttttcaaaagcattacggcgccctgcttggataaagccttttttgcgccggaaaatcttaaacacagtctgttgaaagtggtaacttccacatcaaaagagccttgattctgcaaaaaaaatcgtttttcaagtgtaaaagtataattatcgggcactatgaccagatgtctgacgttaaggtcgaacttccgtttttccacaagtccgataactttttcaagcgcgtcagcgtatgatttttcggtaatttccctcatggtttaattgtaacttttttctcggcttttatcaactaaaattacaatgcggcgataaaattaaaccctattgagaaaaacgctgatataagactaaaaaatcgaaccgtccatgagatatttctggactttttcaagatttacgtcgtttaaatcggttttgtattttaccgcgtaagcggccgccgctccgcacccctcgcccatgcctgcgcaaatgggcatgaccctgaaattggaatgcgcaagatgcgtgcccgaaatgtttctgccgcaaagtaatagccctttgattttttcgggaagaaaacagcggtaagggattgtataacgtaggtttataggaaaatccttttgttttccgtttctgtcaagtcctgagcccgatacgttgtgaatgtcgaagttgaagcaagcgcctttcactatccagtcgtcgaaaatctttgcttgcgtgatatcttcgcccgtcagcgtgtattttcccctgaagtgacgtgtttcgcgtatgccgataagcgacgccgtacctaaaagataacatttgtcaaaacccggaacgtattcccgcaagaacgctataattttatctatctgtccgcggcacgttatttccgcttttacaaggtcctcgttttttgtgccgtctatgtccacggcgttagtcatgtttacggtaatcgttcccggtaatgtagtgtcgtaaagcagcacatgtcccgcgggatagggcaaaatctttttggcaagcgtttgaatttcgcctttttcggtcatgttgctgcactcgaacatatgcggcaggacggcaatcgatttatccaccccgccgactttgaacatgagcgtagccggctgcattttgccgtcttcctctcttcccgtaacaaagggcacgcccgctttagccgcgacgtcgccgtcaccgcttgcgtcgattgttacgtccgcaaaaatcgccgttcttcccgacttgttttctactactacgcctttaaccgtgcctgattcggtaatcggatcgccggcaaaagtgtaaagcataatttccacgcctgcttcgtaaagcgttttaaggtactgatatttcagtttttcggtatctattgtggcggtgattttatttttgaaagcgccttcgttcagacttgcgctttccctcagtatctcgcgataaacgttgctgtcgcaatcgcccgtccagtgactcatcatacccgcggtggaaatgccgcccagacaaccgtttttttcgacgacagtaaccttgacgcccagccttgacgcggatatagccgcgcctatccccgcgggacccgagcccacaataagcacgtccgtcttgacggcatttatctttctttccttctcggtgtaaaacattttgacccgttctccttgattttttaggtattatactatataatagtcccgtaaacattaaatatcgggaaaattatctctaatatcgggaaaagaaaatgattgaacatataaaaaattacatcggttttttaagcaaaacattaaatttttcggttacgattcactctgtcgacaaagccctgacaaacgtaatttacgatatgcctcaattcaacatacactcggattcatattgtctgtacattaaatctcatcccgaaatgtggaataaatgtatacgtaaccaaagcaaaatatacgagcgtcttaataaaaacggttgcagtatgttttacggcagctgctatgcaggtgtgggcgaatacatatatcccgtaagtcataaaaaggaaatttacggttttatcagcgtgggaagataccgcggcaacaaagaaaaaatgctgcacacggcggagaaatacctgaccggcgcgacggaaatcgaaaaaatttacctttccgcgcttaacggcgatgtgccggactttgaattcgtaaggacggttacggctccgcttgccaccatgcttttactctcgagggaagaaaaaccggccgaaaattactccgaaaccgaaaatactgtttaccgagcgctaagctatgttcaccgaaatttttgcaccgacataaaccttgaaaagacagccttattcgcgggctgctccgtgcgcactctttccgcaattttcagaaaagcggcgggtatgtcggtatgcagttatatagaaaaactgagaatggaaaaggcggaaaaactgataaaggaaacaaacgtatcggtaacggaaacggcttttttatgcggatactcggaccccaactacttttcctgcagattttcgcgctatttcgggataagcccctctattgcgagaaaaacccggtgcaacggttccgaaaaggcaaaagtcaagccttaatattgcttttaagtttatgctttaaaatagattcggtttaattaaaaaaccgatttatagccgaaaaggcgtttttatcgaactatgcctgttaatattataaaaaacgttttccgcattaaaaactcttttctttgtgtgtttaagcgcattttaatagaaaaaccaaaatttgactctctcatcgccgcctgcttaaaaaagcttgcctacggacgtaaaactatgctataatcagtaacgataatttttttaaggtaattacaatcgatgaaaaaatttttatatgtaatctttgctttaatttccgcactgtcgctttgcgcgtgttcgggtaacgtggcacctgtgtccgtggacaatcccccgccgtggagcggcgccaataccgaatcggcatacgaaaaaacggtttattcgattaaaaaaaccgataacgaaaccaacgaggttattgccgagggcagcttgacctatgtgctggaattcgaccataagggcgaaaacaacaactttaactattcgcggctgaccatggacatgagtattacttacaacgataaggctcccgaaaccgaccgcggcaaaacagatactttaaactccaaagtaatatttcagtcggacgctcttgtcccgcagtactccgaaaaaaccgtgtcgcttgcgctgagagagggcgtcgccgaccacagttacacgctgaaaaacgactactccgcgcaaaaatcggaacttacaatggcgggcaaagaaacttccgtattagatttttcaggcaaatcgtttgtcaacgtctacgacaacgaaatgctctactatacggttcgcgctttttcggacataaaagcgggcggcggcaacacgtttactttggctaactttttcgatatgcacgtcaaaaacaaattttccacttattcgatgcggtttgcatgcggcgaagaaggcagcgaacaaactgtatatctccccttcaaaggcacttatctcgacgaccagggcagcgccacggtgctgaaggtaagcgtttccataaacgaatcgctttccggcccccctaccgagctttacttttcgatgactcccttcaaaacgggcgaaaacacctccacgaaaaaagtgcttgtttcctttaaaactttcgaatacaatctttccaacagcaatcttagatatacgaccgaatataacataaccgattattccgttacgccttaagccgttgtttttgaaatgatttgtaagtaatcgagtaaaaaagcttagttacggtaaattgaaacatattttgtttttattgaaaacaagccgctattaaacgcaaaaatgcgtataaaaaaactgatatataccaaaactccttaccgcaagcaaaacacggtaaggagtttttttgtccttaagttaatttcgtaaaatctctgtctacattaacgaattatattcactgctaaaatccataagcgtactactgtttggatttacccgatttttccgataactgtttttccgaagcggcggaagcaagttttgcggtttcctctcttatagtatcaagctgaatttttataagcttttgtgcgtaaagtttagtggtaagcgccagcatcgaaagcgcaagagggtcggctgtatccgaaatatcgaggtcggtaaaaacactttcctgcagtttacagaaattgtcgtatttttccacaagctccttctcgtcccaccctataagcaacgtaatctcgctcatagacagcacttgtttaagcagacaaatcatgataagataggcaagatgcttgggcccgtaacgctttttatcaggcggaggaataatcccaagtttaacataattgtttaccatcgaaggggtgataatcggtttatcgtcgtcgcggtccagcaccttgaaatatttgtctattatacttaccacctggtccatgtaaagtcccacgtcgggaagctcgtgaaaccgcggcagatgaaacgcgcctatctcgtcgcggaaaacctcgaagtcctttaatatgtcaaagtcgttgaatttaggaatgataaagtcatccatgtttaaaattttccttatattgcgctgcaaaaattcgcatttctaccgtgattttagaatatgatagcataaacgcaaaaaaatttcaactaattattaaaagttcttgacttattattgcaaaacctttatactggttttcaataccagatgttgcaggagttaaaattatgagttttattatcgcgaccgattcttcggccaatcttaccgatgaaataatagagaaatactcgcttgaaattttgccgctgagttaccttgtagacggcaaagagtatttaggttacaccaagggcgtaaaaaccgacttaagcggattttacaaattaatgcgcgacggggcaaaaactaccaccagctgcgttaacgtggaaaccgcgaaaaactttttccggccttaccttgaaagcggactggacattctttatataggtttttcctccgctctttccgcgacttatgccaacgccgagtccgccgcccaagaattaagaacgctttatcctcaacgaaaaatctataccgtagattctttggctgcttccatgggacaggggcttattgtcacttatgccgctttggaaaaggaaaaaggcaaaaacatcgaggaagtgcgtgactttgtggaaaatatgaagcttaaactgtgccatcagtttaccgttgacgaccttatgtttttaaagcgaggcggcaggataagcggcggcaccgcactaatcggcaccattctcaagattaaacccgttttgcacgtagacaacctgggacgccttatccccaaaggaaaagtaataggccgtaaagccgccattaaagcccttttcaataaatacgtcgagaaagcttacgacaagaaaaatcagctggtttacatttctcacggcgactgtatagaggacgcgcagtatcttgccgaccttatccgcaaccaaagcgaatgtaaggacatcgtaatcaattacgtcgaccaggtaataggctctcattcgggaccgggaacgcttgctttgttcttcctgggcaacgaccgcgaagcttaatcggcaataaaagtttaaccgtaataaattttttatttcgccatccccccctttcttatcggaaaagggggatttttttctgcttgtttttggcttttaaattacatataagtttacttatctggcgcgataattttttacccaaataatacataaccttattgaaaaagttagttttaatgcgccgccgaaaaaaaacgggcgcggttgtaaatgccgctcccgttttaacgggattgattattttctgtctatctaagcagccgcttttttcaggctttacgcacccagacaagcatatcgctttcgccgcgattggcaaacgcaaaataaggtatgaacttaagacttttcttctccctatcgctgtcgcaagcaggaaaataaagtgcggactctgctttgtcgataaaaccttccaattttacggaatacaaaccgtggaaatctttttccttcttagctttttccgccgcctcgggagaaacggaaatgcggtttaatctttcgccgttatcaaccccctccagacaatagacaacgggaccgtaggttaatgcgatacgacccgcgtcggcgcgcaccttgggatttgcggcaacaaaagccgcttttatgccgaaatccagctgaagcgaaaagcttttctccgcgtcgaaataagcataaccctctttcacttcgtattttacgggcttacccatcgacgtcgcgacgagtttattgctccattccggcaatcgcaccgccagctttttgccgctgaaattttgagatgatatttcggctttaccgcttaaagcatagttttcgcggatttccaccctgcctaaagaagtattgacatcggaagaaacatattgctctatatacagcgtttcgttgcctgcaaacgcaattacgtcaccaagctctgcaaaaaacctgttgatgttgggcgggcagcaagaacacccgaaaacctcaagtctttgggtaatgggcaatctttctttgtctgtcggagacgcggacacttccctgccgtattcctcaagcgcgatttccaaaggattttcgtagaagaacgccttgcccgtaaggtcggtggacgaaagcagagaattgtacatgacgcgctcgataagatgtccgtacttgggattaaggtccattttacgcatacgcagcgcaaaaagtataaaagctatggcacagcagctttcggaataagcggtcatattgggtaaatcgtaaggtacggtaaaactttcggagcggaaagtagagcctactccgccggtcacatacattttactgtttacaatatcgtcaaaaacgcttgtaagcgccttaaaaagcttttcgtcgcccgtctcttcggcaaggtccgccaccccgctgtaaagataaagcgcgcggacgctgtgtcccaccgcctccttgagattatagatatccgtatcgtcctgactggcgtaacggttatccagataaacatattgctcgtcgtgttttccgcggttttcaagaaagaaccgcgccatttcaaaatatttttctttgcccgtataacggtaaagcttcattaaagccagctctatttcttcgtgacctggagttacgaaagccgccgtcttttccttaatgaacgcacggtaaatacaatcgcaatacttttccatgacctcgaggaacttatgcttacccgtcgccttgtcgtatgccacagccgcctctatgagatggcccgcgcaataaagctcgtgttttccgcggtttctgaatattttatcgggagtaatctgctgaaaagtggaattgagatatccgtcgtcgcgctgagcgtttgccatgcagtcaataagttcgtcaataaacttttcgttttcgcgcatggaatcgcggtctttttccataatgtaggcgaccgcctctatccacttggcgacgtccgaatcgtaaaaaatatgcggtttcctgccgtttttcagataattgaaccttaacgcgtcgaaacgggctgtttcctcaaagcggtttttgacgctttcaagcgatacgtttttgttaagcaggtatcttttaagccaaaatccgtccttcaaatccacgtcgcgaaaggaaacattttcgtattttttcatctctttctccttattttaattgactttacgcgcatattataatatatttaactcaatattatcaatgagaaaatcatacaaaaggtgaaaaaatccgacatgattacgcttgacaacaaagttaatctgacattttctaacatgggattgttcgataccgaaagtccttggacgcaccccgtgattacaatcgacagctttgagcttatttttgtcaccgagggaacggtttctctttacgaaggagaaaaaaatttcgagcttaataaaggcgaaatgatactgctttttcccggcgtggagcacggcggaaacaaggaaagccgcggtcacacatccttttactggctgcatttttacaccgactgcatttcggattttcttgttcccaaggtatgtgtgcccgaccctgtaaaaaccgaaaaaacattcaaaaaaatcatgcatacttcaaagaattcatctttgctgtgcgagctttcgcttgcagagtttcttttctctctatctgagccattcgaatacaaaaacaagcttgcctgcgaagtaaacgaatacatcagaatcaacgcgcgcaaaaaattaaccgccgccaccgtggcaagccgcttcggatacagtacggactacgtttcgcgggtatacaaaagggaattcggggtggacgtaaagacgggcataataaaacagcggctggaatacatagagtcgctgcttataaacacggattataccgtaaaagaaatcgcgcagatgagcggtttcgaggacgaaaactgctttgttaagtttttcaaatatcacgaaaacgtcacgcccacgcttttcagaaacagattcttttatgtgcacatgaacaaccgctgaatttttgcgccgaaatttacctaaataaacaaatatgcgcatatttcaatataagattttagtacaaagcctttaacctgcggcttttatttttaactgaacgcaaaataagtcggtaaaacaggaatcctcagatttatacggtcaaatcgcggcataaatcttttttctcaaaaccctctcgtcaaagtcgtcctctaaagtaagggtaagcacgttaagccctgcgcgctccgctatacagcgcactttttcgtcgcgggcgattctgtccgcacgattatggctggcgtcgttaagttccacgataagacggggttttaatgtgcggcggtcacacagcgcgaaatccacgatacggaaaagttcgttgcggtaggaaccgaaattaaccttatctataagcgaagcaagcgccacctgcggaaaaacctcgaaatccgagcctgccgcacgcaaaagacgcgcgtaaagccgtcgctcaggctcgctcatgaaactttccttgacggcgtaacggtattgctcgtttacgggctgagctttcttttccttggttaaaagcagtgatacgcccagcagaataaatactattccgcctattctcaaccaccatacggccgcgcccagattgagaaaagacaaagcgaacgccgcggcccccatacccgttattatgagaaaatttatatatttgttttttttcatgattccgtttatgtaaactaaaaaaattaaaaccctaattaggacttacatcgctcgtcggtaaaaacacgattgacttaaaactcattaaaaatcaaatcgcataattttcgccctaaaaaacaagaaattgcttcaccataggtttctgttaccctctttttccgtctctcagatgacgggagtgctagccgatacttacaccgcgcctgatttaaaatatcgtaatacgtcaaactaccctgctccgcttataaaaacaaagtccgaaagttaagttccggactttttaggttttattgttttttttcgtagcgcttggggaatattaccactcttctgttgggctccttaccctcggatttggtaacgaccttttcgtttgccgaaagcgtggagtgaatgattttgcggtgcgtgttgttcataggctcaagcaccacttttctgcccgtgcgtatgcacttggacgccattctgtttgcaagcgcgacaagcgactgctcgcgttttacgcggtagttatggctgtctacgtttacgtggacgaatttgtcgttgctttcctccaccgcgcgcttggtaagtatctgaagcgcatccagcacctcgcccctgtgaccgatgaccgcggaatcctcggtgacgagattaatatcgatattgccgtgcgaagtgtccgtttcgactttagcgtcgattttcataagcgacagcagtttttcaagataatctttggcaaccttaacctgattttcgtccaccttggcgggcttagactcgggcgccgactcctgttccacgggcttaagcggcgcgggacgagtgtcagccacaggcttcttttccttaaccgcggagtttgccggacggctttccttcttttctttgacttcgcccgaaggtttgacagcgggcttttcggttttctgaacgggtttttgcttttgcttagcttcagaaggagcggcttttacctctttcggctccttattagcgactttttcctcttttgacgccttaactacggctctttcttttgcgggctgttcgtcctcgacgaccgtaagtcttactttggcttttctgaaaaggccgccttgctgaaggatttcaacgttaacctcggcaagactgacacccagctccttaagtccggctttaatggcgtcgtctatttttttacccgtcatctccacttctttcattattttacacctcttttcggaaaaaacggctcagttatggtcgttcggatcgggacggccgtatttgtgaacttccgtttcaagtttatgttgttcttttttatcgatggcaagcaggataagattggatcccacgtttataatcagcgagaacgcgtagtttacgacgaggtaaagcgcgaaagcggatgtgtaactgagcgagaagaagccgatcatgataggcatgatgaacatcatcgctttcattgctccgctgcccatcgcctcgttaacctgaccgcttttcttttgctggcgcatggttacaagctgcatcgcaacggacataagcaccgaaagaacgggcagaataagatatccgttggcgccgttgctttcctcggcaagcaagaggcccatgacggtgggatacatcgtcttcatacgcgcgagttcgtcgtcggtaagacccgatttagacgcagaagtaccgtatttgccgatattggtgttgaactgcgattcgctgttgacctcttttttccagggaacgtcggggctccagatgttctttatccacaaaaagcttgtcttgttttcctgatagtaatcgaaaaccgctttctgtgcgtactggacgttgtaatcgataaccgagccgtcgggatttttgcgctcgtccgtgacgacgccctgctctttaagcgcggctttggatgcgtcatccataccgtcgtactctactatcgcggcgtcgtaacggttataaagctcgtaatactctttaaagttcatgtactggcttacttcgttaagcgcgcctaagagagaaaacataaccgccatggtgacgatagcgggcagacatgaagagaaataggaaaaacccgcctgcttgttaagctgcatttgtttttgcgcaagaatagtcctgtcggtgtactgcttttgcagtttttccatttgcggcttaagcctttcggtaattttctggtttttacgcgccatgtaacgctgatagatgtcaagcggtgacagcaaaagtttaaggcacagcgtgaaaaacaccactctccatccgtagttggcgataaaatcgaaaacgtgaagtatcagtagctcccacagccagttcggctgttttatagccgtttccgcggcgaagagcgttgcgctcagaaaagccatttcattgctccttttggattgtcgggtacggggtcaaaaccgccttttttccacggaacgcatctgcatattctttttacacccagccacacgcccttaacggcgccgaacttttcaatcgcttccagcatatacgccgaacagcttggataataaatacaagttggcgggaaaagcggagaaatacatttgcggtaaaacagtaccggcaaaacgaacaaccactttaatgacaatacgtcccgaaatttaatcttttttttctttttcgtcatcggattttttcaaaagtcccgaacggacgaaacacatatccattctggacttaagctgattgaaagaaagcttgtccacgcctgcggatacgataaataccgcctgacaaggcgcaagccgttttatatattccgccgcgatggcgcgcatacgtcttttaaccttgttgcggacgacggcatgacctatcttgttgctgacggaaaagccaattttgacgccggacttactttttacgaaattaagcctgacgggtttttccgcagtgcggctaccgtgcgcgtatagatacgaaaaggagccgtttttggtcagtctgtatttttttgaaagcattttttactaaaaatccgcttgttaaacgggcgcgcaataagcgcaaaaatgcccccgttgattcaggggcgattttatcttacgtttcgaaagtgcgctttgttgtccgtgagtttcacgcgccgggcaaaaacaagtttaacggtttccgcccaaaggtgcgaccgcgacgtttgctcttcccttacggcgacgacgggaaagcactctccttccgctggaagttttcattctctgacggaagccgtgtactttggctctttttctcttcttgggttgataagtccttttcattgctgtatctcctgataaattacgatgttaccgaattattatataaaaaagcaagcgtttagtcaactgttttgaagtcggttgctttgtaaatccttgcaaattttcctttaaagatatatactttaataagcctacggcatttataaagcaaaattttcggagaaaagaccatgactttacaaaatattttaagccgcttgcgtaaagcgattgacgacttttgcatgattgaaaacggagatcgcgtggcggtgggactttcgggcggaaaagattcgcttgtacttcttaaagcgctaagcgcttacaggaaattctctccccaacctttcgaactttttgccgtaaccatcgacatggggttgggaaacgtggattttgccccgcttgaacagttctgccgcgaagaaggcgttccttaccacatagaaaaaacggacataggtcccgtaatattcgacgtgagaaaggaaaaaaatccctgctcgctttgctccaaaatgcggcgcggagcgctgaacggagtgcttaaaacccttaattgcaacaaacttgcactggggcaccacgccgacgaccttgtggaaacaatgcttttgtcgctgttttacgaagggcggctttccacgtttgcgcctataagctatatggaccgctcgggcgtgacgcttatacgcccgcttatttacacggaggaaaaaaacattgccgcttatgccgcgtgccttcccgtcactaaaagcccctgccccgccaaccacgagaccaagcgcgaatatatgaaaaaccttataaaaaccattcagaaagacataccgtttgccaaagacagaatgttttccgcgataataaatcccgaaagatacaatctttgggaccgttatcccaaaaatcccgacgcgggcagaaaaaaaagtgccgctcaaaacagttccgacgaaaaatgaaagaattttacagaaaagaagttttcgccaataacgacaccgtcactgtgcagcatataaccggtgaggacgaatgtcctacgcatacgcacgacttttttgagttcgtgtacgttacaaaaggcgaaggcagacacgtcatagacggagtttcatatcccgtaaaaaaaggcagtttgctttttatcaatttcggacagacccactccatcgaaaccacgaacggcgaatactacaacattttgcttttgcccgaatacatcggcaccgagcttgcgagggaaaccgcagccgtatacgacctgttctcgctggtgctggaaaacggcgacggaaaatgctgcgttaatttttcgggaagcgaaatcgaagaaacggaatttatcgtcagaatgctttacacagagtattgcacggactcggaagagcggcgcgcggcgctaagcgacctgattcaccttttgacgattaaagctttgagaaaagtgagaaaacgcgcggaaacaaagagttgcggccaaatgggcgaaattctggactggcttaaagcgcattacgcggaaaaccccacattaagcggtgtaagcgaaaagtttttttacaacagttcttatttttccagacttttcaagcgttttacgggcgaaggctttaacgcctacgtaaacgcgcttaaaataaacgaggcgctggggcttatcgaaaacaccgatttagcggtggaagaaattgcggacaaggtgggatacggcgacgcaaaaaccttttacgcacagttcaaaaaacttacgggcgcaactcccggtgctttccgcaaaaaaagtaaaaaaaagtaatctttaagtaaaaaacgcccattgtttaataagggcgttttgttttataatttacttaggcagcggactttgggcttttttattttcggcgcgcaaacgttatttgcgtatagtcgcctataaaaaagtttaaaatttccgttatgaagaaattaaaaaaatcaggagaattttttatgaaactcaattacgaaacgttgcgcgacaagattctgggctgctggcaaggtaaaaacgcgggcggaactttaggcgcgcctttcgaggggaaaagaggaatttcggacataacgtggtatcagcaaaaagacatagaaaacaaccctcccgccaacgacgaccttgaccttcagatagcgtggctgcacgccgtggaagaatacggtcctacggtaagcgcctccgttttaggtgaatactggctgacttacgtcacgcccaactggtcggaatacggcatcggcaagtccaatatgcgccgcggatttgcccctcctctttcgggtaaagtggaaaactactacaaagacagttgcggctgctttatccgcagcgaaatctgggcttgccttgcgccgggactgcccgaaatagccactcgctacgcctgccttgacgggtgcgtagaccatgccgacgaggggctttacggcgaaatcttttttgccgccgttcagtccgccgctttcgtggaaagcgacaccgacactcttatcgatataggcttaagctacattccgaaagactgcgcggttgccgctgcgattaaccttgtccgcaaggcttacaaagaaggcagaacctggaaagaggcgtgcaaggaactgtttgcgaaaattcccggcgccttttccgcctgctggatgaaaatcaaggaccagaacccagacgagatggcgcccacccacatcggtttcgacgctcccaacaacataggcatcacgctgatcggctggctgtggggcgaaggcgaccttggcaaaagcatctgcatcgcggcaagctgcggcgaggacgcagactgctccgccgctacggtaggcgcgattgtgggcataattaacggcgagaaaaaactgcccgaaaagtggataaagcctttcggcggcatcattaaaaccatctgtctggaacccaacagcgaactgaggatacccaaaaccgtaaccgaatttacggacagaattcttgcctgcatacccaaaattctgccggtaaaaaacatagatttgatttcggacaacggcagattcgaggttataaccgccgataccatgtttgccgaccgtgacgaataccttcagaacggaagacgcgactgcgaaataagaccctttaagaccgaagaaatagtggatatgaaaggctatactcagtttttcgttttcgactttttcaaagcttccgtcgaattggagcgcgagccctatatcggagcgggcgaaacattcagtcttaaaataaagctttacgactccggcatggtaagaagccagcaatgggtaaacggcaacgtctacgtaagcgcgggattaagcgtggaaagcggcgcgcacttttccctgcccttgcacaactcttataaattcaaatcggaacataccgtcacattacgcgccgacaatcttgtgaaccccgtcaacgacgtactgatagaccttgaaatcaacggccgccacagctacggagttgcaaaaatcaaacttatttccaaataaatttccctaaactcaccaaaaccgcgccttgaaaataagacgcggtttttaatttttattctaagctttattaattttgcaatgcccgaatagtttagaattttgcagccccaaaaaggacaatttgtctgaagcttaaatttatcgttaacctatcgggctttaacgataaattacatctcaatatataatcataaactgcttaaagccgtcgtttagccacgaaataaacgcacgtttttgtcgccgaaacacttcaataatcggcaatgcccccgaaacttatattcaccttaaccgctcagccgcccgacaggagcgccgataaacgcaattttccttacgttgacgttggtagatatagcaggaatgcttaatgcgtcacgataattttgttaaacaggaaaatatcggtcttgataacccgtttgctttaacccgtaagacacagcgtttactcaagcccggcaagataatctatcgtgacgccgaaaaacgtcgcaatccgaatcagattacccaaagtcggctcgcacttgtcggtttcccacaaacttatgacggatttgcccacccctatcgcattggcaagcgcgatttgtccgatgcctttttcctggcgcaattccttcaatctttccccgaaacttgtgttcatatttatattttcccacaaaaatgggaaaataacttgacttcccattataatgggaatataataaactcggaggggttggaaatgttttgtaagtattgcggcacaaagctgaaagacgataatgccgactgtcctaaatgcggtaaaaacaatcggactgaatttaacgacgacgcaagcgattttaagtttgcattgctgggatttttggtacctattgcgggactggtactttaccttgtttggaaaaaggattttcccaaaaggtcatcctcctgcatcaaaggcacggcggcaggaactttgttgtacgttttactgcccgtaattttaatattgtctttagtctttaaatcagcatattaaacttataaagtttttcgtagttttttaattttttttgtttttaattcaatccgcattttttaccgataaattgcggatttttcttttctcagaacgatactctgttgattttcgcgcaaaaataagatataataacaaaaataggatttcataaaagagggcggtgaaaatcatggaaactcttgaggaaagaatacaaagaaagcttcataaaaaacagaccttgataaaagtcgcgcggggacaggaaaaagcggacgtcgccataaaaaacgcaagatatcttaacgtattttcttccacctgggaggagggcgacattgcggtttcgggcggactgattgcgggtataggcggaaaatacgaaggacgccgtgaaatagacgcccgcggaaggtacgttatacccgggcttattgacgcgcacattcatcttgaaagcgcaatagttgctcctcccgaatttgcgaggatagcgcttcggcacggcacgaccaccgtcgtcaccgacccgcacgaaatcgcaaacgtaatgggtgccgacggaatacgttatatgctggaagcaacggaaaacatcggacttgacgtaatgtttatgcttccctcctgcgtacctgccacccctatggacgaaaacgctatgccgctgtcttacaaggacatcgacgaattttaccgccaccccagagtcctcggccttgcggaaatgatgaattacgtaggagtaatcaacggcgacgaaggcgtgatagacaaaattctggcggcgcaaagccatcataaaaagatagacggtcatgcccccgccctgtcgggccgcgatcttgacgcttacattgcggcgggagtatattccgaccacgaatgcgacacgctggaaaaagcgctggaaaagctgaaaaaaggtcagtttatcatgatacgcgaaggcactgccgccaaaaacctgaaagctttgatgccgcttgtttcaagagagctttattcgcgctgtatgtttgccaccgacgacaaacacccctacgaccttctgaacatgggacacatcgattatatcgtgcacgaatgtcttaaagcgggctgcgacccgataataactcttaaaaccgccacgcacaatgccgcgcgctacttccttatgaacaacaagggcgcaatcgcgggcggatatgttgccgaccttgtaatacttgacgaccttgacgaattcgtaatcggcgaagtaatcaaacgcggtgaatcggtttacgtaaacggcggcgacgtcgttaaacgcgagcccgccctcagcaaacgtcttaaggaaaaggcgctttcctccatgcactgcaatcccgtaaaagcggacgactttgcttgcgggaaaaaatcggtgataggccttatccccggcgaaatcgtcaccacggattgcggacacgcggacaaaataagcgtggaaaacgacatactaaaagttgccgtcatagaacggcatcataacacggggcacataggtctgggttacatcaaaggatacggacttaaaaaaggcgcggttgccacttcggtcgctcacgactcgcacaacataattgccgtaggcacaaccgacgaagacattgcgcgcgccgttaacaaagttatttcctcgggcggcggcattttcgtgacggacggcgaaaaaatccaaggccttaccatgaaaatcgcaggcatcatgagcgaagacgatatggaaaccgttaacgaacagttggaaaacgccaaagaatttgcctattccataggcgtaagcaaaaacatagacccgtttatgacgctgtcgtttttaagcctgcccgtaatccccaaagtcaaaatcaccaccgaaggcgttttcgacgtggaaaaatggcaatataaagactgaatttatcttatttataaaaattaaagcaatgatttaatctacagtatttgatttttatatttttcaataaatttgggcgcaaaaacggtttcaaacttcagcaaaacagaaattacagacaaaatccataaatatgcgcatatgcacatttaagaaaaaaccgctgttaaagcggtttttttaagtacttcgttatattaatcttttttgtcctcttcggctttcttttcttcttcggccttgcgctgatagtagtttttgtatccgacgttctgattgtcgccctggtcccattttttaccgcccaccgctacaaatcccagcagcaaggcaacggttacgacaatggcgattatgggcataacaagtttgccgggaagagcgatttcaccgattaaggcaaacagcgccgctataagcagtcccgcgccgaaataaatatacagtttttttatcggacctgccgtagaagaaaacaggccgcgcagtataaacattacgccgaaaacgcccgcaatcatggtgatagcccagcccagcgaaaaccatccgaaagtatcctccaccagcatggacaaaagccacaacacggcggccaccactacaactaaccccagcacgaatttaaacagaaaatttttactcattataacactcctttaatattatctcagaaccacggtatgggaaaccgcggtaacctcgtccccctcggcgataactatgctgtctccgtgtttatattctcttacgaatccgccggcacggatattaaagctgtccgctccgtcggaagaagaaagcacggtatatttccccggcatgagagcaccgtttttttcggctttgaacgtcttacctttcttcaggattacgtcgctttcgttgtgcgttacgtttatttcgccgtccgaactgattttatcgctttcggtgtaacgaacgccgtcaattacgttgactttgcccgccgtttccgagtccgtcttgtctttggcttttttacgagctgcgaccagcgcaaccgcaataattccgatgacgataatgaccgcaataactataatggctatttgatagggttccatgagcattccctccttttatccgccgaacatggaatataaaaatcccaccgccgaaacaaccgccaaccccactacaactgtaataaaaattttaaggggcgaaacgggagttttacccgtaactttgccgttgaagccgttgacgaaaaagttgtaaagcttttgacgccagttgcaatggcccacgtatacgggtaaaagtatgtatttataagttatgttgttgcattcggtggaaacgttgaaagaagaaactatatcgtaagtatattggctgagtatagcggcgcgcagcttctgacggataagagtttttgcctcttcccagcaggcaacgccgtctttagtgtactgattggccgtaaaaccgcttaaaaactcctgagcgtattcgttgctgtcgttggtgttgaaaggctgaagtttgttaagcgatttctggttgatgatggtagatgcctgtataagcacgtcgtcgaaaaacatcgaataattaccgcttacgttaaagtatcttacatagcgctcctgcacggtctttccgtttacacgcttagtccggtaatagtactttcccaaaacgccgctgtaatgcgaaaatgtcgaagtatcaaaagaaaatgccggattataaacgcctttcacctcttcgggattaacgctttttttgaatttccgcggggcaaaaagctttttacgcgcccactttttaactattccgcacgcgtcgtctttgcttagcctgaaaggcacaatcgcattgggtttaatccccggaagctcatcggtttccacaatattcgttgtgccgcagaaagaacagctttttgcgaattcgtttttgtcgagaacctctttggcgccgcagttttcacatcggaaaacatgggtttcgtccgcccacgtgttgttttccttaagcaaacgctcgaaagcaagttcttcgctgtttctggactgaatctcctgtttggtgccgcaatgttcgcaataaagacagttttcgcccggcaaataaatcatattggcaccgcaagcggggcatttggtaacggacgtatcgttttcgacttccgaaaattgctcgtactccgaagaggtttcatcctcaaatgaattgattttgttttcctgttccatatcttccctaactgatttttaaaattcgtttaagcttaaaacttataacttttcgccgcattcggggcagaacttagcgcctttttttacttccgcgccgcatttaggacaaaccgaagcaagcttttgtccgcattcggggcagaacttggcgccttttttaaccgcagcgccgcatttagggcaagtttcacccattttggaaccgcattcggggcagaacttagcctttgcgcttgcctgtgcaccgcacttgggacaggtaattttttcctcgtttgtgcggtttgccacgtttgcggcggcattgtttgcaaacattcctccgaacatattgcccatgccgaatcccatgcccgcgcccatggcggcgcccgccatacccgggtttttagccgcttccttaagagcgtccgcctgcgccatagccatatacgcgtccatattgccgcgcatcatgcccaaagacgtatttttgtcaagcgcttcttcaagctccttgggcatggagaagttttcaaagacaaatttggtaagctccaatcccatggctttaaatgtaggctgcatggaatttttaaccaactcacctagttccaaaaggtttcccgccatgtcgagaatgggtattttgctttcccctatcgcgtcggaaatacctgttacaacaatgcttttaaggtaatcggtaatatcctgagttttaaaagacgaattggtgcccgaaagctcctgcaaaaacacaaacgggtcgtcgacgcggaaggaataattgccgtaaccgcgcactcttaccgcaccgtaatccttgtcgcgtattattatggggtttgccgtcccccacttcatacccgtaaactgcttggtgctgacgaaatagacgtcggagcggaaaggattttcaaaaccgtacttccaggacatgagtttggtaagcacgggaatggaatcggtgtcgagtttataaaaaccgggcagaaaaacgtccgccattttgcccttgtgcgcaaaaaccgccgcctgagaatccctgaccgtaagtacggatcccttgcttatataatcgtttttcatgtccactttgtagacgatggtatttttactgtcatcggtccattcgatgttcttcaaaagccccattattcaaacctcgctatgataattttctttattatactataaatagctttacaagtcaataacgtaaaaattagaataacattaaatatttgtttacgattgattttcaggttgattacgtaagaaaaaaatgttatattctatatagacgacactacgggagataaaaatgaattttgtaagtttaaaagaagacaaaagtatttttaaagatttcaagaaactttacaaggccgcgtttcccaaagaagagcgcgtgccgctttggcccctgaagtcaaaagcgcttacgcaaaactccgaccttatatgcgtatacgaagaaaaagaatttataggactgctttctttggtgtactacgcggacgtcgtttacgttttctatttcgcggttgacgaaaaaaagcgcggcggcggatacggcagcaggattctgcaaaaattaaaggatgaattccccgataaaaaaacaggactcaacatcgaaatcccggacggcaaaagcgcaaacaacgagcaaagaataaagcgtaaaaatttttaccttaaaaacggatttaccgagtgcgattttaccatgaaagaaaggggcgtgttgtttgaaactctgtcttcgggcggactttttacgcgggaagaattccagaatctcatgaaaaattacttcggacccagggtataccgtaaatactacgaattccccgaaaattaaatcggaataaatacgcaaaagcctatgcgttgcgactttaacgctacgttttatataaaattttacattaaagagcgtatataaaaaagtcagcttgatttaatcaaaaaccatactgacaaaataaaaatccgtccccattttgtcttagagggtacggattttttttgtttttattgatttggtttttattgacttctttttttggaatcacacgcggtctttatatctttctgcggtaatttttataccgtcgatgttaagttttgcaatgcgggcggtgcggtaatcgcgtttaccgtcgttaacgccccaatctcttccgtgataaaccgcgcaccaatctcccttataaaatatgacgctgttgtgtcccgtgccttcctcccactcgtttttgtttattacgggaagatatacgtcatccgagggatacttttgaaatctgattttcgtaaggtcgctttcgcttgtttcggcataagcgtaaccgagatagtaaaattcgctttcatagcagttgccgctgtacatgacgaaatggcggtcgccttccctgaaataaaaagcgccttcgagcgtatgccaatgctgaccttttttgaagcggtcgcgacagaaaatctcctcgtcgagagtgggtcttacgacgcttacgggattacctgacggagtgaacgggtcaagcattttatccaccacgatataggtacccgcgcgttccgcctcgtaatcgtttaccgagtaaaaaaggaatagacctttttccgtcttaacgatatgcgaatctatggaaaacggagccagaatttgtttcgggttttcaaacggtccctcggcataatccgacgtaagcacgaacatcgcctgtcggtgagcgtcgtcggtttccttttccatgcaggaaacgtacatataaaatttcccgtcaagttcaataacggacggtgcccaaaagctttttcttccctctaccgtagcgcaaatacccaaactttcccacggaccgaacaaatcgggcgcccggtaaagttccactccgtcgccgcccgtggcatatacgtaaaacttgccgccgctttcgatgatataagggtcagcctggcttttcccgggtatgtcgataagtttcattcttttctcctcataagataaaacatcgttaatttaacttgtttttattctactgccgaatcgggattttgtcaattcaattttatatatgcaaaatcggtgaaagaacagaagccgttgttgggccgctttgccctcaaagtgcataatagtataagtacgaatacaaaaaaaatgataccacgaatttggttacttaagacaaattattttgctccggcataaatcagtctttttcctcaagcaattttctcgcggcataaacacccattacggacgccatcataagtcctcttgtccatccgctggaatctcccagacaataaagattgcttttgttggttttaagatttttatccattttaactctgttactgtaaaattttatttcaggggcatataacagagtttcgtccgcggcaatccccggaacaaccgcgtcggcggctttaagaaaccctaaaattccgcacatggtacggtacggcaatgccgaagtaacgtcgccgggctcagcgtcgggtaaagtgggataaacgttggaacggtcaagctcgtttttccaggtgcgtttgccgcccaatatatcccccaaacgctgaacgactatgtgcccgtcgcccaacatattgcacagctcgcccactttccttgcgtaatctatgggtcggtcgaaagggtcgcaaaaccgatgagaacataagattgccagattcgtattcgaagatttagtgtttttaaagctgtgcccgttgaccaccgccagattgccgtcataattctcctgggcgacaaatccgccgggattctggcaaaaagtccttactttgtctttgaaaggctcgggataaccgatgagtttggattcgtaaagcacgttgtttacttcttccataacttcgtttctcacctccacgcgaacgcctatatccaccacaccgggctcgcgtgcaattccgtgtttgcggcacatactttccagccaatcggcgccttttcttcccgtagccacaaccgttttggcggaataaagcgttttttcctccgattctttacccgaaggcttaatcactgcgcctgtacaaacgtctttatcgaacaaaaggtcggtacatgtatgcgaaaagaagatttccacgcctttggaaagaagatattcctctatatcggcgtaaagactgtgcgctttttcggttccgaggtgccttatcggacagtcaacaagcttaagtcccgcgcgaatcgcgtttcttcttattccctttactttttcctggactccgactccctcaaccttggtgtccgcgccgaaactgagataaattttgtccgtgtaattcagaaggttacgcgcgacgtcgttgcctataagttccgggagatcgccgcccacttcggtcgaaagagaaagctttccgtccgaaaacgcgcctgcgcccgaaaaaccggcagttatgtgacaataaggccgacaagacatacactttccggtaaccgatttgggacagctgcgtttttcgaccctgacgccctgttccaccattgcaatcttgagatttttaccgctgtttacggcttccaacgcggtaaatatacccgcaggacctgccccgacaataagtaaatcgtacattttaaacctccgtaacataaaaaaaactgcaagtccgtgaaacccgcagcgtcaaatttttttaaacgggtttccgaacgaaaacccttatagcttcactgttacggcagtgagtagaaacgtctgaacccattatcagacatatataagcgtttgccgtcggatatattaacacattttaatgttcatgtcaaacttttatttaggattatattgatttttttacggttttaacagtggataaaacgacgaaaagactcggattttgtcatataagcgtcttttaaaacatagtaataaattgcatagattactaaataagggaagcgtatcatgaaagaaagtataaaagcaagggcacttaccgaggcggaatacatcgtaaacacaaaagcaaccgtaagggatactgcaaaaactttcgacgtaagcaaaagcaccgtacacaaggacgtttcggaacgtctgaaacacatagatatttccctctatcgtgaagtaaaaaaaattctcgatttcaatctttcggaacgtcacttgcgcggaggaaaagccacaaaggaaaaatatgcgaataaacgttaatcgtaataaaaacaaagcgccgctgaggaatagttgctttccttgcggcgttttaattataacaaaaagaacttcggactgcagaccgaagttctttgcttttttccgctttaaagtaaggcagcgtattttcaggttgccgatacttgcttacgaataaaatgttaaaatatttcttagacctgctgctcgtcgatggcgacctgagatttaactttttcaaactcctcgagaacaacttttttaagcatttctctggtttcggtgttaagcggatgaacgatgtccttatactcaccgtcgggagtctttttgctgggcatagcgataaagaagtcgtcgctgccctctaaaattttgacgtcgtgcacaacgaaacagttgtcgatggtgatggacgcaacggctttaagtttaccctcgtccttcttcacaagtcttacgcgtacttcgctaatgttcatattttacccctttttacgtagctgattttataggttatacctactggcttggttatattttacaatatttaataaactttggcaagtatttttacaaaaattttaatttttttgcgcaaaacgcataaaaatcgggcaaaaaccgatactaaacgagctatgaaatgtactaattgcggaaaagaattaagtatagacgaggcaaggcactgcactacatgcggaagcgattactgtcccgaatgtgcaaggcttttgggattttgcaactgtcttggggatattgtcccgtataactgaacaaaaatacaaatacgcccgctttgcttacggcacgtaacaaatattgcgtttcgttgccgagggcaaaacaagcgtactacgttattttttaagattgactatcaaaacgttgatgtccgcgggggtaactccgcttattcgtgccgcttgtcctatggacagcggttttattttattcagtttttcggcggcttccagtcttagtccttttattaaacggtaatctatatcggcgggaagcgaagaattttcaaggcgcttttgttccgcccgcgttttttccgcccttccgagataacccgaatatttgacttccacgaaaagctgctgaagcgccgctttgtctattccgtcgaatatatccgaaaaccttataaaaagttcgggagttatcaacggtcttttgattacagactccactgtgtaccccgtaacgggaggctgttctcccgccgcggcgaacatatcggtaagcgctttaggcggcataacctcgtttaacttttcgcgcgccgcgttaagagactttacttttttaagatacgctttccaacgtctgtcggtaactaatcccgctttacgcccgatcggagtaagtcttaaatccgcgttgtcctgtcttaaagaaaggcggaattccgcgcgtgaagtcatcatgcggtaaggctcgtccgtgcctacggtcacaaggtcgtcgataagcacgcctatataggagttgtcgcgggtaaggaccacgggagttttcccggaaagatacatggcggcgtttatgccggcgacaattccctgcgcggcagcctcctcgtatccgcttgtgccgttaatctggcctgcaaagaaaagcccctttatttttttatgcataagcgtgggaaacagctctaaaggatttatgcagtcgtactcgatggcgtaggcgtcgcgcataatttcgaggttatcaaagccctttatgctgcggtacatatcaagctgtacgaaagcgggcaaggatgtggaaagtccctgcacgtacatttcttccgttccctcgccttcgggttcaaggaagaactgatgacggcttttgtctgcaaaacgcacgattttatcctctatcgaagggcaataacgcgcgcccgtgccgtgaataagacccgaatatttgggagcaagcgacagattgtcgcgtataatttcatgagttttttcgttggtgtaccctaagtaacaacagcgtttttttgcgtgaacctttttggacaaggcggaaaaagagtaaatgtcctcctctccttcctgcacttcaagcgcggaaaaatccaccgaagagcgttttacgcgcgcgggagtacccgttttgaatcgtcttacttctattcccaaagccttaaggctgtccgaaaggtgatttgcgcggttgaagcagacggggcctttaggctcgattacgtcgcccacgataatggtggatttgagatacacgccgcacgccagcacgacgacgggcgcgtaatactccattttataaacggtccttacgcctttgacaacgtcgttttccacgataaggtcgcttgcttcgccctgtcttaaatggattttggggtgcttttccagcacggacttcatgtattcgtgatatttatacttgtccacctgggcacgaagcgaatgtaccgccgcgcctttggagcggtttaacattctcagctgagtaagcgttttgtccgccgcaacgcccatctcgccgcccaaagcgtccacctcgcgcacgagatggcctttcgccgtgccgccgatacttggattgcaggcaagataagccacgttgtccaaagttatggaaagcacaagagtttcatgccctaaacgcgcaagagcaagtcccgcctccactccggcgtgacctgcccctacgactattgcgtcataacaggatttatttgttgacatactttattttaagattaacggtttcttacgtccgcccacttgacgcttattgcggcgtcacgatcaccgaagtcgcgcattgttccgcagcgcgccagagtttccgcggaggggaacaaggtatcgatatacatatcgcgccactcctgtccgctggtctccgcgtaggaagtgtcggtggtatactcctcgtaaagctggtcgtaagcttcttttacggggcttatcgcgcctgcgtatacgctgtttttaagcgcggtttccttaaggcaaaggaatttgaggaaataattggccgcctcggtattcttggcatatttcgaaataacgaagcagtcgagataaatgtttccgccctctttgggtacgacataccacatattgcggttaccctcgtgctctactccgtcgtcgtcctcatagtcgttcatgacgtaacccgcgtcgcaggaccacatcagcgccacttccacgttggtgttgtttgccgccatgtcgaacttaaggctttcgccgccccagattgccgaataagaacgcatttcgtccagcacggaaaccgcgttgtcgacggcagcgtcggaaaagtcctcgtaaatgctctgaagctttgtttgatactcttcgccgtaagaagtaaagccgttgctgagcgaagaaagctcttcgcggttataccagattgccgcggaggtaatcgcctctctcaacgaatccttgttggcacttttctggtcgtattcgtcggtgaaaatcgcggaccagctgtctatgtgcttacccgtcttggaataatcgtacattattccgaaagtaccgtacatatagggcacggaatattccagcgtggggtcggatatctttgcgcgattgacgtattcctctttaatcacgctttccacgtcaacgatgtttttatcgactttgaccaaaaggtctttctttataagctgttctaccgcgtaatcggagggaagcaaaaggtcgtaatcggcgtggtcgcgttctaccgcagtcattatctcctccaccgcgtcgaaagtggtgggcgtgactacttccacggtcttgccggtttgctcgttgtaccaggtttcgaactcgtcgaaaattgcctcgtcgatgtattcgccgggaatgtacatcttaagctgagtactgcggtcggagcatcccgtcaaagcggcgacggggaaagcaagaaccaacgcaagcaaaagggtaagaatctttttcattgttttttctcctttataataaaaaattgtgtactgtgttgcggttaaaacggatttatcaaaaacgttttaacggtttaagattttcataactgcctgacgggcggttttgccgattaaacttaaagcaaaatttaagccgaagtatgttgctgggcggataacttcttctgtttggcgcgcttgacaatgttgaaaattatcattacggcaagcacggttacgaacagaatggtgcttaatgcgcgtatagcggggtcaaggtcgcgtcttaagcttgcgtagacataagtggaaacggtattgactccgtttgtacccttgttgaggtttgtcaccacaaagtcgtccagagaaagcgtgaacgcaagcgcgaatcccgaaatcatgccgcctataagctgaggaagaattaccgtaaacagactgcgcataggccctgcgcccaggtccagaccagcctcgtaaagattgggattaagctgattgagtctggggcttacggtaagaataacgtaaggcgtcgtgataatcgtatgcgcgattatcagccagcccactcccttctggacgggaatcatcacaacgtctcttaaaaaaatggacaggaggaaaaatccgactgcggtgactatttcggcgttgacgacggtgatttcagaaacgaaattcaccgcttttttactgcgcttcatgtagtaaagtcccaccgacgtaaaagtcccgaggaacgttgcaagcaacgcggatacgacgcctatcaccagagtgttcacggtcgcctgcataagctgcttgttggtgaacagtcttgtgtacagcgaaaaagtgaacgagccgaagccgttttcgccgccgatgtttttctccgaagaaaacgaatagagaataatcagcgctatgggcaaatatatacacgcaagcactattataaggaacagccatctcagtacgagagaaagagtttttttcattgtgcttcccctccctttgacgtgacggcaggcttgcttttgggcgcgcgcgccgtgacgaaattactgataaacattgtaagaaacacaagtataagcaatacgaacgataaagccgaccccacgccccaggtgctggtggtggtaaacaggccgttaatcttgccgccgataacgtttgtggacgcgtcgcccagcatacccgttatcgcataggcgctgaatacgggcataaacaccatcgtaattccgcttaccactccgcccatggacagcggaagcgtaactttgaaaaacgttaccgcgccgtttgcgccaaggtccgcggacgcctccttgtagcttttgtccatattggtaagtacggtataaataggcagcagcataaatggcaggaagtcgtaaaccatgccgatcatggttgccaggaatccgtaatccacgcccagcataaacaacaacgacttaag

SEQ ID NO: 2152 - DNA, 27688 bp, Unknown
  16S sequences of unknown bacteria
gagatgtgtataagagacagttttaagcccgaccgcgatctttcgccgcacaccggcagaacggagaaacttttatgttaacagcaatcgttggtatcaactggggagacgagggcaaaggccgtatggtggacctcctctcagaaaattacggtattgtcgctcgttatcaaggcggcaacaacgccggtcacaccgtgcagaaccatttgggcaagttcattctgaacctgctcccctccggaatcctccgtccggatgtcgtcaatgtcatgggtcctggcatggtcattgatctgcagcatttatgcggcgaaatcgaccggctgcgtcaggcgggcatttccattacgccgaataacctgaaaatcagcgaccgggccattatctgcctgccttatcacgtgcagcaggacggactggaggaggatcgcctgggcgacgccaagtacggttccacccgtcggggcatcgcgccagtatacggcgacaaatatctgaaaaaatgtatccgcatgggcgatctgctctatccggaagcgatgaagaaacggctgcgcggcattgtggaatggaaagatttgttgatccacgacggctacaaagccgaccacatctcctacgacgaaatcatcagctggctggaaacctatggcggccagctgaaggatcatgtctgcgatttaggcgtttatttaaccgagcaaatccaaaacgggaaaagcattatgttcgaagcgcagttgggtgcgcttcgggacatcgactttggcatctatccttttacttcctcttcttccactatctctgcctacgctcccatcggcgctggcatccctggcaaaaagctggatctgtgcatcggtattatgaaggcgtactcctcctgcgtgggagaaggccccttcacctgtgaactatttggaaaagaggcggaggctctgcgggaagcaggcggagaatacggcgccgccaccgggcggcccagacgagtcggtccttttgatgtagtcgcctcccgttacggcgttcgcatgcaaggcgcagacgagctggctctgaccaaaatggatgttctgtcctacctcgatcggattcccgtctgcaccgcttacgacgtgaacggcaccatcacccacgaatttccctttggagaccatctgaacgaggcaaagccggtaatcgagtatgttcccggctggcactgcgacatcagcagctgccgcaaaaaagaggatctgccaaaagaggcgctggactacgtagcttatctggaaaaggctgttggctgtaaaatccgttacgtatctgtcggccctgaccgcgacgcttatatcgacatgcattgatcccccacgaaagattcctttcgccggcgcttttttataaaatcgtcggcgaaatctatttgagaaggggggccactatgaaccgcatcttgttggtctgtgaaaaggaaaaaagcgcgcagacgctgcagacgcttctcaaccgctttctgcaggccgaaattgtccgggcatcccaactgcagcaggcacaggcacttctgtcccgagaggtttttcgtctggtcattatcaatctgcctttccacggagaaaatatggaggctttcgcactaactgcggcacagtccacctccagcgggattctgcttttatgtccgcaggattcggcccaatgcctgttagagcgctgcctgccacatggtatcctggtggtgtccaaacctctttcccagcctcttttcgttcagtcggtctatctggggctttccaccagtgcgcgtctctcagagcttttgcaggaaaaccgaaaactgcactccaaactggaggaactgcagctgatcagccgcgccaaagcagtgctgatcgaatatttgaaactaaccgaaccgcaagcccaccgctacattgaaaaacaggcgatggatctggggctgacccgccctcaggtggctttgaatatcctgaaaacctatgaatcataaccctttcaccgaaaggcaaacataaatcaaaatcctatggaaaggaatgaaaatgatgaccaaatacatctttgtaaccggcggcgttgtatccggtttgggcaagggcattactgcagcctctctgggccgcctgctcaaatccagagggctgaaggtcgccgcccaaaagctggatccgtatatcaatgtagatcccggcacgataagcccttaccagcacggggaggtgttcgtcacggaagacggcgctgaaaccgacttggatctgggccattatgaacggtttattgacgaaaacctcaacaaattttccaacctgaccactggcaaggtgtactggaatgtgctgaccaaagaacgtaacggcgactatctgggtgaaacggttcaggtaatcccgcatattaccaatgaaatcaaaaattttatctacgctgtgggcaaaaaggccgatgcagacgtggtcatcaccgaaatcggcggcactaccggcgatattgaaagtcagccttttctggaagcgatccgccaggtgtcgctggaaattggccgtcagaactgtctgttcatgcacgtcacgctgatcccttatatccaaagttccggcgaacacaaatccaagcctactcagcattcggtgcgggaattgcagggcttgggcattatgcccaacatcatcatcgcccgctgtaatgaaccgttggaaaatgaaatcaaacgcaaaatttccctgttttgcaacgtaccgattgactgcgtcatcgaaaaccggacgatcccggtactatatgaagcgccgctgatgctggagcaaagcggcctttcggatatcgtctgccgcgaactgaatctggactgccccgcccctgacatgagcgaatggatgcagctgctctcccgggtacgcagctgcgataaaaaggtcaaaatcgcactggttggcaaatatgtccagctgcacgacgcctatttgtcagtagccgaatccctgcgccatgcgggctacgaaaacaatgccgaaatccaaatcaaatgggtgcagtctgagctggttaccgacgaaaccgtcgaggaatatctgtccgactgtgacggtattctggttcccggcggattcggccagcggggtattgagggcaaaattatcgccgccaaatatgcccgggagcacgacgtcccctatctgggaatctgcttgggcatgcagatcgcggtaattgaatttgcacgcaacgtgctgggccttttcgaagcagactccagcgaattcaaacccgatgggccggacccggtcatcgatctgatgcccgaccaacagggcaatcttcccaaaggcggtaccatgcgcctgggtgcttatccctgtaaaatccaccctggcaccttcctggaaaaggcctacggctgcggcgaagtgcaggaacggcaccgtcaccgctatgagtttaacaaccgctaccgcgacgcgttttgccaacatggtatgatcttctccggcacctcgccggataaccggctggtagaagccgtggagctcacccgcgacacgttttacgtcggcgtacagttccatccggaattcaagtcccgccccaaccgcgcacatccgctgttcagggaattcatcaaggccgcctgccagcaaaaatagtttttctaccccggcaaatgccggggctttttatttgcagaaagtgctgccattcgccgaacagatttgtaaaaagcaataaaaattctatcctatcttttgaaaaaactggcatttttgttttttatgtgctatcctttttttaatcaatcccgtttcctgtttcagacgcaatgaaggaggctttttatggatatggcacaactgagcagcttgaccgctgttttaaaagaaaacattagcaaagtgattatgggtaaggaggaggaaatcgaaaagatcctgctgtgcttatattgtggcggacatattctgctggaggatatccccggcaccggcaagaccacactggccaaagcgctggcccgctcgctggattgcagcttcaagcggatccagtttacaccggatctgcttccgtcggagctcaccggcatcaactactacaaccaaaaggagcaggcgtttcaattccgccccggtgctatctttaccaacattctcttggcagatgaaatcaaccgcgccactccccgtacccagtccagcctgctggagtgtatggaagaacgccagtgttcagtggatggcgtgacctaccctatgacccagccgtttttggtggtcgccacccagaacccggtggaaattcaaggtactttcccgctgccggaagcacagctggatcgctttttcatgaagctttccctgggatatccagacgcccagcaggagcgggccatgctcaccgcctaccagctgcaatctcctttgaattccttggctcctgtctgtgcgggacaggatatcctagaagtacagaaacaggtggcgcaggtacgggtcagccagccggttgccgcctacatagtgtcgttggccggtgccactcgccgccatgaaaaaattcgcttgggaatcagccctcgcggcgtcattgctctgatgcgcgcctcccaggcgaaagccgctatgcaggggcgggattatgtcctgccggacgacgttaagtctgtctttttggatatatccgctcaccgcatcatctgccgggggtatcagatgggacaggcggatgacgtggcaaaagagtgtcttagcgaaattcttgtccaaacgcctgcaccggtggaacaacagtaaaaaatcaatccctcttgttaggaggaacttatggaatttgttgccattctctttatggtgattgttcttttggtatcccagttgattttgtttgccaaaaacagctttcgccattttgaatacacttgttttttcacaaaagatgaggtaatggaaggggacgaagtcggactggtagaaatcgtctccaaccgcaaatggttgcccctgccctggctgaaatcggaactttccacctctcgttggctggaatacgccggttctcaatcagaggtagtgggagatcggcggtatgttcccagttttttcacgctgaaaagctatcagaaggtttcccgcacctggaaagtccgctgtctcaagcgcggcgtttttgaaattcgccgggtggatctcgtcggttccgacttgctggggttctccagtttttcccattctgttcaggttaacgcttgcctgaccgttctgccccggccgctggaaaataacgagctggcttgtccacctcagtatctgaacggggataccgtggtacgccggcaacttttggccgatcctttttatgttgccggcgtgcgggaatacaccgggctggaacctatgaaccgaatccactggaacgccactgcccgagagggaaaactgatggtctttgaagaccagtacacttcccgcaaaaatctgtccattctgcttaacgtccagcagcgcccggggaaatccggttccatggatggggacgccgatctggaggactgtatccgtttctgcgcctatctgtttggcgcatctgcggcagaggatacccccttttgctttttttgcaatggaatcgacgctctcactcgccagcctgtccgcaccgctgaatcctggggaatatcttttgctttagaacaatcgcgtacgctggcccggttatcggtggacgacgccaaaaaaatcgacctgtttttgcaggaggacgccgcatttttgtccgcttcccaactgattttggtcagtacctatcttgatgacggcctcaaggcctttgcgcgggacagggcgcgccggggcaccgctgtatctattttcgtctgcggaagaacagtttccagtgactttgaagattattcctattctctttttacccttcgcggcagcgaaaaaaaggagggaaagacatcgtgaaatccatgctcttttttctgcgcgccgccgcattgttagacggcctgcttttgtcttatccgcttctcgccattttggaggtatcccttaccggccggctgtccgcgccattatccttgcctcgattgggaattgtcctgctgtctggtgcgctgggcgctttcatcggatggctgttggatcggatgaaaaatcctccggtacgggcaatcacacttttgctggcggcggcgccagccgctggatttactgcaggctgttggtatctgatggaaaaaaatatttttcatctggcgctggctgtcctttgcctggtgttttatgtagtcggcatgtattttgctacccatcctttcgatgagttaatcggtaccagctttttgtccctcacgatggtcgcttactttttggcggcggttatcgtctggttctgcaaggcgtatttcggcatggactgcgatccggttttgctgatcgttagttttctgatctttattctgctgtatgcgatcatcagcaatcagtccaatatcgagaggctgatgggacggcgtcattatgatctgtccatgctccccgccggcatgcgccgatacaatctgcttttgatctgcgccggatttgtgctggttgtgttgggacttttctttcaaacccccatttggtacatcgtgaaatttcttctgagagtattgacctcctttttatatattttcgtgcttttcttccgttttatcatctggcttttggcccgtccggcacaaccggacaaaccgcttccccaagtgtctacgctgcccgttttcggccaagcgcaggaagcggcttccactccttttatcaatgtccttttccaatggttggccttactgctcatcctcttgtttttattctctcttcggcggcaaatttgggtaaccatccaaaaaatagtttcggctgtctggcggctgctgaaagctctgttctccccccctgccggcaaaggaaaatccatgtccgcatcttatgaatattatgtggatacggtagaagagctggaacatagcccgggcgaagtgcctgcggcagcggaaaggctgccttctctgcgcatctggcagcggcgttgccgcacgtttttggaaaacccaccagacaacacctttctgccggagggatacgggatgattctcacctggctgcgtatccatggagcgcccctcactccggcggacactacgctggaaattctcaataagtcgctgacccgtatgccccagagtcccttttcccgcgtgaccgaaacttataacactgtttattacggagaatcgcctctgcgggacgatgactgcgaaagtctaatccagacactaaaaattttagtgaagtcaaaataaaacaccggttaaaaagggaagaaaaggctgattttttgtgcaaaaattcgcaaaaaacaggttttttgccccccttttacatttggactgacaagtgatgacctcatcaattttactatgtgttgattgaagcggaaaagatgggaaagtaaatgtagagatgaactggagatgggagataaaaagtgagagaatgtattagatgtggaagtgaaatgaaagaaaattgtggaattaaaatggaaggtacaggatatggaatcgttatgtcatctgataaaagcaaactttttgcaggtagaataggaaggcctaaagttgcaatttgtccaaaatacggagaaatttctatttatattgtggacgtagcaaaaattaaataaatcaggaatttatcctgcttgctatctgtgaataatctcctttcgttacttggacgaaaggagattattcacagcctgaatcagtccaaggtaaaagggagtttttttgaggattttttcgccttttggataccattttacacgcggttttgacttttgacagggaaagatttataataaatttacgcaaaaattgttttttacgtaaaggaagcatatgataaaagttaaaattaccgatgtggcaaaggccagcggcgtttccattgccacagtttctcatgttatcaatcacacccgctacgtatcccctgaaacgacccataaagtagaacaggctatccaagcattgggatattcgccagatatcactgcccgcaactttaaaaaaggccggaagggcctggtaggcatgctggtgccagatctgtcttacagccggtcttctttgattctaaaacagctggaagaggtgctggctcctgccaaagtacatctgattgtctccaataccaaagcatctgcgcaacgggaggcggagcagttaaaacttttggcctccgggctggtagatgggctggtggtccaatcttcctgtgccgattaccaacagattgccccttgcattccacgggattttcctatggtttttattgaccatccgctaaagaactgtccgtatcctactttggtcgtatccagctatacagcactgtaccaaggagtagaggatttaatccggcagggacacacccaaattggctacattgcagatcaaattcacatcgcttattccatcgaacggctggacgcctatcgtgctgctgtacgggactaccatctccccattggggattctctgattgcttatgctcatcctcaaaccaaaaccgcttatttctgtgcccaggatctgatgagaaaaaaatgcacggcgattgtggtctccaacaacagtattgcgctggaaaccttaaaatatctgaatatccatcatttacaggtgggaactgacgtagagcttctgggtttttccggcagtgactggtatggctatcgcactgaaaaaattgcgcaggtctcccaacccaccgaagaaatggcgagaatggctggccagcagctgctggaacaaatacaacggcccaaagcctgcgcacgcaccactgttctgcacagcacctatatccccaaaaaacagataaaggagttttcacatgtttgatatcattgccgccggtgaaattttgattgacctggttgatactgggaatctgcagttttccggtaccgtaggaggcgccccctgcaacgctttggcacaggccgccaaactcggcagccggaccgcttttattggtatggtcggtgacgacgcctttggccgcgtttgtgccagccagttggataagctggggattgaccgcacccatctggctgttaccagccgggcagacaccacactggcttttgtcacgctggccgaaaacggcgaccgggactttacattttaccgccggccgggagcggataccctgctcaccgtaaaaaatatgccctttagccaaattgcccaaagccgggtctatctgtttggcggcgttgccctatcacgagatccgacccgcgcggccgttttttactcactattcaagctggccggcactccggtacttcgggcttttgacccgaatctgcgcccctgtttatgggaggatatggaggaagccaaggcgcttggccgaaaggctatggggctttgtgatattctgaagctgtcagacgaggaagcaatctttttctccggctgccaaaatccgctggatggtgcgcggacactacaggaagaatttaaaattcctctggttttaatgagcatgggtgccaaagggtgttccgttttgttgcgcggcgactgctgccacctcgatgctataccggtttccgcagtggacaccactgcggcgggcgactctttcttcggcgcgttccttcaccggttattgcaagattcgttttcctcgctggacgaactttcccccgggcagattgtcgaggctgctcaattcgccactgctgccgcatccatcaccgtttcccgcaagggctccattcctgcgttgcccagcttggacgaagtgaccgccattttaaactaaaagttttgctctttctttatcggttccatatacgatcaaaagcttccgcctgtgcgtcatgcaggcggaagctttttcagaatacgtcggaagttgtgactaccgttacatccgggtgcaactgcaataccgaagccggtatccatggcgtgaccggtccggtcagcgcctgccggagaatttccccttttccctctccggccagcaagaggattttttcgcctgcaaaatcgaagcaattcccatggtaatcgcctgtttaggtacctgtccgacattggcaaaaaatctggcatttgcccggatcgtttcctgagaaagctgcaccaaatgtgtttgcgggacaaattgttccgatggctcgttaaaaccaatatgcccattatgtccaatgcccaacagccgcaggtcgatggggccgtgttcggcaatgacagcctcatatcgctcgcactcgcccggcaggtcttttgcacagccgtccggaagccaggaagcgcgaaaattcacagcgttgaacaggttttgcttcataaaacaatggtagctctgctcatggaaagcatccaatccacaatattcgtccaaattaacggatcgggcctgggcaaaatccaaatcgccggaagcataccaccgagccagataccggtaagcaccaaccggggaagaaccagtagccaaccctaaaaggctgtccggcttatacaaaacctgcgcaccaatcagctgtgctgctttacgactgagcgtttcataatccggcgcataaatgattttcatagctatttctccccttctcaaacaaaagggttccttcttttcagaaggaaccctttggagaaccacacataaactggcaattttgtgcagttaattgttccaataatcatccagcagagcctgcaccttctgattggcttctgccagcgccgttttgttgtcaacgccctccagaatcaccttatcgatcgcatctaccaaaatctggcggtcgtcgctctcgctgacgtagaagtaagaagttgcataaggcagtgcatcaatgaaaggtttcatgatgggatcttttgtcaactcttcatcttctgtgatagaaacgcgggcgccaacctcgccaacctcttcggtccagcgcttcatcacgtcttcgctggtcaagaattgaagaaacttcacgctggcatccagctgggcaccagtggtattcgcggtgataccattggtccagaaagtaccgcaggaaccttttacgccgtctttcatcggcagcggaacaacgccccattcaaagctgtcaatctggtttttataggtacccacacgataggatccatcaatgtggaaatacgctttgcccgccgcaaacgcatccgcgtccgcattcataaatttgtctactcctactttatatttggtattcagatcgataaaatagtcgaatgccgcctgacattcgggggaatcctactgtgctgttttgtagtcgtcgcttaaaggcttaccaccgaactgattcatcaagaccggacgcagccaagaatggtactgaccggtaggttgccaggtacagccctctaccagaatttcttcgccatcccactgggccaggcttcctgctacttctgcgaatttctccagctcggtgggaatatccgcttcggtcatattggcttcttttagcaggtccttgttgtaaaacagagcggaggtacggactgccgtaggaatcgtataatatttaccctcaattttgttggtctggatcatgggagaaaattccttatccatttcagccgggtcaaatacatcggtaggcaactcctgcaatacgccggatttcacatatttggaaacccaaccgtagaaaatattgataatattgggtcctttaccggtcgcaatcgctgccgccagtttttgctcgtaattgtcataagggaaattctgatggacaactttgatgccgggattttccgcttcaaactctttgatcagttcgtcgatcagattgactttggactcatagaaatactgccaatacactaatccaggatatccttcataaaccgtgacaggttgatcgccatcgtcatcataaccgaagcaaactgggtcatatggtcgctagctgcgatagaatcgtaagagttttcacaaagggaagaaaagcccagcaactcgcaaacccgttcacgggaaataggaaagccggtagtcgtaattgcagccgccccaaaggggctcatgtttactgttttttctgccgccatcagtcgctggaaatcccgctgcatgacatctgccatagacaataaataatgccccagagtggacggctgtgccggctgcgtgtgagtatacatcggcataactgtctccagattctctcctgccagatacaacagtgattctcggaagagattgagtttttccgccaatcttaccagctgctcacgcaataccatccgaaactcacctacgcaaatatcattgcggctgcgggccgtatgcacttttccggcaagatcggagccgatccggttctccagctctttttcaaacaggaaaaacaaatcctcatatgccggattgtgttcggattcttcaatcggcagtttttccagatccaacatggtggacaaaatcagcgcacattcatcctctgtcatcagatcttgttctcgaagcatgaccacatgcgctttcgtcacctcaataaatacacggtaataatatactttttgcaggtcgaaaatcggtttcagcgcgtttttttgaaagctgattccaggaaaggacattccgtccgccgcctgcacactttcacgggtaatcatatgaaacacacctctttctcctgttcaatgccgcggcaaaaactgcatctgatgtttcttttgccagatatttcccacacacccgtaacgcagggcccgatcccccaatttagaaaacttgacgtcacagggaacgggggttaaataccgcaagcgctcccgcatgtaatccgccagcagaggctctgccgccgcatagctgccgtgcagaataattgcctgcggatttaaaaggctgatgacactgcccaagccaagacaaatttgatcagcattttcaaatatccggtttttcagctcctgattgccagcctgcgcctcagacacaatctgatgaaaaggcatgctggtctgcgttttcaaagtccgcaaagaagctgttttttcgaaatacccgaaatccgtgagcgtataaggtccgttttccaacgcatcccgtccggtaatcatgtagccgatttctccagccatactgcaatggccacgatagatccggttattgataataatggcagaaccgataccggtgccgatggtaacaacaacgaaatcagaataatcccatccggcccccatccaattttcacccagcgcattgaggtacacatctttatcgatataaaccggcatttgcagttctttttgcagaactgccgccaaatcacagtctaccaagcccaattccggagaataaaggacacggttgttctccactgttcccggtatcgacagacccgccccgacaaaacgctcgcggccaccggcctgctcgatcagctgcgccgtatcggcggacagcgtttgaaaaagccgcggcattccgtcaaaagaaaagtccgcataagaacgggaaaatagttcctttcccatcagattacaaactgatatccatgcattttgcagacggaaagcagctgtaagcaccaatcctgcttcctcacagattcgcagaaaaatgggacgccggccaccacgggcggaggcctctccaaaggcaccttctaccaccagcccgctgctgatgagttcgtcaacaatgttagttactgccgcaggagaaatttccaaaagctctgatacctgctttcgggacaccggctgtctggccatgataaccgacagaatatcgctgcggttattttgttttacggagctgtttttcaaaatttttcatccttttctttggacgctatttcatatagcggcccaataccctctcaatattcccagcaaagattttctggatatcttcatcgctgaagcccagctccacacaatcgcgcatctgtacatccagatattcgctgacaaagcctcttgggaaccaggaaccgtctgtaccgaataaaattcgatctgggccgatggtttcataatatttttggaacaggtcttttgttgtcagcgggtagggcatccagcgggtccactgattgctgccggaggtatcaatatataatgttggggcatacccagcatagaaacagggtatcttccaccttactgcacccataatggggaacaataaaaatgacgtccggaaacgctttcgccacattttgaatgattttaggagacatattgacatgatccataatgcctccggctgcgcccataataccaaaatggaacaaaaccggaacctgatgcttttctgcgacctgccacagcggataaagagatttgccatctaacggccgatccggcgcagggcccaaaattttaataccgcgcagcccttgttgggaaatcgcatattctaatttttccgctgcatccggggcaaaagggttatgatgtgcgtatccgataaaacggtccggcgcaaactgaacaatgcgtgccatgttctcattactttgcgccagtccgcctgcggttacaaatacagccttctccacacctttggcatccagatcatccagccagagctggcaggtttcttctatggtatcgcattcgggaagccccaggcctttttccactgatcctgctggaatttgttcatctgctggagctttttccacttttctataccaaactcatcaatatattcctggcagttctttcccaagttttcatttttcaccgcaaaatgcaggtgagagtcaatgacacggaattttctggccataacaatccttcctttcaactagattacaaaaaaactcaaccttttacgccggtcagctgcacgccttcaatgatctttttctggaagatcaggaaaatgatgatgatggggatagttgccaccgacgcaccggtcatgatcagttcccattgactggcattctccgcagaaaattgtgccagacccagcgtaatggtatatttttctttgctgtccaatgcgataaccggccacaaaaaggaattccagttccccaaaaaggtaaaaatgcccaaggcgctgagcgccggggtgaccaatggcagggcaattcgggtatatactccaaattcgctcaatccgtcaatccggcctgcatccaaaagctcatcgggaacgccggtgaaaaactgccgcatcaggaaaatgccaaaagctgaactcagtccgggaaatagcatggaccaatatgtattgttccatcctaactgattgaccatcatataccaggaaataatcatcatttccgttggaatcatcatggtggaaagaagcatggtgaaaatggcttcttttccgcggaaatggtatttgcagaaagcatatcccagaagagggtcaaaaaccaaaaccgaaagggtcgtaattcccgctaccagaaagctgtttaaaaaccatctgggaaaatccgatccagcaagcacttcgcgataattatccaatgtgaatttttcggaagtaagctcagcgaataaatatccgttcctgttttgaaaaaggtagcaatcatccagataaaagggaacaccattacaacgccgatgacgacaaacgccagatataaaagcgtcattctcacatttttctttaaccgcatggaaccccccttttaaactgtttccttattcaaaactttcatttggactaaggtaataatcataatgacaataaacaaaatgacagtgatcgcgctggccaaccccattttgtactggcggaacgccgtatggtaaatctccgtcacaatgctggccgtggacttcagcgggccgccttccgcaccggcgatgttgtaaacctgtgtgaacacctgcagggtgcgaatcgtacccataacggtaacatagactaaagtgggatttaactggcggatcgtgatataacgaaatttctcccatccggatgccccgtctatttccgctgcttcataataggtgcggggaatctgcatcagaccggccagaaggataatggtgttaaaaccaatactcgaccagatgacattggacattactacaaaaatcgattggtctgcactgtttaaaaacggctgcggggcgatgccaaaaaactttaagatcccgttaatgacgccgccatttttcataaacatccattcccaaacataagaaattgctacggcactggtcacatacggaataaatacaatcagccggaagaacgaccgcccttttacaatttgattaagcatcaaagccagaaccagactgattatcaccatcagcggaacacagacaaatacatatgcaaacgtgttgccaaatactttttgcagggtcggatcagaaacagccgttatgtagttttcaaacccgatgaactctctctcagacgaaaggagatcccactccataaaactcaaaaagaaagagaaaaaggttggcagaattcggaaagccacaaagtacagcaccggcaacgcgataaacagataggccgtacgttctttctttcgctcgatagagttccgatttttctttttttgcaccttggcgccctttaccagcaccgcatttgcctgtgccataacaaatcccctttccaatctaaaaatcaaaggttagttattttttaacataaaccaacttgttctgaaaaaatacgccttgttgcatttgttgttatagtaaaattattgcacaagtaaattgatttttatattaaatttcattttcactctttgtttattatgcctattttatcccacacctctgtaattttttgcgttttctttgaatatcgcacaatggtcattaaattttatataaaaaagcagggggaaaattccccctgcttttttgcccgaaaactattctgccatagattccttcgaggagtcctcatcaggatgggactctccgcagcaatgatcctcttcacaactgccgcaatagcaaccgctgtcatcgaattcatagcccaaatccgccagaaaatcctcccggatctcttttgcggcctttttgctcttcaggtatgcgcaaacggctacgatagcaccgctaatcgccaccaatgcaaacaggaacgataaaaagttattgccttttttcacggatcgtttcctccttccggtcagtcctgatcgataccgggccaaaccccccggcttttctttagtatataccaattcccctaaaataacaatctatttcgtcaaaagagatttgccgtccatttctgccggctggggcaggcccagcatttccagcatggtaggcgccaaatctgccaaacggcctccttctttgagcgtatgggtcccatctcctactagcagcaacggaacaggattggtggtatgggcggtaaacggagaaccatccggctcatacatttgatccgcatttccgtggtccgctgtaatcagtgcccggccccccatagacaaaatcttatccaccactttgcccaggcaggtatccaccgcttctaccgcagaaaccgccgcttcaaacacgccggtatggccgaccatgtcgcagttggcaaagtttaaaataaccacatcatatttgccgctgtccagacgggtcagcagctcatcggtaacttcataggcgctcatttccggtttcaggtcgtaagtagccaccttgggagaagcaatcagcgcccgatcctcgtttttacagggagcctctactccgccgttgaagaaaaaggttacatgggcatacttttccgtttcggcgatccgcagttgagtcaggccatgatccgaaatatactggccaaaggtatttgccaaagactggggtttgaatgccacatggacattgggcatcgccgcatcgtattgggtcatgcagacaaagtacagtgggaaaaagccatttcggcgctcaaaaccggcaaaatccggatcaaccagcgtacgggtgatctcccgggcacgatcaggccggaagttgaagaaaataaccgaatcgttttcgcgaatgcaaccgtctttatcacagacaaccggcactacaaattcatcagtcacgtctgccgcataggatttttccatggcgcagaccgggcactcggcagtttcgccttctccgtataccatcgcggcataggctttctccacccgctcccagcggttgtcgcggtccatggcgtaatagcggcccatgaccgacgcgattttgccaacgccgatctctttcatttttgccatcagttcttctacgtattccttgccggaagaaggaggcacatcacggccatccataaagcagtggacatacaccttttccagtccggcccgtttggccagttccagcaggccgtacaggtgcttattgtgagaatggacgccgccatcagatagaaggcccatcaaatgcagggcactgccgttctttttgcagttttcaacggcaccgcacagtgcttcattctggaaaaagtctccatctgaaatagacttggtaatgcgggtcaattcctgatacaccacccggccggcgccgatattggtatgccccacctctgagttgcccatctgtccatccggcaggccgacatccatgccggaagcgccgatgagggtatgggggcaggtttcaaacaatttatccaaattgggggttttggcggcgtgaattgcattgccgtaatccgacgggttattgccaaatccgtccaaaataatcaatgccaaaggttttttcatatggattcccctttctatgatgcgggatggttatttggaagcagcctttacgataatagagaaatcctctgctttcaaagatgcaccgccgataaggccgccgtccacatgctctttgcacagcagctcttctgcgtttttcgcgttcatggagccgccgtactgaatcgtcattgcttcggcaacatctttgccgtaaaggcccgctaccacactgcgaataaagccgttgacttcgtcggcctgatcagcggtagcggttttgccggtgccgatcgcccataccggctcgtaagcgatgatgatgcgggacagttcctctttggaaacgccgcccagcgccacttttgtctgcatggcacaaatttcctcagtgatgccttgctcccgctgctctaacagttcgccaacgcagaggattactttcaatccggcatccagcgcggcgcgaacccgctggttaacggttttgtccgtctcaccgaagtactgacggcgctccgagtgaccgatgaccacatattctactcccatttccgccagcatgtctgccgaaatctcaccggtaaaagcgccggattttgcccagtggcagttttccgcacctactttgatgctggagcctctggttgcctccagcgcggtttccagattggtataaggcacacaaatcacaacgccgcagtctgcgtctttgaccagaggcttaagctcttcaatcaaagcttttgcctccggacgggttttattcatcttccagttgccggcgataatcgcctgcctttttgctttgttcatgatgctttctcctttgatttattgtaatttatgaaaaaattttttctttctattttttcaggaaaagcaacaatggacacggtattttccgtgcccatcatctcttcgcttatgcgcaggaaaagaacagccttttcggttgcggtttggacttatttatcgtttacgcaaacgatgccgggcagctctttcccttccaaaaattccagagaagcgccaccgccggtagaaatatgggtcatcttatcaccgaatcccagcgtattgaccgcagcagcagagtcgccgccgccgatgatcgtgatcgcatcggtctcagccagggatttggcaactgcgatggtgccttttgccagcgtcgggttctcaaacacacccatcggtccgttccaaacaacggtcttggcggatttcacttcatttgcaaacagctcagcggttttcggtccgatatccagacccatttcgtccgccggaatcttatccgcatccacagcagtcacttcaatctcgccgtcgatcgggtccgggaaagctttggctactacgcagtccaccggaagcagaatcttaacgcctttttcttctgctttcttgagcatgtccttacagtaaccaatcttctcttcatccagcaaagaggtacctacgccatagcctttcgcagccaggaaagtataagccatgccgccgccgatgatcagagtatccgccttgttaagcaggttttcgattacattgagcttgtccgcaacctttgcgccgcccaagatggtaacgaaaggtctggcaggatcttcaactgcattgcccagatatttgagttctttgcccatcagatagccaactgccgcttcttttacaaaagaggctacgcctacggtagagcagtgcgcacggtgggccgcgccgaaagcgtcgtttacaaatacttcgccgtcgaccagagccgccagctcgcggctgaactcttcgccgtttttggtctcttctttgcggtaacgggtgttctgcagcaaaactacgtcgccgtctttcatcgccgcaaccgctgctttcgcgttggcgccgacaacttcgtcatctgccgcgaatacaacctctttgcccagcagttcacttaaacgctttgcaacgggtgccaaagacagttccggtttcggctcgcccttcggtttgcccagatgagagcacagaaccactttgccgccgtccgcaatcagtttcttgatggtcggcagagccgccacaatgcggttttcatcagtgatgacgccgtttttcagcggtacgttgaagtcacagcgaaccaatactttttttccggcgacgttcagatcgtcaaccgtttttttgtccagatagcccatagttctaccaccctttcataatatgtaaaaaagttgcaccaaaattacgattgttaatccatgaacaatccgtatttattctatcggaaatgccacgcttttgcaagagttaaagatacaaaatttaataacaaatggtaaattttttctactctttttaaagccccagctcttgttccaaaatatcgcaggctttttccataaaaatggcacaggggcgctttccctgctctttggtacgggatagatcatattttccctgtccaatattttccagcagcgtccggcattgggacgaaccaaactccgcttcaaaacagccgtttagtttttttacgatatccttcagttcgttttttttcttggcatccgatccgtcaaaggagccataagccaaacctgcaaccataatcatggccgtgacggcaccgcacttctctcccaggcacatcccaccgccaaatccgccggccaacggcaaaagactttcgggcgaaaatccgaaatcctcgcaaaatgcgctcagcacaacctgacagcaattatttttcttttccagctggtcgtcaatctttttctgtctttccgccctcatcccaagtcctccttattttctgcgctctcccattaccatacagcccgctagattgggacctgcattgatggtaatagatgcccccgcttccacaaggcaaaccgcatgtttgccaaaagacttcaccaatattttttccaattcttcccccactttgtctcggccagcccgaatggcaaaaaacggtgtatgttcgccacggcgccgcttttgggcaatctgagccagtttggggaccaccgctttgtccccccgaaccttttcaattattttaatctctccgtcaataatggacataatcggccgcagacccaacatatcgcctacaaaagcggcggctacgctgattcggccggactttttcgcaaaatccagattataaacagaaaaataggtctccgcccgactgaaataatcgtccagatacgccaagatctcctcataggaacgtccttcttccgcctgctttgccgcctgcactactgcatagccataagtatacgtatagcaaagtgagtcaatcaccgtaatctgagttttttgggccagttccggatattcctctgcaaacagatctctgcccatattcgccgcagcaaacatgttggatcccttggaattgatggttacattgatgattttgcggtacccgtcttccgccgcatgccggtacacctctgcataacgggtatgaggaatatggcttgtcacaggaatccgggccgcatcggttaaaagcttataaaattcccgattggtgaaatccacccgctcatgataatcctttccgtcgatggcaatagggatcggcagcacctcaatcccatatgccctcgcctcttcctccggaatatcactggcagaatcggtgataaatttgattttttccatggataatcgtcctccatatgtcattcgtggccgtctgtttcctccggccaggtgtaacaggacagctgcccctgattttccagttccggaaagccccactgccgcagcgtctcatacacgcttaccgcaactgtattggacaaattcaggctgcgcagcccgcctttcatgggcagcctcaggcacgcatccggatgctgcagcagcagttcttccggcaggcccttgtcctcccgaccaaaaaccagatacgcattgtctgcataaacttcttcgctgtaattatgacgccctttggtggtaaaataataaaaagggccctgatttttggaaaaaaagtctttcaatccgtcataatagctgatatccagatagtgccagtaatccagacctgcccgcttgagctttttgtcatctactgaaaaccccaaggggccaaccaagtgcagccgcgcaccggtagcggcgcaggtcctggcaatattccccgtattctgcgggatctgcggttcaaccaggacgatatttaaaacagccaaaaagggcgcccccctattgcaattctcaaaataccttatattacattaaactataaaagctctgtttaatcaagtgttttctaaaaaattgcaatcaaagcgctcatcatagaaacgaggaagatatgcatacgactgcaaaaaataaacccgccggactctgcacagcgggttttcggcactatttcatcatgtaggacacgttgccggctagatcttccataactttcatcgcttttccggcgctgcgtttgagtttctttaccgtgcggcgttttttgccggaaaacagatatacggcggtaccggcggccagcgctacggcggctcctgccgctagggaattcatacctttgctcataggggattcctcctttatcgattttactagcagtattccccggcagccgccgaacatgcgcggcagcgaattggaagagaaatcctttcttctgtggcatacttgcatttaagcggctaaaaaaatcacacctgcggaaaattttccgggtttgatttccattttttattttttgcagatttccggtgatcccaattgatctaaaaggggcatgacatccaaaagtgtgtctaccttgttggatgcgatcgccaaaagctcttctgttgcggggatcatgtcagggatcatgaccgtatacatccctgctgcaataccagaacggattccattgggcgaatcttccaacgccatgcactcctgcggtgccacacccaagagctctgccgcccgcaggtagatatccggcgccggtttactgcgggaaatcatatcgccgcaaaccaccgcgtcaaaacggccctgtacgcctgtcacatcaaaattatgcattactttttcataattggtagaggttgccactgcgattttgtacccatgttctttcagataatccagtagctcaataagaccggttttcagcgggacatcgtcctgttgacctctgtccttacgatactggcgggtttttccccaaaactcctccgacgtcatcatatgcccgtagcgctgggcaaaatttaccgctatgctggcgccggtagctcccaggcactccacgctgaacgtttcaatatccggcatgcccaactgcttgccaacggccagcattgcctcctggccctgccgctccgtatcgaacataataccatccatatcaaacacaaccgcttttatcatttgacttctcctctccgtctctttcccgatggggatgctcccttaccggcagaatcagccctgtacgccttttttcagtctgggacgattggcattttgtatcctgttacggacattataacatgttctatataagtgaagcaacttttatttgccaaatttcccagcaagggctatactggttttaatgaaaaaaaggacggttgtttttatggatatgcaaaataaacgtgtggcagccatccacgacctgtccggcgtggggcgctgctctttgacagtcattatgcccattctgtccgctatgggagtacaggcctgtccggtacctaccgccattctttccacccataccggcggatttggagaagttgcctttcaggatctgaccgattatttgccccaagcacttagccattatcagcggctgaatctggacttttcctgcgtttattctggctttttaggctccgaagcgcagattgaccactgtctggctttcttccaggcctaccccgatgcattggccgtagtcgacccggtaatgggagatcatggcagggcttatcgcaccgttacagaaggaatgcagcgaagaatgatagagttggtggggattgcagatatcattacccccaacctgaccgaagcctgcatccttctcggagaaccttataatcctatgcccttgactcgtgcccaagccaaaagcatgctggccaggctcagcgaaaaggggccaaaaaagatcgtcattaccggcgtttcactggcagagggaaacatggccaatatcggctacgaccagcagcacaattattactggtgtgtcccctgtgactatgtaccggtctcctatcccggtaccggtgatattttcgccgctgtcctgactgcctctttcctgatcggggacagtttgcccatcgccatgagccgtgcgtcccggttcgtggaaatcgccatcaaaaccaccttttcttatgggggagacacccgtttcggcgtaatgctggaatcggctatgccgtttttgatgcaaagagaagtcccgcagaattttcatctgctgtaaagacggctcggcaaagataaaaaaggggaacggctaataccgttccccttttttatctttgccgcaagaatttatttcttctgtgtttcctcccaaggcattttctcctgctcagcagggaaagatggcggcaccggcggctgatcattctgccgtatcggcccttgatagggcgcctgacccggatactgtccgtaaggcataccggcagttttggattttgtcacaaaaatcagcaccgtaaacagaacacacataggaactgccaaaatcagtcccaaaaggaggccgccgcccaagcaggcaaaaaatccgccgatagccaggccaatccttttttttaccagcccgcagatcaggggcaccaagcccagaaacccgcccacaatcaaagacccgatcagggcggcaatcaaatcaatcatatcgtaacggtaagacatctttattcctcctcttccccttgcaggtaaacccgcggtacccgttttccaatcaggcacatcacttcataatgaatgctcttttcatcctgagccaaatcctcaatgggaaccgagcaatccccatcccggccaaaaacggtgacctgatcacccggacggacagacggaatatctgtcacatccagcatcagctgatccatacaaaccgtccccaccactggggccagcttgccatgtaccgccatatgggcctgattggaatgtgtgcggcggtatccgtcggcataaccgatgggaaccgtagccagaaccctaccattagacgctgtataggtcctcccatagctcacctgggcgccctgtcccacctgctttaccatggcgacagtggattttaaatccatggcaggaacaagatccatcagcccggcgcagtctggcgtaggattcaggccgtacaaaatcacaccggggcgcaccatatccagatgcatttggggaaaacgcatggtagcggcgctgttgcagcaatgatgcagcgaaaaacggacgccccttttttccagttccgccacccctttttgataacggctaaactgttccagcgtaaaccggtcggaatcctcattggcctcgtcagcacaggcaaaatgggtaaaaataccggtacaggcaagtccgggcagcgcaaccgtctcgccgatttgctcaatcgattgagaaaaatgcgccggatcgcacaaaaaacccagccggctcattcccgtatccagtttgatatgacaatccacctccacgcctgccttttgggcctgttcagaaagcgccttggcgtaatccagcgaaaataccgtctggctgattcggttggcacaaagctgtgctgcccgatccgccggggtaaaacccaaaatcagaaccggcttggtaataccaccttgccgcagatgcatagcctcttcaatattggagacggcaaaccagtttgccccctcccgttgaaacacctgggccacctgccggtctccatggccgtaaccgtcggctttgacgactgccatgatcttacagtccgggcccaccttccggcgaatttgccgaaaattatgcgccagtgcatccagccggatttcggcccaggttcgtttgagaaaatccatctttccaccctctttttgatataagagaggcggctcgctgtaacgaatcgggctgagccgcctttttatactatatgttaaaaatcaattttcttttccaagaagtctactaaagagtcaatggaaacccgctgttgttccatggtatcccggtcacggatggtcacgcatccatcctccgcagagtcaaagtcatatgtaatgcagaaaggggtaccaatttcgtcctgacggcggtaacgtttgccaatagagcccgcatcgtcataatctaccatgaaatgacggcgcagttcatcataaactttgccagcctgctcacccagctttttagacagcggcaacacgcaggctttaaacggagccagcgccggatgcaaacgcagcacaacacggatatcgtttttcgcggcatctacaacctcttcgtcataagcgtcgcacaggaaagccagtgctacgcgatcggcgcccaaagaaggttcgactacataaggtaggtaatgctcgttggtttcggggtcgaagtactctaatgatttgcccgacgcgttctgatgctgggtcaggtcatagtcggtacggtcggccacgccccacagttcgccccagccaaaggggaacaaaaattcaaaatcggtggtggccttggagtagaaagacagttcttccggttcatgatcgcgcagacgcaggttttcgtcttttaatcccaggttcaacagccaatcatggcagaattggcgccagtaagcaaaccactccagatcggtgcccggtttgcagaaaaattccagctc

SEQ ID NO: 2153 - DNA, 12437 bp, Unknown
  16S sequences of unknown bacteria
ggcaaaataacagcggcctttgcctatgatagcgttccaaccaataatccaaagtacgaggggcaattggctctttccgcatcaaaagctgcgttaagtcctcgtcattgctttgcagcatcgggtaccgttttccacttcccttttgcttttgcacggtataaagatagagcgtctttgccacatcacgctttaacgcatccttaaacggctgtacgcccagctgatctacctgcggcatatataggttgatctgcctggcaatctctgctttgctgcatatatgcccctcaattttgggtcgcacgcatctgagcaggcgctcaaacgcagaagcatatcgatccattgcatcttccagctgccgctttttatgctctgtcggagacagcagcttaagcgatacagtacaatatggcatagcgctgtccccctttctatcaaaaaaacgccagcgtaacctgcttatccaaatctcgcaggcattgggcaatatcgtgaaccagccgcagcttcattgtaagatccaacggcatgtccgggtcatcatacgcaggattcagcgcacggcccaccaaaaattttacgcttgtgctcttttgcaccagcagctgtgccaaaagataggcgccatcccgcccctgctgcaaaacgcggtcgcgcccggtatcgccggcagcataggcccgcattagctccagcgcacggcccatggtcacaacgccttccgtcacgagatctacgccttctatctttgccaccggagggatctctggcgtaatatagtccagctgcgtagttagcgcacggccgctgaccttggagacgatcttactggtcgtaccgccgcacacgactttgtttccctcaaaggataacagcgtatccaccaaaaagcgatcctgctccctgttttgcggcggcccaaccatcacgcaggtctggctgggaattctggccctgcaaacgcaaacgctggtgtcgtcccgaatcgtttggttatacaggcttttgcaggcctgcaaaagtagattctgcaaggtacgcggactcttatcacgcaaaactgcattttccatataggttgccacattttcccagcgccaaccaaggtccaaatacgaacccagccccgcatgcgtcacgccgtcgctcatcaaaacgaatacgtcttccgggcagatggaaaaccgcgcttggcgaacgcgtttacccgctacatcacgctcttcataaggaatctccactcgctttccagcgcgcaaaagcagcatcggcggattatcatactccaccagataggcctgccccgtgacccccagctctaaaaaggtaaaggtagagtatgccaggtgccgttcgctgcatacaggcagcgtagaggcaatggtttccagcacatcctccagttctgccccttgcgttagcatggtggccacgatcttacttgttaaagacgctaaaatattggcctttacaccgctgcccagcccatctgcaagcacaagataggtcttatcctcgcgttttacgatttcaaccttatcgccgcacagctcttcgccctgcttatgcaaatggcccgtactggtttcaaaatacagcttcattgcctgggctcccgcagaatagactgctttagctttgtaagcgccattttggtttctcccgttgtctctcccaaaaggctggcgatttcctgcgctacacgcatttgcttttcaattacgcgctgcgccgtttccacagtttctcctcgcagcagttccagttcatgccgttttcgttcttcttctgtaatatcctttaacagcagcaagcaatctccatttggcaacggcactacgctctgctctacgatatgcttttggtcttccgtcgcggtggtttgttccaacaacaggcggccgctttgctgtacctgtttatatggcaccttattcaaaagcgattcgatgtgtgcccctttcagctcatctgccatatccaaaaacaatgctttcgccgccgcattggcttccaaaatatatcccttatcattgagaagtacaatgccgttcggcgtatgctccaggatcaagttggacatggattctgccttttctcgcatgtatggcaagcacataaatagatctgctttgccctggaaaacagcgatcgccttttcccgacaggtcgaatagccgcaggtgccgcaattcaggcagtcctgttccttacgtttccccaacttttccaaaatcagctgaatctgggcttcggtgggctgttttcgtttgatcggctttgcgtgatattctgccaaagcgtccactttggcattttctgtcaaaggagcgggcccttccattcttttgcgcgcacgctctaccacctcttcacgggccaacaccagcggcaaacccaacccttccatcccgggcccgcccaaacaggacccggtacaagcggacatctcgataaaatagcctttcatacgatgtgtgcgcatggcctccaacgtctgcatacagcgatccaggccatcaacagacaagcatcggtacctttttctggcacgcacatccaacgtgcttacaattccgcccggcaccgggtacagtctgctttttgtctgctgtatttccgccgctttttcgtcgctttccaaaagctctatcccggcctctttcatccattgttgaagctctgccaaggttaaaacggcaaacagatctccccgtttgcccgtttccagcttctttgcaaagcaggggccgataaacaccaccttagccctgtttccatatatggcatggatcattctggcatgtactgtagaaggggaagccacaggcgccaaatactgtgtcaattccggataatgcttttctaccaatgcaatgatggaggggcagcaagtggataggatattctccattttaccttcctgcatcagctgctcatactgccggctgacctctgtggccccgatggccgtttcctctacctgggcaaatcccaatcgttttaatgcgtttgaaagtacagcaaagctgaccccctgaaatgcagcagcataagagggtgccagcgatgcaattagcttttgatgattttgaacagcggtctgtaccgtttccagatcgctctttatttgttttgcattttgcgggcataccatcgtgcatctgccgcacaaaatacattcattatcgatgacccttgcttgttcgttttgaaatgaaatggccttcacggcgcaataccggatacatttatagcagtttttgcaatttgcaggctgaaactcaatgaatcccatctatgcgcctcccctctctcatttggttaaaggcaataccttccctttcatcaagcttgggacgtcctcaggcaccacatgcgtcaacttttcttcgccgattttaacgcatacgccgttgacgcagtctcccatgcaaaaatccgccttcaacgctactttatcgcccaagtgttgggcttcgatctcttttttgaatgcttccgccacgccataggagccctttacatggcatgtactccccacacaaacggtaatttctaccaagcctatccctactttctatatttttcatcatacagaatacagaaaaaaaggcaaaatttcaattcccatttctaaaagcaaaacagacgcgcccaatggcgcgcctgttctatgcgtatccgtgcttatttcgcgccgtgataatgtacatgcagcagctcatgttcttttcctttgagcaagcccttgtacagatcctgtaccgtcatgttttgctgagaagtcttgatatagctcaggcgatccgcctcatagaggccgtccgcccggcgctggccggccctgcggaatgcatagggctgtccaccgccgcatacgcagccattggggcacgccatgacctctacaaaatgatactgcttttccccggactgtatcttctcaatcaactcatccgcatttttcaggccattgacaatggcgatgtttacctgcatgccgttataatccaccgtacattcctttacacccttgagcccacgcacaccggtaaaggcaatttgatgcaattttgctgcgggttggtctgccatgagatagcgaagtaccgcttctgttaccccacccgttacgccaaaaataacgcctgcgccgctgttgatgccaaacggtagatcgacagcctccggcaacagctcggtaaaggcaatgttggcctcgcggatcatcttgatgagttcctgcgtcgtgataacataatcgatgactggttccccgtttaccttgaattcatcccgggctgcctctccttttttcgccgtacaaggcataatagctacattgacaatctttttctcatcatccttatagaattccttgatgacagatccaaacatctgcatcggtgatttgcaagaagagatattttccatcaactcaggatgtttgaattccgcatgcttgatccatcccgggcaacaggatgtgaacagcggcagcttcccgccgtttttcacgcgatccaaaaactcgttggattcctccagcaccgtcaggtccgcacccgtaacagtatcaaagaccaggtcaaatcccatcttacgcagcgcagccacaatctgccccatggtattttccccaatcttggtgcccaaatcctggccaatgcccacacgcacggccggcgcaatctgcgcgataaccttggtattgggatcgctcaacgcattccataccttctgcgtatcgtttttcaccacgatggcccctgtcgggcacacagccgagcattgtccacacccaatacaattggtgtttgcaatgggctcgttgaatgcagtcatgacctccatcttagagccgcggaaagcaaaatcaatcgcccctacattttgtacctcgttgcacatacgcacgcagtcgccacacaaaatacatttggtaggatctcggaaaatagacggtgaagaatcgtcgatcctatccttcttctcctccggcttttcaaagcgcagtctgtcgatgccaaaccgcttggccagctcctgtaggcggcaatctccgtttttctcacaagtcgtacaagagctacaatgattggaaagcagtagctccaaaatcatcttgcgatatttccgaagctttggcgtattggtatagatttccatccccgcacgcggcggcgtagagcaagccgcttccataccgcctctgctgttttccaccatacacatccggcaggcgccgtatacggatagttcggaataatagcagaatgttggcagctcgatcccggttttacggatcagatccaatagattcttttctccgttgatctccaccggcatgttgtcgatcatcataaattgtccgctcatcttctcattcctccctgatggccgcaaaggcgcacgattctatgcaggtaccgcatttgatacatttttcctgatcgatgacaaagggctttttgatctccccagaaatagcacccaccggacataggcgggaacattttgagcagccgcggcacttttcaggatcaatggtgaatttcttcagcttctggcactgtttggccgggcagttatggtcaaaaacatgcgcttcgtactcatcgcggaaattctctatcgtgctgactaccgggttgcctgcactcttgccaaggccgcacagcgcggtggcggaaacagtctgcgccagctccatcagcagatcgatatcatccggctgtcctttgcctgctacaatgcgttccaaaatttccagcatccgcttggtgccttcccggcaaggtacgcacttgccgcaggattcattctgcgtaaagctcataaagaacctagccacttccaccatacagctgttttcatccatcaccaccataccgccggagccaatcatggcatttacctttttcaaagaatcgaagtccagaggcagatctaaatgctttgtcgtcaaacatccgcccgacgggccgccgatctgcacagcctttagctgcttgccgccacggataccgccgccaatatcgtaaatgatctcgcgcagcgtcgtgcccatcggcacctcgatcagcccggtgttttcgatattgccggtcaaagcaaatgcctttgtgccggggcttgtcggcgtaccgatcttcaaaaactcctcggcacccttcaaaatgatgggcggcacattggcaaacgtctctacgttatttagtaccgtcggcttgccaaataggccctgttctactgtgcgaggcggctttacgcgcggcatgccgcgcttaccttcgatagaggccgtcaaggcagagccctctccgcagacaaacgcccctgcgccacggttgatctgaatggtaaagttatggccactgcctaaaatattttcgccaagcaggccgtatgcttccgcctgttcgatggcggtttgcagacgggaaaccgccaacggatattctgcgcgcacatagatatagcctttgttagcgcccactgcgataccggcaatcatcatgccttccagcatacggtgcggatcgccctccatgatactgcgatccataaaggcgccgggatcgccctcgtcgccattacatacgatgtatttttcatcgctgttctgtcttcttacctgtgcccatttacggcccgtcgggtagccgccgccgccgcggccgcgcaggtttgccttttccacctgttctacgacctcttcgccgctcatatcgaacagcgctttttcaaacgcactatatccacccagtgccaaatattcttccaaggaattggcatcgatatggccgcagtgctccaatacattacgcgtttgctttttatagaaaggaatttcttcctgctggcgatagacctgcccgtttttcttatacgcaaggcgctcgatgtattccccacccagcacggttttctccagaatctcttcacaatcttccggctttaccttgatatacaggtatccgcccggctccaagcgaaccaacggccccatttcacaaaagccgtggcagccgctttttttcaggccgatagattcgtcgggcggctctttttccaagcgtacttcgcagcgaatgccgcgttcctgcatcagctctaaaaatctatcataaattttcagcgaaccgccggccacacaaccggtccctgcacatatcaagattttcttggtttccagatccaacgcttttttgtacgcaacgcgtgcctgatccagttcctgcctgttttggaatctcatcatcattttccctcccgcagttcttgcaccaaggccaccactttttccggcgtcatagacggatgcacagtatcgttgaccatcagcaccggtgctaagccacaggcacccagacaggataccgtctctaccgtaaagacaaaatcatccgttgttgcctgcccttcctttaggttcaaagtctcacgcagcttttccaagatcggaatggacttgcgaacgtgacaggcagtcccattgcataccttgatcacatattttccctttggttccaacgaaaagttttcgtaaaacgtagccacgctgtaaatgttggccgtcgtcattcccagttctttggaaagataggggaaaatttccctgggtagataccggtaagtctcctgcacatcttgcaggatggcgatgatattgcttgcttgtctgccatgctttgccagaatttcatccatttgctttgcgtcaaaggaatcgttcatgccattccctcccaaaagattgtgtaaaatttgtcgaattattttatcaaaccgtattgaataatgcaattccctttacacaattatcgtataaaatctttgtagaaactatgtttcagaatattttcaccgttatttttcataccgtatttataatgtaatatcttttggaaaatttttctttttttcatttttgtgtttgacgatttttgtcagccttgctagactatgttcgtttgagcggcaaggctatgccaaatgccgtttatatagccggcatttgagcgacaaatgccgtgcagactgtcagtttcgacagtgaagaacatcacttcctcgtttctctatacaatccctcaaaggccggtatgatcacatgccggcctttaccctttgcctttttttaccgaaccggattttattgaacctctcatgctctctgtgctaaaataagcgtagcttaagaaatttttatgtcctatataatttggataaagggtgacaagtttgggacgtaccgtaacaatctccttttgggtggcgtttgcgctttcccatttttatttggggtttcgcttatatacatgggtgctggcgccagtttgccgctttcctctctggattttagcatgcttgatgctgtttttgggtggttctttccaggtagggcataatgcacgcaaatggccgctatggcttcggcgctttctcattgcggtaggcggtcattgggccggagcgcttcttcctttgcttttggggttcgtggggttggatgtgctgcgtctcctcttcctgctaggaggcctcgtatttccaccctatttgctgttttacgcttctttggctattcttgcaactgtttcccttttgttgatttgggggacgctgtgtgccgttaggccgcgtgtaacacgctataccatccccgttcataaaaaggccggcacgctttcttctctacgtgttgcgctcgtatcggatgtgcatttgggcgtttctatcgatgcaaaacagcttcgtgcaatgtgcaaagccctccaagatttatccccggatctgattctaatagctggcgatttgctggattccggcctgccggggctgcacgacgccgacaaaattcaatctgtgctttcgggtttgcatgcgccgcacggggtctatatctgtcttggcaatcatgatgtacgcggtggtgttacgaccgaagagaccattcgttttttccaacgctgcgggctctctgtgctacacgacagtgccgtacatatcctgggttcctataccctgattggcagagccgactatggattttccaaaactgctggtgctccgcgcgcttcggtagcggaactcgtcctcggcgccgatccggcacagcccgttctcttggtagatcatcagcccaaccagcttgtccaggcagcggatgccggggtagacgtacagttttccggccatactcaccgaggacaaatgtttcccatctcgcttttaacaagacgtcagttcgaaacggatttcgggttatggaaatacggccagttcaccgctgttgtctcttctggatatggcacctgggggccgcggctgcgccttggctctcattcagagcttgtattggcaacactcgtctttgatgcataaaaagcagcggtgatcccgctgcttttttagcaaaatatttcaaagattccaatgccaatcatgcaggctgccgaaaccgaatccaacagccggggggtcattttctcccgtacacggcatcccgccaaattgcccaacccaacggtcaaaaagctgaatgttgcaatcgaagcgcctagccatattggcggcaaccctgtaagccctgcccccaaagctgctgggatgcagtttactgccagcgtcagtcctaaagccatagcagatgtacgtccgatagaggttatttgctgcgcgtcatgtttagaaaaaagcgtatacatgcccatcgcaatcaaaagtagagcgcccaataaattggccgttttttgtatttctgcggcaaacaaggaagatgcccagcaaaggacaaagcttaccaggccagagattaaggcaatacacgcgttgattctagtgcctatcagccttccctggcatccatacgccatgccgatacaaaggttatccaggttggttgcaagcgctaagatgaagatggaaacgctgtgcacccatatcaccccctttattgcacgctatgctacgcataaagcaagggtgaaaaagaaaaagcccgctttgcgagcttttttccttagttagggagcgttcccgactcaaagaacgtgacgctttccagcttatctccgatctgatctggccacagcacctgtatgctctccacagtggtatgcccctcttcttcttggatcttcatcgccgccaagaccctagaaccctgaatatccagcgctactggatagtatttctctccatctagctcgatggtcttatccggcatattgatggtagccccagcaaactgagcccagtcgccttgcccttgctcggcaatggccccatcttccttcatcaagtttttttcaaccagcagtgctttgggatcctgtccctctacatccgcttggtacagggccttagcggcttgttccgctaccaacagcggttgcgttttgatggtataggcatataaaccatagcatagtccgccggccgccacaatcatcactgccatatagactaggcagcgcgcccttttctttgtatccttcgtgcgaaaacggcggcggagcatataaaatacaatgggaagcagcagcatcacaaatatgatgatatatacattgcgtgcatcagacatggtttgttcctttccgctttacagcactttatttaaaaacgattgggtacgagggcttttggggttgccaaatacttcggccggggtgccttcctcttcaatgatgcccccatccataaacaagactcgattggccacttcacgggcaaagcccatctcatgggtcacgatgaccatcgtcatcccttctgcggcaagttggcggacaacctccagcacctcgcctaccatctctgggtccagtgcgctggtcggctcgtcaaagagcatgatctcaggattcatggccagggcccgcgcaatggctacacgttgcttctgccccccggaaagccggttgggaaactcatttttcttgtccaaaaggccaacgcgatccagcaaagactccgccagcttatccgctgcatcctgctccatacctagcaccttgaccggcgccagcgtgatatttttcaatactgtcatatgtggaaacaggttaaactgctgaaacaccatcccgaccttttgtctatacttatcgatctccttttggtgctccatcagctctatgccgtcaatgtagatcttgccggccgtcggcacctccaaaagattcaagcagcgcaaaaacgtgctctttccgctgcccgacgggccaatgacacacacgacctcagatttatcaatcttagcattgacgccctttaacacctccaggtcgccaaaatacttatgcagattttctaccttaatcactggccctcatcctcttttctagccgctctgcaaacagagacagtatcgtagtcgtatagaaatagatgatcgctacgacaataaacggcgtatacgcatcaaaggtgcggcttcgtatgatattgcccatccttgtcaggtcatccaatgcaatgtatccagcgatggcggtttccttcaacacctgaatacactcattgaccagcgcaggcaggatatgcttggttgcctgtggcacgatgatatgccgcatagactgaccccagctcatccctaagctgcgcgccgcttccatctgtcccttgtctaccgccaaaataccgccgcgaatcagctcagatacataggcgccggaattaatggcaaaagcaacggacgctaccaataccttcggcaagttcacgccgcccaaaattgcatagtaaatgataacgagctgtaccaccgccggtgtgccgcggatgatatccacatatgccttggcaatcttgtccagcactttgatatgcatcacgcgtaccaacgccacaatcagcccaatgacaatgcccagcagcaatgcaaacactgtgatctccagcgtcgttaccaagccgtcaaaaaacagcgtatatcggctttcccgaatgaggttactgtaaataaccccgctcaatccatcgatgagtcccaaatgtacgcctccttggttttttcttcatgcaaaagccactgccttgcggcagtggccattcaacaaagctcgatagtacttattcacctacgttgtacttatctaccattttgtcgatctctccgtcttgtaccagcttgtcaatgaccttattgacctctcccagcagctcggtttcgccttttaccacggcaaatccgtactgctcgctgtcgtagctgatgtcttctaccttaaccagttcgccgttcattttattcaaaatgaagccaatggtcaggttatcgccgatgacacaatccagtttgccgtttttcacatcctcacaggccagctgcatggaatcataacggtttacctctgcgccttcaatcttgcttgcaacctccagatctccggtggtgccggtctgtacaccga

SEQ ID NO: 2154 - DNA, 7414 bp, Unknown
  16S sequences of unknown bacteria
agccgatccggcgcgcccagcacaagcgagccatagcccgcaaacgccatggcaccccacttgcgggccgaggagaacgcgatcttcgcatccggcgcatgcagatcggcaggctcagcataacggcacagcgcctgatacgtctcattattgtcgtcgctgtgatacagatatgcgctccagtgctccagatccaccgcgtcgtaatgtcccagcgggatgatccgctccacctgcatcttgccggtcgtcaccgtcccggtcttgtccaggcaaagcgtgtcgacataagcgagcgattccagcgaatacagattctggacgagcactttctttctggccagcttggtcgtgccggcagccagcgatacgctgatgagcagcaccagccccttcggcagcatgcccagcaggccggccgcgctgccgaccaccgcgtcatatacgctgacctgccgcagcagcagcgcctccaagaacaggatgatgcccagcgggatgatcatgaccgtcgtcaccctggtgaccttgcgcatcgcgtccagcagctgcgaatgcacgcccttgccgctgcggatctccgcggtcacccgggagacatagttgtcttcccccacatggacgacccgcgccagacagcgtccggagacgatgctggctcccgagagcagaggatcgccttccattttgttcaccgggtcagattcaccggtcagcagcgattcattcacttcgctctctccctcgatgacgacactgtcgcagcagatctgctgtccgctgtccagcaccagcacatcatcgagcacgacatcctcgaccgggatgctctgttcccggccgtcccggatcacctttgccttagggacgatgagcagcgagagctcatccaccatcttcttggcatgcagctcctgcgcgatgccgatgacgaggttgagcaggatgatgaggatgaacaccatgttcgaccatgcgccgaccagcgccagcgcgatcgcgatcagaaaattcaacagattgaacagcgtgaagatgttttccttcaatatctgcgccgtgcttttggaagcggaagcaggcagggcgtttttctgcccgttcgctgtccgttcctccacctgacgcgaagtcagaccttgttgtttcatgctaatctccttctgccgcatgggcggcatcaaaatcgaccaggaacgatgccctgtatggctaaccttatcacaccggatttcgccatgtcaaccgcccgcaggcgattcagcccctcaagcacgctggcgcgccgctcttctcagacacgtgtttctgcgttataatggcgtcaggagtgatcagatgaacctgctgactttttttgaagatgacacgatcatggcagccatgacgctgcgcgaccgcactgcccccctttgcggaagcatggcgctgcatacgggcgaggaagccggcgcggtgatgaagaaccgccgccggctgagcgaagagacccttcccctttcccgctggtgctgcgccatgcagacccacagcgccaacgcctatgcggtcacggccgaagatgccggacgaggcgcattgaccatcgacgatgcgatccccgcatgcgatgcgctctacacccgggagcgcggcgtgctcatcggcgtattcaccgcagactgcgtcccgctgctgctgcacgatcctcacagcggcatcatcgccgccatccacgccggatggcccgggacggtcaagcagatcacgcatcataccgtctcgcggctgatcgagcgagaaggcctcgatgcgcggacggtccaggtatggatcggtccctgcatccaccagccttctttccagatcagggaagatgtcatcgcacagatccgcgccctgccctttgacacgagcccttacttgcagatgcaggcagacggcagcgcgctggcggacaacgtcggcctcaacgtgcacatgctgcgcgcatcgggcatacctgcagagcacatcttcatcagcaaacaagacacctgtgccggcggcgaagcattcttctcttaccgccgcgaccgctgcaaagggcgtcacttctctttcctgtataaaaaataaaaagcggcggcgctcagatgaccaggccatcttcgctgccgtttttttccggtccgcacatatgcgctatgtgcggatcgttccttttccatagacctggtaacgatatgtcgtcagctcacgcagccccatcggcccgcgggcatggatcttctgtgtggagatgccgatctccgcgccgaagccaaactcatgcccatcagagaaacgcgtggacgcgttggcatagacgaccgcagcatcgaccccgttcatgaaacgctcgatggccttcaggtcatcgctgaggatggcgtccgaatgcatcgtatgatgcgcgttgatgtgatcgatggcctcctgcagcgaatccacgcagcgaatggagatctcatagtcgagatactccttgctgtagtccgcctccgtagcagggatgatctgctcgcccatcgcgcagatcgtctcatccccgtggatcttcacctgatgctcctgcagcgccttcagcaggcccggcacaaggtccagccgctcacggtggatgagcaggctctcacacgcgttgcatacgctgacccgctggcatttggcgttgaggatgaccgggatcacctcctgcgcatcgacgctgcggtctacatagatgatgcagttgccgctgccggtctcgatcagcgggaccgtcgcctgtctgacgcaatgctcgatcagccgggcgctgccccggggaatgagcaggtcgagacagtcgttcatcttcatgaagtcgtccgcagcctcatggctggtatcctgcaccagcgcgatgcagtcttcgctcagcccgttttcccgcagcgcctcgcgcatcagttccaccagcacgcggttcgtctcgatcgtttcgcggctgccgcgcagataacagacattggggcgggcctcaaagatgatgccgatgacaccgatcggcacgcttttcttcacgaagtgcagctctttgcgctgccattcttccaatacacggccgcaggggtcttccagccccgcgacttcccgcacgcccgcgcagatgccggcgatgcgcccttcatccagcgacaggcggtcgataaacgattcgctgcgcccgctgccgcgcgccgtctcgatatcccgggcattggcctgcaggatctgcgcccgcccggcatacaggatatccgccatccgcatcagcgcggcatccttcgtcttcgtttctgcctgcgccagggcataagcggccttgcggcagcgtatgccttgttcatataattcgctcagttcgctcatcagctcattccctccttgccagaaacagtgttccgcatggcgttccatccagaatgtcatacaagatccgcggatcctctccgctggcgatgaccatgtcgcagcctgccgaagtggcgatgcgcccggcctgcagcttggtgatcatcccgccggttcccagatcgctcgcgctctcgcccgccatggccatgagcgcatcgtcgatctcatggacgacatccagcttcttcgcctttggatcaagcagcggattccgctcataaagcccatccacatcgctgagcaagatgagcagatccgcgctcatcagccgggccgtgatcgcactgagcgtgtcattgtcgccatagacgatctcatcggtcgccacgctgtcattctcattgatgatcgggatgcagcgataagccagcagcgtatcgatcgtgccgcgcacattgcgccgcagcgtgtcatcatcgatgacctcctttgtgatcagcagctgcgcgacactgcacgaatactgcgaaaacatcttgtcatagatatacatcagctcgcactggccgaccgcggccagcgcctgtttttcctccagcgtctgcgggcggcggtccagatgcatcttgcctcttcccgcggcgatggcgccgctgctcaccagcagcacctcatgcccctgattgcgcagatcgctgagcacacaggccagcgcgtccagcttgcgcagattcagcagtccgctggcgtgtgtgatcgtggaactgccgaccttgatgacgattcttttttttctcatgctcttcacctgtgtctcattatatcctatccgccccgcaaacacaaacagaagaaagccccggcggccggggcttcagtcttcttctcgtttttcctcgctggtatacgcacggtcaaaggtgatgaccgcataacagtccttgcggtaggtgtggatcccatccgtgatcagcttcatgagcgtttcatcatcataagccgaatcaaaggggacgacgacatcgaagatcagattggtgtgcgtcgtgcccgacacgacccggaaatcatggaaagacagcaccggatcgatctgcttcagcacctttctgagcatctcgcgcagcgcattggtcagctcatcatccgtgcggatcggatccatatgcaccactgtctcgatccccatctcctctttgatctccttttcgatattatcgatcatatcatggctctcaaagatatcacgccggtaatcgacttccacatgcacgctgacaaagagccggtttggcccatagtcatgcacgatgaggtcatggacgcccagcaccccgtcatatttgcggatgcgggcgatgatctccttgacgatatccggatcaggcgccttgcccagcagctcatcgagcgcgctgcggatgagggagatgccggtgaacaagatgaacgccgccaccaggacgcccatgtagccatccaggttgaaatggatgagcggagagatgatcgtggacagcaggacgccgccggtccccagcacatcagaaagcgaatccgccgccgtcgcctccatcaccgaagaatggatcagcgcgccataatgccggttataggcatacatccacagcttcaccaggatcgagatgcccagcacgatgaccgctgtccaggaaaacaccacttcctggggatcgaggatcttgctcgcgctctccttggccagctcgacgcccagaaacaagatcagcaccgccaccagcagcgaggccagacactcatagcgcgcatgaccgaagggatgtttggcatccgccggcttgcccgccagatgaaagctcaccagcgaaacgatcgagctgccggcatccgacaggttgttgaccgcatccgccgtgatggagatgctgttggcgatcgttccggccatgaacttgaacagacacagcagcagattggccacgatgccggtcatgctcgccagattgccgtatgccttgcgcacctcatccttctctaccgcatccgcgtccttcaccagcagcttcaccagcagtctcatcatctttcccagccccttttctcgtccttataatctatcacatttcctggcaaaacgcaaaaccgccgttatctcatcatatgatgtagcggtgatgcccatgcggcgattcgaacgaatgctcctcatcctgatcctggccgccatcctgctgtgcggcagcgaagtgcatgaaagctgtcagcgcgcaatgcggctttggcgcgacaacctcatccccgggatgctgctgccgatgatcctggtccgcctgatccaggccagaggcggcttcgaccatctgaagcttgccctcttcaacaagctgttcaacatggagaacaacggttttgcctgcttcatgtgcgcattgctgcttggttttcccaatggtgctctgttcatcgatgagctgtacgaaaacggccagatcaacagtgagggtgccaaacgcatgatcaaatgctgcagctttcccaccaccggcttcgtcatcctttctcttggcacagcgctatatcgctctgccaagatcggctggacgctctatggcattcagatcctcagcggactcatcttgctggccctcaccagaaagaccaaagtctgcccggcagcccccagaaacaacatgcccacattcttccccgcactcactgacgccattctcaaaagcggacgcgccatgttcctcatcggcatctatctgatgatgttcctctccatctttcatctcgttcagtgcatcctgccaggcccgctctcactcccattgcagatcgtctccgaattctccaacggctgcatcatgctcgtccaaagcagcctgccgctcaaattacagctcacctgcatcagcgcgctgcttggatttggcggcctctgcgtacacatgcaagtcctctcctcattacgcatccacatcccttatcatcagtttctgggctatcgcatctgccaagccatcatcgcaacaacattgaccttcatcatgatctgacaaaaagaaaaggcggatgaccgcccattatgatcaagatcgattaggatgatttggatctgctattgcataaccccagtgattccatctgcgatttctattggcactataagtatgccaataaatcaagtcaccgccatcacacacatcattaccgttcctatcaaaccaactatctaatccgccattaatccatccttgatcataattatgctcatcgatactagtaataacgccattttcgttagtaacgattctattcgcattagcgtccccacaggtattcgttgttcctaaaggagaatgctctacccctccatattctttacgatcccattgatatccttgcggagggtactcattttctccagcatgacaagctaaagaatagcatgccgccacatactcattcggtgcaaatgtttctcccgtcatcatcggtcttacatactctctcatctcaataacccctttctttgatcatgtttgtgtgatcactgaatgctgctttctctcacttgggtgtgaaccagttcaggctgcagcgagatagacgtacagttttcgtgatacagcaattcaagcatttgtgcatcgttcttttcaagaaggcgcatggtctcttcacgtgtacatttcacatgtgtggcgaacacgcctgaatacacttttttcatatggcctcctctccgtctctgatgtgcttgaaggtacacctttgcgaatggacaaaatgaggatattgtgataagataaatgtgtttaaaaagagtgaaatgaatatgattttcagtgctttgaaagaagatgtaagccaagatgatgtgtacgcataaggtgtacctttgcgtacacttttttgtcattttagacaataagtattcgctggctaagatatattgcaatctatttcaaacgcagtctggtactatgtcaagatttcggactaattaaatagagattttttgcaattcgtattgcttctcgtagtcattcggagattgataatcacaatg

SEQ ID NO: 2155 - DNA, 6052 bp, Unknown
  16S sequences of unknown bacteria
ccccgtctgtgcggcggctgcggagcgtctatctgcgtccgccaggtgctgatgggcgcgggcgatgccgacgttgtgtgcagcagcgcgacgggctgcctggaggtgtccacgacggtctacccgtattcttcctggaagaccccgtttatccacaacgcgttcgcgaacagcgccgcgaccatgtccggcgtcgaggcagcctacaacggcctgaagcgcgccggcaagatccccgccgacaaggagatcaagttctgcgcctttggcggtgacggcggcacctacgacatcggcctgcagagcctgtccggtgccatggagcgcgggcacaacatggtgtacgtatgctacgacaacggcgcatacatgaacacgggcattcagcgctcgtctgcgactccgcacggcgcgtgggcgacgacctccgaggtcggctccgtgcagcagggcaagcagcagcgccgcaaggacctgaccagcatcatggccgcgcatcacatcccctatgtggcgcaggcttccatctccaactggcgcgacctcgtcaacaaggcagagaaggccttcaacaccgatgggcccgctttcatcgacgtcatggcaccgtgcccccgtggctggcgcatcaagtccgacgagaccgtcgagatcgcgcgccttgccgtcgagacgggcttctggccgctgttcgagatcgaccacggcgtgtggaagatgacgccggtgcgtggcgagcgcaagccgctgaccgagttcctcaaaccgcagggtcgcttcaagcacctcttcaagcctggcaacgagcagctgctcgagcagctgcaacaggaatgcgacgagtactacgcctacgtcgagcgcatgtgctcgctgtacgcggaggaaaagtaagcgcctgcagcgcggtaaacgtagaagtttgaaaaaacgggggttcaaacgagcccccgttttgctatacttcctactcgcgtagttttacgccaataagccatgtggagggatgtccgagtggcttaaggagcacgattggaaatcgtgtgtgcgacgttgaatcgtacctagggttcaaatccctatccctccgccagtcaagaagcaaaggccccaaaacggggcctttttcgtgtgtgggtttcccagactcggatccggtaccgaacgtctttgttgtagctccaacgccgcgaaatcttggtcacgcctacactgctcgtatgaaacgatacgagaggtgtgtcccatgagagcgatgccgtttgccttcgacgaattcagctttaccagaagcgccatgggggtcgactaccacctgatcccccagatgcacgtgctgttctttgggcctatcgaatgcgcacgtcattctttttcatcgcttgtgaacgacgaagacgcttcgattctcgtcgtcacggacgtgcaggcatcattgggcgagacggagcgcctcgtcgccgatgcagtctccgagattgtgaaagacgacgattcgatccgcgggtttttgctttgcaccgcctgccagaccacgtttttgggaatcgatttcgatggactgtgtgccgatctgcacgagcgttttgggctgtgcttcgcccacctcgaggcaaatcgcatgcgcgcggaaaacatccccggtgcctcgaggaaggatattccaggcggagaccgctaccacttcagaaaagcgctgttcaagatgctcgagcagcgtgaagaacctgcaggcaaacgcggcatcctcgtgctttcggaagacccgctcgcaggcgaatgcgacttgaagcagcttcaggcggtcgagggcgtcaattgggtgaaaagcgtgggcgacctgcagtcgttcgacgaactgcttgcctgcaaagacgcgctgtttgcggtatcgacttcgatcgtgtggaatgagacggcagaatacctgtccagcgaatacggaatcgaggcgcttgtctgcccgacgagctacgacttcgatgagattgacgcatattacgatcagcttgcgcaagccctggagcgcaatcttgggagttctgctgccgcgaccgtggaggacgttcgcacgcgcgggtgcgagaacgctcgaaaggcaattagccgtgtgcgtgcgctcgactctgaactcgacctcgacttgcgcctggtgcatcggccgttctcgatggtagaagcgctggggaggagcgggttcgaagtcgtcgacttcatgccctcgcgcatgcgcatgatgcacaaggaacccgatgacctgcccgcatacgagcggctcgcggcacaagatccgcagtttgccgaacgctatgccagcaacgcgcgcggtaaacgcgtccgcaggagcaaccgcgcaaggaatatgggtgcacctgggcgctttgtccccagcgacccggtttcacgtgaaaagcacgtgcgcggcgagcagtcgtggtggggatactcgtcgattgtcgagctcatgcacgagctcgaacgagccgcgggcgaaggaggaaaccgatgagaaatctctggcgcagcatggcgccgtttgcaagtgattcgaccggtgtctgcaccgtgttttcctcctcgaatgccctgatcatcgctcaggattccaacggcacggcaagcgtgctgcgccgcgtcatcaacgtgaacgcggcgcgggcggcatttgagacggtcgatctgccggagctgtcgttcacgctgggcaaggaacgcgatttcatcgagcgcatggttcagatcgtggataccgtccaggcggatgccgcacgcggcatcgggtcgcccgtggaactggtggtgctcgtcaacgggccggtctcggcgctgctgggcaccgaccttacaggccgcgcgcgcaagctcgaaaaggcagttggcatcaagtgcatgagcgtcgacacgacgggaaacgcctattacgacaaaggcctcgccgcggcctacgaagccatctatcagacgttcgtcctgccaaacatacccgacagcgccgatagcagcgcacatgaacgcgtgaacatcatcggccagacagagctcgactacccgggagccgtgctgcccaacatgctgcgaacctatctgcacgaccagggcctgcaggtggtgacggacttcggcgcgagcgacacggtggagcagtgggcgcgcgctgcccgggcgggcaggaacatcgtcgcgtctgcgagcggattgaagcttgcccgcaagatggaagacgacctgggcatcccctacgaacttgcctgcaataccacggcattcgatgccctcatcgtgggtctggaactcgattgcgatccgcgtatcctcgtcgtcggcgagcagcttacctcgaacatcctgcgccgcttgctgcgcatggcaggggcgacgtcggtcgatgttgcgacgtttttcacactcgacaagcggctctcggaacaaggcgacgccaagctcaaggacgaggcgggcctgcgcaccttgagctcggaatatgacgttgtgataggcgaccatatgcttgcgcgctgctgtcaaccggaagaggcgcaggtcgcattcgtggacctcatgcacccgccgacaggttttgggatgcgcgacaacacagtgatatcgcgcgcctggctcgaacagcttgtcttcgcgctcaacgatgtctttggaggaaacgagcatgactaggcagatagccatctatggcaagggcggcattggaaagtcaatgaccacgcagaatctggcggcgagccttgcggcgcactttggcaagaaggtgatggtcgtcggctgcgatcccaaatcggattcgacgcgcttgctcatggggcgcatggtgggcgagacggtgctcgacgcgctgcgcgagaccgacgaggacgagcttgcgctcgaggatatccgcggaaccggttttgccggcgtgacctgcgtcgagtccggcggtcccgagccgggtgtcggctgtgcgggacgcgggatcatcgcctccatcaccatgctcgagcagctcggcgcctatgaggaagacctcgactacgtgttctacgacgtgttgggcgacgtggtgtgcggcggttttgccatgccgattagagagggcaaggcgcgggaaatctacgtcgtggcaagtggcgagctcatgtcgctgtatgccgccaacaacatctgcaagggcatcttgcgctacgcgcgcagcggcggggcgcgtctggcgggcgtcatctgcaacagccgcaacgtcgccggcgaacgtgagctcgtgtcgaagttcgccgaagagctgggcagcaagctcatctcgtttatcccgcgtgacggcatcgtccagaaggcggaaatctcgcgcaagacggtcatcgaatatgcgcccgaatccaatcaggcggcggagtacgacgcacttgccgctcgcgtggaagaaaacgcggagttttgtatcccgacgcctctcagtcaagagcgcctcgagcagctcatgatcgagtacggcatgtaggagccgaggtgggcgattggtcgcctgcatgccgtgaggagctctacatgtttcccaagatgacgtcgtcgaggtagcgctcggtgatgtctcttgcctggtagagcgtttcaagcggagtcggctcgcgattggcatagaggtagcgggggaagaaacgcgtcaggtgcaaggtgggcacggggtcaagggatgcgagccactgcgcttcgcgttcgagttgtgcgaagtcatcgttgaggccagggatgagaagcgtcgtgacctcgacgtggcttgaagcactggcgcatgcgatcgttttcttgacctgttcgagcgtgccgccgcacacgtcgtagacgtcttgtgagaagcccttgaggtcgatgttgaacgcgtcgatgaagggcagcagctcctcgagcttctcgggcgcgatgagcccgttggtcacgacgacgttcttgagcccgcgtgcgtgcacggcgcgtgcgcattcgagcacgtcgcgccagcggtaaaacggctcgttgtacgtgtaggcgatgccaatgtttccacggtccaaacagctttcggctaagttcgccacctgctcgggggtgagttcgcgcacgggcaggcgcgcggggtcagacggctgggctatctcgtggttctgacaccaggggcagtgcatggtgcatccatacgagccgatggaaagaatggtcgagccggggtgaaagcgtgcgagcggctttttctcgatggggtcgagtgcgagcgaggtaatcttcattcgtgacgcaccacctcgaagcgctgcagctcgcaactctcatatgcggcaataccggctttgcgttttgcgatggagatctgctgctcgaccgtgtcgacaccgtcgaggttggggagcaatagcccacgacggtagccgttcgtcacgatgacgccgtagcgcttcgcgtcgagcccgtcgggtgactctatgcgctcggcgggactcaaaacgtccacgctgatgttcagatagggcagctcgtccggttggatggggtcgaagcgcgggtctttactgcaggcggatatcgcattgtggagaatctcctccgcgatgtttccgtaggcggcgccgatggtccctatacagccgcgcagcttgccgttctcgtggatcgacacgaaagtgccggccctcttggtcagcatctcgtcaggcagcctctcgggcaatgccggctcctcaccgcgcacgtaagcctcgatcgcgccacgcgcgagcgcaacgtacgcatcctcatgtgtgcgctgcccatccacttcttgtctgcgctgctgttgcagcagctcgccgaaattgcggctggggtcggtgccggttggctcgaagctcgccacggcatacccgacgccaaacggcccctcgtaggagagcagctcggagcggactgccttgcggtcgagcgcaccggccatgatctggaacgagcgcgtgccgcaatcgccgatctttttcaggaagctgtcctcgaaggtgagaaagcgcatgaagtcgcccgttgccatggcggccgtgatctgctcgtcgtagacggggcc

SEQ ID NO: 2156 - DNA, 32759 bp, Unknown
  16S sequences of unknown bacteria
tgatcggtcacgatcgcaaggcgcgctccgcacgtcttttcgatatagctctgaagctcgtccgccgccgcgtccatgctctcctgcgcggcaagcggctcgtattcggtcacatccgcgaccttaactatcgtgtattcggaaatatcgcgcccgcacacggtcagcctcttcacgcggtatccctcgtgataggtgatgtcaagcccgtccgcggttccgctctgcacggctttcgcgtacttgcggacgccgcggtcaagcccgtccgcgctccgtccgacgataagcgcattgcctgcgtcggtgcggatgacgtagccgtcgttctcaaaatcgctcatgtcgatgccctttgcatcgccgaccgcgagatacacttcgtcggtcaggcgatccccgagcttttcggtgagccacaccgcgctttcggcggcatccgacgacgatacggttatcttcggggaatatttctccgcagcgcgttcgccggagcaggacgcgagcaccgacgatgcggtgagcacgctcagtacaagtgcgagtatcttcttcataaatctattctccttcgggggaatatttatcatcataataactttatcatatgaacatatgattgtcaagctgttccgaattttcagcatttcatccgatgaagtgcgtcatattctgttcttcccgacgtgaatcaccgtatgttttcggggacttcggcgcggcgaaagagtgcacgaaagcgccgtcagatgggatcaacgacccaatattcaaaaggatttcgctcaaggtcaagcggcactgtcagataaacgggcacatcgaccgctccgtgctcaccgacgggcaccgtatcaaccgtaagtgtgcgtctgcactcgacataaagatcgtagcattcgcggtatctctccgccatgaccgcgcgttcctcggcgcttccgttcgtgtatctgtcctcataggtgatcccgatgcagacgtagagcattccggagaaatacccctttacgcgaaactccgctccggcgctttccgccacgtcaagcgcatcgtgataaagctcatacatgaagtcgaaattgtccgccatgtacttcgcatcgaccatgtgatgcgtaccgggcatgtcctccccgtagtggaagaagcagcagcattcgtcgaggatatcgttcgccgtttcgcacatacggaaatatgtgtatgcgttctccccggagtcctcgccgtagacgatacggaaccactcgagcgcatatgcgtaatattcagcctcggtgatcgaagcatcccacgcaaggcgcgaggcgagatagcttttgagcgaagcaagaagggatacggtgctgtttgaggtgaggcacatgattccgccgatgttctgcgatgcgagatatttcatgtcataataaagggaatcgaacacgggatcctgaaaggcgacgttgtaccactgaaagggatagtaccagacatcgacgttcgggctcatctccgtccatttgtcgaacaggcgcgtaaagcggcggttttcctcgcagtcttcatcgtcgatatgatgtgcgttacaatagagattcaccctgtttgcgatgtagaagcaataggatattctcacgttgtcgagcggtcgaaccgtcttcggcggggcttccgttccgttatacgcaagcatcgaaacatacagtcccggatattcctccgccaccgcctcggcaacgcggttggtcatcatgagcaccgctccggtgttgcagccctccttattgaatacggcgcggcactcgtcacagatacagaaattctcgctgtcgggctgcgcgatatcgatcgttacgatctcgcgtccgattctctgacccgaggcaatacactctgccgcatggcgaagcgcatagctttcgatcgccgatattatggcttcgtcggtgtagcagggctgtccgccctccgtgcgaagtccgccgtattcatcgttcaggaatatctgcgaatgagcggcgtcaatcccgtggcaggctttgcccgtaagtccgtaagcacccggcacgccgagggacgccttgaatttcggggaaagagatgtgccgtgcattgtgtctccgccgtcgaagatctcacggtaggcaatggcgggttcgctcatacggtcggtggcggaggtcacgtcaacgtggtcggactcgtaaaggtagtctgtttcaaaatccggatttccgaaaaggttgccgtaggtatcgttcacgaatctccagccgatgtcctcctcgagaaaatcgtatacaccgtacatgcagccgcggtagcgtccgcccgtgattaccacatcgcccgaacccgtgacctttatcgaaaacgcttcgtctccgtaatcggcaacactgccgatcgcaagacggagcgcgtgcgcaggagctgcgtcgtgatcggtcacgatcgcaaggcgcgctccgcacgtcttttcgatatagctctgaagctcgtccgccgccgcgtccatgctctcctgcgcggcaagcggctcgtattcggtcacatccgcgaccttaactatcgtgtattcggaaatatcgcgcccgcacacggtcagcctcttcacgcggtatccctcgtgataggtgatgtcaagcccgtccgcggttccgctctgcacggctttcgcgtacttgcggacgccgcggtcaagcccgtccgcgctccgtccgacgataagcgcattgcctgcgtcggtgcggatgacgtagccgtcgttctcaaaatcgctcatgtcgatgccctttgcatcgccgaccgcgagatacacttcgtcggtcaggcgatccccgagcttttcggtgagccacaccgcgctttcggcggcatccgacgacgatacggttatcttcggggaatatttctccgcagcgcgttcgccggagcaggacgcgagcaccgacgatacggtgagcacgctcagcgcaagtgcgagtatctttttcataaatctattctccttcggaggaatattcttttcccgtatatgcgcgattcttcttccttaactctatcataccgaacattttttgtcaagcgaattacggaacaaaaaacgaaaagtcaaaaatcaccgtaaaatccgccgaaacgcacaagaaaatgccgtgcagacagcagtctgcacggcattttttcatcattgccgttataacttgtaagtgcgtacctcttctgcgacgcgatccgcaaaagcaccgatctccatcgtgccgaggtctccctcaccgcgcgcgcgaacggaaatgttgcccgcttcctcctcgttcgcgccgaccacgatcatatatggcacctttgaaagctgtgcttcacggatgcgatagccgatcttctcgtttctcgcgtcaagctccgcgcgcacgcctgcagccttgagcttctccgtcaccgtctcggcatagtccgcaaatgtgggcgatatcgggagaaccgtcgcctgtgtgggcgagagccataccgggaacgcgcccgcgtacttctcgatcagcagtgcgagcgtacgctcgtagcagccgagagatgtgcggtggatgatgtacggtatcttctgcgtgttgtcgctgtcggtgtagtacataccgaacttctcggcaagaagcatatcgatctgtatcgtgacgatcgtatcctccttgccgaacacgttcttgcactgaacatcgagcttcggtccgtagaacgccgcctcgtcaatgccgatcttgtagtcaagtccgatatcgtcgaggatcttcttcatcgtcgcctgagcctcgtcccactgctcgggagtgccctcgtactttgcgcggttgttcggatcccactgtgagaagcggaaggtgcagtcctcgagaagtccgagcgttccgaggaagtacttcatcagatttacgcagccgaggaattcctcttcaagctgatcgggacggagcacaagatgtccctcggatatcgtgaactgacgcacgcggatgagtccgtgcatttcgccggaatcctcgttgcggaaaagcgtcgaggtctcgccgaggcgcatcggaagctcgcggtacgagcgcttgcggttcagatagacctgatactggaacgggcaggtcatcggacggagcgcgaagcactccttggtttcgtcattcgggtcgcccataacgaacattccgtcaaggtagtgatcccaatggccggatatcttgtaaagctcgcgcttagccatgagcggagttttggtgagaaggtatcccgccttctcctcggtgtcctcgacccatctctgaagtctctggattatgcgcgcgcccttcggaaggattatcggaagtccctgaccgatgcagtcgaccgtggtgaaaagctcaagctcacgaccgagcttgttatggtcgcgcttcttcgcctcctcgaccgcctcgaggtgtgcgttcagcatctccttgttggggaacgcaacgccgtaaacgcgctggagcatcttgttctcgctcttgccctcccaatatgcgccggtgcactgtgtaagcttgaacgcctttaccgcacccgtcgcaaaaaggtgcggacccgcgcagaggtcggtgaattcaccctgacggtacagggttatgtcctcgccctcgggaacacggttgataagaataagcttgtaatcctcgcccttctccgccatcagcgccttcgcctcgctgcgggatacactgatcctctcaaggcgcagattctccttcacgatctttttcatctccgcttcgatcccggaaagaagctcgggcgtgaaagaaatatcgctgtcgaaatcgtagtagaagccgttttcgatcgacggtccgatcgtcagcttcgtttcggggtaaaggcgttttaccgcctgtgcgagaatatgcgatgcggtatgccagaaggtgcggcgtccgccgtcgtcggaggtgtcggttccgttctccttcagtgctccttcaaatgtgagaagcgtgatctccgagtcctctgcaatcggagtggtaaggtcgcagaccttatccccgatacggcacgcgatcacgctgcgcgagatcagccccgccgccgctgccgcgtcgtagaccgtggtgagcgcttcgacctcgatgttttcgcctgttccgaattttacttttatcatgctctgctcctttccgccttgcggcgtcacaatatttatctgaaatcgtatgcaccggacatctccggtgtcgagctccggaattctccggaaaaaaaacgccctcgctccaaacacaatgtttggggtgaggactcagtccgcacggttccacccgaactttaacttcattcgtatcagattgacgcgcagtatatgcgcgacgggcggtatcacttcggttcgacacgggcgctcacagcatacgcgccgttctctgagtatcggttctccgggtgacttgttccgtaaaataaagtatatgcgttttttttcgccttgtcaagacttttttgaaaaattccgtaaattcccgcccgtcggagcgaaaaatcccgcagcgcggcagcaaaacggcgcacggcggcaaaagctcctccgagaggattcaccgcgcctctccgtgatgacgcgcctcacgaaacatcgcggggatgcctcactttcgaaaggcatccccgatatgcaatttaaagctttccgttccacagaaggattatcactatcaccgccgccgcgcagagtgcggatgcgatgacaactccgaccgtcatgcgcggacggggcgaagttttctcggacttcggaataagtccggcgcggcggagtgcggacgacacgccgcggtagagcaggagcgtaaacgaggcgttgagcgtgcttttgataaggttgaacggggcaaaaacgggcagcagcatcgcggctaccgcgctccgcggatatcccatgtagatcggcgtgatcgcccaattccagagaagcatcatagcagtcgagagaattattccgctgccgagcccgataagcgcgccgccgagcgtccgctttcttttatagatgaacgatgcggtgcatgcaaacgcgcaggtcgatatcacgttcatgagaaatccccagaatcccgtcgtcgatatcgtcgccgtttcgataagcgacaccgccgccgacattccgaatgccgccgccggaccgtatatgaatccgccgatcgtgataatgacgtccttcggctcgtacttcaggaaatcgagcggcgctatcggaatgcgaaacagcagcaccgcgacgtaagcgagcgccgagagcacggcaattgtggtaagctttctgattttttcgctgttcttcatgtgaaatcctttctgccggtattaccggataccgaagcagtcagcgaatccacgccgcatcacagatgcggacaaaaatcccccggatctctccgggggatatcgaaaaagcggtatatgccgtcttctcacatccagactttactgtcggttttggaatcacaccaaatcatgcgcagcgcgctcgcggactttaccgccggtcgggattttcaccctgccccgaagactgttcggttgtatgtgccgtccgtgatttcggatcggctcgggaaagccgcacttccgtgcgctctcctcaatgtaaagtatactccgccatcgcgcatttgtcaatatttccgcgcacattttccgcaccgtcacgcatttttccgaagaacggcaaacgctcttctcatgagcgctcacgccgctccggaggcaatgccgtaccgagtgcggcggcaaatcagagtacgattcgcagcgtgtgatgtcccttgtccgacggagcgtcgaatacagcgctgcagcgctcgccgtcgagatagtactcggtcgaggcggacggacgggcaaagcccttcttcttctcgacggtcacggaatattttgtgccgccgcggttcagctcgaacgagctcttctccgcgtcaaacggcagtatgggcgacacggtcatcttatctccggaatacgaaattccgaggaattcgctgacggtgagcgagagccaacttgccgtgcccgaaagcatggggccgacattctcgagagtttcggaattattgtactgcgtgcagaagcgcggatttccgcagtagaggaacggatcggcgatcgccttgaacggatacacgcggtcgagcatccaatgtccgagagaggcaagctccgcggcaagcgtcgcgtccgaaacgctccttgacgccttgaagagcgccgccgtacacatcatcgtagcgtgcttgaacaccgctccgttttcgcggtcgccggggaaatagtgctcggtcgccgtctgcgacgaaatcttatcgaggtcgcacggcgtcgaaagcttcagtcccgcctcgcagcgaaggtgtttgttgaccacgccgagcattaccgcgatctgctcctcgctcgcggtatcggagaggatcgaccatgtgaacgaattgaggaagtacgagccctcgatatcgggatcggcggaaaggcggtcgcccgatgcgccgacgtaggtgtatccgccctcgcgctcgctgttaatcatcgcgcgcgcgaagaagttgcccttccatgcgtgcttctgtatgttatcgtaaagctcgcggctcatctgacgaagctcggcgcactcagactcgcgtccggtcaggtgtgcaagctcggcaagctcgtcctcggcgattttgagaaggaatgcgttcatcacgctctcgcagaaatgcgaacggaatctcgcgccccagctctcgcccgtctcctcaagctgagcgcggtagcggcgctccttctccggtccgtttatccaatcgaggtcgagcttgaggcagtcgttccaatcggcggcgtcgaggatcggcataccgtgatctccgacggagatctttccgctgtacacgataagcgctttcattgtgtcgtagagcgagcgcgtcttgtccgaacccgcgatgcggtactgcgcatcaaggaatccggtgtcccccgtgagcatgatatagcggtaaaccgcctgaacgagccagagcgcgtcgtcggagcactgtcccggctccttgccctcgtagtagaaattgtggtttgcgtatcccatttcgtacacgttttccgcccagcgcgatatcatatcgcgcgcaaggggcgcattccccatcgccgccatgtaataaagggatgcgtacatatcctggatctctcggaagccgatctgacggaacgccttctgcgtccatgcaaacgagcgcgagacgaatgactggtagaacacctggaacggaagattgcggtttatgtatgcgtcgcgctgcgcgtctcccgtatcgaggcgaagatacgaggaatatctgtcatagaaggatgtcacgtcgccgagcgagcgaagcacctccccgggtgcggagaagcgggtgatgagggcggaaagcttggcttcgaacgcctcatggcagtcctccttctccgtgaccattccgacaaaggtgtcgaactcccgtattgcgcccggtgcgagagtgaagcttttgcccattgcaaagaatggagccttcttgcgctgcggatgagacggcaggtatgcgacgttctgaggatggcgcacatcgcccgtgccgaagaaatcggtgtagctgaccgaataggaatccattccctctccgccggagagaagcaccgcgaaatgcttcgagaagcggtgatatctcggccaatagttcggcgcgatcgccatgacgcgctctccgtccttcatgactccgctttcgtggcagatgtggcagtatacgatatcatttgcaagagcgttgttcggatacacgccgaacattcccgttgcgactattttaaggctgcgctcgcgtccgctcatattctcgaccgtgatatgctgcacctcggtcgcctgcgggagagaatcgtactgcggaagcacaaatatcgttctcgttatgcggagaccgcactccgtctcgtactcgatcacggtatgattctgacggtgcgtacagaacgcgctctttacgttctcccacacgttcgccgagaagaatatctgacggtcattctcgacaaggtagaactgcctgttcgaaggatcgccgttttcctcctgctggagcaccgcgcgggtcgcggtgacctgctcgtccgcatgagcgcggaacgatccgccgccgagagcgtcaaccgctcccttcggtgtcgttataagcggattttcgcagccgatcctgtttccgatgagaaggtttatcctgtaatgcgtcgagacctccggggtcttcagatcgataatgtgctcaccgtcgctgccgagctcgccagcggcgcggagatattctccgacggtctcgcgcacggcgttttccgccgtctcgccgagcgggagcgctgcgccgtcgcccgcggtatgggttatgctgtcgccgaaaatgataaggtgggattcactgtcgttctcgaacaggggcgcgatcctcgtatcgttcataagcgcaagcgcgaccggaacgcgcatcggcagtccgccgacggcgaacacgcggctgcgccgcgcgtcgagatattccgcgtcggtgtatccgctgccgagccttccgccgaaagcgctcatcgcaaaagaggcggcatccgtataattatcgcgcgatttttcttctgtaagcttcatataaaaactccgttttccgaatttactttccgccgacgcggacatttttcgtaacgcggcggcgaaacgcgctccggcaagatctgcgccgccgcccgacaaatccgattctattttaccataaaatatcccgtttgtgtagtactgcggcaaaaataatctgcggagagcggatgaacacggcggttgacaaaaaagccgcgccggattataatatttgcgtatcggaaacagcagactgcacccgtgcggcggtgccgctccgtcatgcttccggtcacgataaagaggaaaggacgctttcgcccgccgaaagccgaaattatatcaaatgtcagaaaacacgtcatacatactccgcgcgatgacctccgacggcagcgcaaggataaccttctgcgatctcaccgacaccgtcaggcacatggcggaaatacatttaccttcaaagacaatgaccgccgtcctcggcagggtcatgtgcggtgcatcgctgatcggatcgcttctgaagaacaaggaggattcgctcacgcttcgcatcgacggcgacggacctgcgggaaagataatctgcgtgagcgattatctcggaaatgtccgcatctgcgccgatcactacggtgtcgagcttcctccgaacgcaagcggcaagcttgacgtaggcggcgcggtcgggcgcggcacgctttatgtgatacgcgatctcgggcttgcggagccttacatcggaagcgccgcgctcatatcgggcgagatcgccgaggatataacaaactacttcgccgcaagcgagcagacgccgaccgtctgtgcgctcggagtgcgcgccgatacggaaaagcgctgcatcgcggcgggcggatatctcgtacagcttcttccgggcgcggacgaggggatcgtacccgcgcttgagcggaacatggcttccatggagtccgtgtcaaagctgataaaggacggcgtgagcggcgaggaaatcgtcgcgcgtgtgttcgacggaataccgttcgatctgtttgacaagttcgaatgcggatacgtctgcagctgttcgcgcgagcggtatctgtccgcgctgcgcggtctgccccgcgccgatatcgacgagatgaaggcggacgggcagccgatcgaggcgctgtgccgattctgcggaaagaagtattcgttctccccggacgagatcggctgacgctcagcacatccgacggcgcgtccccgaattcggtgcgtaccgtcggcgcaaggctgcaacataaagaaaaaagccgtttccgaagcatccgagactgcttcggaaacggctttttattttgtacctttacagatcgagcttcatatcctcactcttgtaaagcttcagcttgagcataagctcgctcagcgcaagcgtaaggactgccgggatcacaacgcatatcagcacgagaccgatccactgaaacgcgcccatctcgccctcggcgccgatcacgccgagaggaccgacaagtccgctcgttcccatgcccgcggaaactccggtgttcttcagcttgaacacaacggtcgaaagcggtcccgtcaccgccgatgtgattatcgtcggcagccatatctgcgggcggcggattatgttccccatctggagcatcgatgtaccgagcccctgcgcgataagtccgccccagcggttctcgcggaagctcatcacggcaaagccgaccatctgagcacagcagcccgccgttgcggcgccgcccgcaagtcccgcaatgccgatcatcgcgcagatcgcggcggacgatatcggcagagtgagaatgatacccacgacaaccgaaacgatgatgcccatggcaaacgggcgaagctcggtcgcggtatttatgaaatcgccgagataatacatcacatacgcgatcgcggggcatatcaggcgggatatcccgtatcccgacaggatcaccgtaaccggagtgacgattatatcgacctttgtcgatttatatacgagttttccgagctcggcggcgacaagcacggcaaagaacgcgcctgcgggtcccgcggtatagtttatcaccgagccgtccgcaaggtgaatctgcgcgccgagcatatatccgatcgcgccgaccgcgaccgatgaataaagcacaagcccctgtgcgccgagtgcgaacgcggcggcgattccgatcgatgccccgaccacatatccgttctttgcgaacgcggcgatttctccgagaaactcaatgccgaatttttcgccgatcgtaccgagaatcgttcctatgagaagggaggcgaaaagcccctgtgccattgcgcccatcgcgtcgataaagtaaagcttcagcgacggtttaacgcctttcttaagaaaaaatgccttgatctttcccatgccggtatccgtgcccccgattcgcggggactttcctttcagcggattttatgccgcgccgagcggtgtttcgttaatttattctacaggattttcctgccattgtcaattgacatattgcaagataaaagcgcatcttcggggaatttattgtacaatgacttgcacagggagacaaaatgatgtatcattgaagtaaatcttcaaaattccgcgttaggcgcaaaaggaggacaaagtgagcagcacaatatggaacccttggcacggatgcaccaagtattccgaaggatgcgcaaactgctatgtataccgccgcgattcgtccgtcgggcgcgacgcatcggaaatatacagaacccgttccttcaatcttccgataaagaaaaagcgttccggcgagttcgcgatcgccgcatcgacaagagtgttcgcctgcatgacctcggatttcttccttgattccgccgatgtgtggagggacgaagcgtgggatatgatcaggcagcggagcgatctgccgttcacgataataacgaagcgggtactgcggataaaggactgcctgccgtccgattggggcgacggctgggacaacgtatgcatctgcgcgaccatggaaaatcagacgagggctgacgagcgcctcggcgaatttcttgcgctcccgctcaagcatcggcggataatatgcgagccgtgtctctcaaagatcgattttcacgggaagctcgacgcacgcatatcggggatcacggcgggcggcgaaagcggaccgaacgcgcgcatctgcgattttgagtggatactttatctgcgggagcaatgcgaacgcgccgggatcggttttcatttcaagcagaccggcgccaaatttctgaaggacggacatctttacagaatcgcaagaaaaaatcagcactcgcaggcgcggcgcgcgggaattaatatagacaaataaagagtgaatcggaaagtctccgccgatgctcggaatacgcaaagacatactccgccgcacgacttcgaaagccgaacaatatcgcaaggcaaaaccaatcagaattgcaaaagcaaagccgaagaaaaacacaaaaacagggtgccgcactgcggcaccctgtttcgataggttacgatttacttgataacgttttcccagccggagagatgacggataaggtaaatgagatccttggtgtcgatcttgctgtcgttgttgagatctgcaacatcttcgcagaagctgatgtcgctccagttgttgaggaagcggataaagcagatgagatccttcatgccgacggtatcgtcgctgtcaacgtctgcaaggaacggaagaacatgagtttcttctctgccgcaggtgtcgcacttaacgtccttcttaccgtgagtagtaagggtggacttggtaacgatcttgccgctgccccacttgtgaccgaatgcctttacaactgcgtcggtgtacttgtcgtggcaaagctcacatctgtgaacggtgtatccgtcgtcgttgcagtctgcatccttggtgaagtctctgtacttgtggtcaagctttgcaacggtcttggtctcgataaccttgtggcagtctgcgcaaacgatttcggaagagccttcgttgtagcagtcggcgctcttggtgataaccgtggtggtgttcttgtgatcgcagatcacgagcgttccgctgacggtcttgcctgcaacagttgcgctgatcgtcttggagccgctctcgccagtgccgacggaaacggcagcgtatgcataaagtccgttgtaggagtgaccgatattggcaaccttggtaacgctgccgagagagatcgttgcgtcggtgttcgtaagcatgccgtcgtttgcttcgatgttcacagcgatgatcgcggtggagcctgcctcagcgtatacggtggggataactgcgtgagccgcggtctcggtgagagcgtatccggctccggagaaagcggaagccgcgcctgcggaatgtccgatcttgaagccgttcttgcagccttcaaaagccttatcgccgattgcggggcagtgatcgagcatgttagccattgcgaggttggagcagttccagaaagccttttccatgatcgtggtgcaggtggtgggaatggtgacctctgcgaggcttacgcaatcccagaaagctgcgctgccgatggtctgaactgcgccgagagtaacggaagcgaggcgagagcagtgccagaaagcaagcccggaaacggtcttcaccttctcgccgaatactacgttggtgagctcttcgcatcctgcgaatgccatttcaccgatagtctcaacattgtttccgataacaacagaggtaactgcggagccattaaaagcatttctgccgacagcggttacggggtaggtgcccgtcgagtccttgacgtactcgggaatggtgaccgcgccgtttccggtatagccggaagagcagctgtcggaataggtgttgacgcctacggtagccttaccgtttgcaatcgtgtagcttacgccgttcggatccttaccgtcggtaaggttgaaggtctctgctgccttcgggaaagtataggaagtggtcgcggtagcggggataaccataaccgcaacaatcatcagtgcgcaaagaagtactgaaatgattcttttcatgtttttctccgttctgcctttattaggcatctttctcattttttattgacgagcgtccttatgatcattacgagatccttcatgttgaagtttccgtcgctgtcataatccgcgcatacatctgtctcgatatcccaccctgcaagggcgcggactgcgagaacaacatctttcatatcgagtgtgccgtccgaattgacatctccggggaatgcgtcgccgagtgttctcggattattcgcataggcatcggcattctcggcggtatcgaaaaatctgatcgccgttatctttatgcccttgccctcgggaatagccccgtcggagccgttcaggacgagttttacaccgaatatacgcccgtaccaagcgtcaagatcgctcagtttgacaacgatcgtctgccattctcccgtactttcgaattcaagctgtttataagcctcgttcgtttgtgtgtaagtatccccgacatcaacaaatatgccgagctttatatcctgcgcaactcccgtatccgcgcgaaccgtaatcgccgcatatccgttcgaggcggcgtttgcgccgaggaacgcgaactccacgctcggatcaagtctgcccgttgcggcaagcgcaagagagtatgccgatatgcctgcatttaacccgtctgtcttcttaacctgatctatcctttccgcactgtcaaagacatacgcattttttgcggcgtgcccgtacgaaagtatcaccgaattcacaaccgcgcgttctttgccgtaatttccgttcttatccttgtcgcacggacgaccggtgagctcatacccgccttcaccgtcggtaacgctcatcgacgcgcttccgccgccgtcaaggaggaatgccgtaactattccgagatcgctgcacaaggagtgaagatcggagattttcattcccacactgtagccggtggacttctgacgtccgtagcttgtgagcattacgacttttccgtcttcctttattccgaggatcgaagtcggataattgaccgtgttgggaagaagattctgctgaacgtctccgtttatcacgatcggcatatgtccgccgacgcagttcgtgacggtctgccacttttcggtgttgcccatatcgtcacggatcgacaccataacgttgacttcgtcgcctatctcgaacgaggcaagcttcgaaagcgcgctgccgcgtgccgtgaagatgaggcgtccttccttcatcgggagtttttcctcgccgggcttcgttatcgccgcaacggttccgctgacgagcgagccctgttttatcctgtatccgtccgggcagtcaacgacgacctcgtatgcatccgaaagagcgtagtttgaagcataacccttatcggtgtacatcacaagtgcgttgtttgcgggcagacggtttattccgtcaacctcacatatagtattttttgtgcgatccttcagtctgaccgttgttattatattgccgagcatcgcctcgccgtcggagcttatgccgaacgattgaaacgtgccgttgtacggggtctcctgcaccatgttggtcgtacagattatttctccgccgtacattgaaaaaccgcgcggtagcgcatacgccttcgtgacgaccgcatccgagtagccgtcaacgacggttcccgatccctcgacgcgtacatgatacgacgggatcatccacatatcgccgttcactgcggcgatcgcggttttgtccccggcattcttatcgttgaagcgccggatcgtatttctcggagtgacaagcttgcttgcgtaatccccgccgcccgtaacgtcgaaatacaaatccttctgtttcggatcaaattcaaccgtgctgaattcctgaagtccgtaatcggattccgcggacagtgaatatttggtgagcgtaacgcccggataaagagtgctgacactgcgcgatgtttctccgctcagcgtaccgtcagacgactcggcataagcagtaattacaatgcccgaaaatgcaaggctcagtgcacagataagcgatatgaattttttcacagcagctctcctttcccgaaatccgtccgattccgcaatggtcctgtctaagtatatcacagccgaaaagaaaacgcaagacttttgtgcaacatttttgacaaaaattcattttgcggctattgcattgttttatatgctgtgatagaatttataaagcgggcgcttgtcggattcttttttaaattatgtgggagtttgtatgaaaaatgtcatactcataggcgattccatccgtctcggatacgaaggaagagtcagagaacttctcggctccgatgtcacggtgttttcgcccggcgaaaactgccggttcacgaaattcacgctttggggaatgttcagctggatggaggagtggggtaatccgcacatcgatgtgatccattggaacacgggaatctgggatctccaccgctgcaccgccgacggcgaaaacttcacccttctcgacgaattcgtcgacaccaaccgccgtcttgcgatacagatggaaagctattccgaaaacctgatctgggctacgatcacgcccggcggacgaggactcgacaggcacgagccgataaactccctgataaattccgtttccgacgccaagaaggtatatctcaccgactgcgagaagccgtggaacgaagatgtcgtccgctacaacgaagcggcggcaaagctgatgcgaagccgcggcatccgcgtaaatgatctgtattccgaacttgccgaagacaccgaccgctacataagcggagacggcatccacccgaccgaggaaggatacgaacgtcttgcaaacgcggtcgcgcgtgaaataaaggcgtttctctgaccgccgcacgtcgcatactgttttcacgcacatgtacacatatgtaatttattgaaaggttttgcggaagcatccgcgtcggtcacatggtattttcaagtctcgaatttattttcgtatttctcgcatccgtgctcgcggtctattacctcgtgccgccgaaggcgcgcaacatcgtgcttctcctgttcagccttgtattctacggctggggcgagcccgtttatgtatttctgatgattgcgacgataaccgtcgattacatctgcggctacatcatcgggcgcgatctcgattcaaagccgaagcgggcgaaggtcacgcttatcgtctcgatcgtgataaatcttgcgcttctcggcgtattcaagtattacgatttctttgccgggacgctcaattcgctgctcggcaggggagttttccccacgctcgggctgacgctgccgatcggaatatcgttctacacgttccaggcgctctcctacgtcatcgacgtataccgccgcgacgcgcgcgttcagaagaacatcgccgcattcggcacatacgttacgctctttccgcagcttatcgcgggaccgatcgtccgctacgccgacgttgacgatcagctgcgcgagcgcacgcattctctgacgcttttcgcctccggatgccgcacgttcatatgcggacttgcgaaaaagatccttcttgcaaacgccgccggcgcaatgtggaattcgctttccgccgccgcggagccggatgcgctcggcgcgtggctcgccatcgtattctacaccttccagatatactttgatttctccggatactccgacatggcgatcggtctcggaaaaatgttcgggttctcgttccgcgaaaacttctactacccctacgtttccgaaagcatcaccgaattctggcgaagatggcacatctccctttcgacatggttccgcgaatacgtctacatcccgctcggcggaaaccgcaagggcgtcggaagaacgtacttcaatctgttctgcgtatggcttctgacgggactgtggcacggtgcaagctggaacttcgtcctctggggactctactatttcgcgcttcttgtaatagaaaagaccttcctactgcgcctgcttgaacgcgcgccgaattttctccgccacatctactcaatggcggcagtcatattcggctggctgctgttcgtgatcgaggacgtatcctcgatcggggcttacctgtcacgcatgttcggcggcaccggggtatttgcaacgcagatcaccgtatatgagcttgtgcgcaatctcgtgttcctcgcgatactaattctcgcgtccactcccgcgccgaaaaagctttggtacaaactgtacttaaagggtacgccgtggaggatcgtgcagtccgtcgtgtgcgcgatcgcgtttgtcctctgcatagcatacctcgtggattcgtcatacaacccgtttctgtacttcagattctgagaaaggagtgattcaatatgttaaagcacgatgaagccgatctcgtcgccgaaaaatatctcaatatgcagcttgaagctaaggaccgcccgggcgatctgaccgtgaccctcgccatcctcctcatcatcgcatttttcgccgccgcgttctggataatccccgaccgcgcctcctccgaagaggaaaaccgcgtgctcgcgcagttccccgaattctcgccggaatcgctggaatcgggaaagttcacctccgattttgcgtcgtacatggcggatcagttcccgatgcgcgacaccttcgtcggcataaaagcggcggcggagatatccatgctgaagcttgagaacaactccgtaatgctcgcgtccggcgataccctcgcggagcgctttgacaccgtgaacaccgacaacgtaaaggtgaacaccgacgcaatatacgctttctgcggcacgctgaacagccgcggcatcaccgcgcgatttgcgctcctgccgcgatcgatggatattttcgatatcccgttatacggtcgcggcgcgtccgagagagaatggcaaagcgtgcgcgatatcgccggagacggcatgatcgatatgcgcagcgtattcgacgcgcacagcggcgaatacatctactaccgcacggatcaccactacacgacgctcggcgcgtactacacatatgctgcgctcggcgacagcctcggctacacgccgaactccgttgagcattacaaacgcacggaggcgtccgactccttcttcggcacgacctactcaaaatccggaatgaagtggatctcccccgacactgtagaatacttccgatgggacggggacgacaaactcaccgtcacggtcgccgaaacgggagaggtgagagacggactttactttgaagaacacctttcctcgaaggacaaatacgcatcgttcgcgggaggaaactttgcccgcatcgatatcgcccgtcccggcgaggtgcgcgaaaagctccttatcgtcaaggacagcttcgcgcacgcactcgtgccgtttctcgcggagcatttcgacatcacgatgatcgacacaagatactacaaacgacccgttataaagcttgcggaggacgagggcttctcccgcgtgctcgtgctgtgcaatctcgacacgctctcgtcggcaaagccgtttgagatactgcgcatgggtctgaaataacctttctcagcccgaggcggaaaacgcatcgggctgttctttctttcacgaaaaagcgtgtgtttttacctcttggcacgaaaatccgacctgtcggcaaaaacctctttacaaaagaaattctttcggttatacttgaattgtaagataaagcaagacagcattttataagacggctccggctgatactgcggctccgtcccgaaacggtggggagtaagatgaaacttcgtatcgagatcatggatgaaaaagaaatcagcgaaggcgccgaagaagagcttgtactgcgctgccgtttccccgacgagaggataatgcaacttcagcgctcgcttgctgcgatgatcggtgcgggcggtgagatctgtctgcacctcgaggacgaggaattcttcgttccgtacggcgagaccctcttcttcgaaacggacggtgcgcgcaccgcggcgcatacggcgaaggcgatgtactacaccgagcttcgtctgtgcgagcttgcggacatcctcccctacagcttcatccgagtttcgaagtcgtgcatcgtcaattccgccgcagtaagctcgatcacgcggaacgtaacgggatcaagcgagatccgctttcgcggcggcaaaaaaacatatgtctcaagaaaattctacaaggatctgatcgaaaggatcagggaaacgaggttacggtaatgaaaaatttgcagactgcgaggttaaaattaaaatttgcaggttcaagcatcttctggggcgtggtgctcatatgcacagccgtgctcctgatattcaattcactcggcatcagcgtcggatatctcgacggcggcggacttcccgtagtgcgcatcgtgctcggcgtgctatgtgcggcatggctcataacggagatcgtcaagctccgctttgcaaggatattcttcccgctcgcgttcatcctcctgctctttgaaggagagctcgcgtcaatgctccatgtgcccggcaaggacatatattcctcatggacgatccttctctgcgccgcactgctgaccgccggggtctctcttctcacgcacggcagaaaccgtcacttcaaaatcggcaaggacgacggcacgctgaatgtcgagttctccgacaaaacagaggagcgggacaacgaaacggcagagcacgacgacggcggcgatatcacctgccatctctcaagcgtgacaaaatacatcgactgcacgaacttcacaaagaaacagataaactgcgacaagggaagcgtggagatattcttcgaaaacaccgaccgctacacgggcggcggcgagcttgtgattgcaaacaacatgggctccgttgagatccatatccccgaagattggtacacagtcggcgatatcataaacagcctcggctctgtcgagctgccccgaatgaccgaaaaatcggtcaagcctcttcgcatcagcggagcaaacaatgtcggctccgtgaaaatatcccgataaacgaaagacgcgccgcgcaaacgacagacgtttgcgcggcgcttttttattcggcagcctcgacgctgcggcgctcggtgacaaaatagtaaattatacagagtattatactgagcagcgtcgcaagaggggacgcaaatccaatccggagcatcgtgactccggtgcggcggctcatgaaatacgaaaacggaatacggacgagaaatgcggcggcgataccttggatcatgacgaaaagcgtctttccgcagccgttgaaatagcccatgaagcagaacagtatgcaaacgagcagacagtcgatcgcatacgatttcatgtattccgcgcacgccgcgacgacctcgccgtcgtttgagaaaaccgcggcaagtatatctccgcgaaagaacgaaaacacgaacatcgcaacgccgaacacaagggatatccccatcgcgcaaagcatggcgcgtcgggcgcgctgcaccttgcccgctccgatattctgcgcgacgaaggcggacaccgacgacatgaaggctatcggaatcagcatgataaacacgacgatcttttcgccgacgccgatcgccgccgattcgataagtccgagagaatttatgattgccgttattatcagaaacgacacgcttgtaagagcgtcctgaagcgcgatcggcgagccgaggcgaaggatcgtcaccgtgtcggagggattgaatcttatattcttcaccgagaacgggaacggcaatccccggcggcggagtattataagtccgatcacgacgctcaccgcctgcgccgccgctgtcgcaatcgccgcgcccgtcgcgccgagaccgcacggaccgacaaggacaagatcgccgacgatattcaccacgcacgcaatggcaacaaacacaagcggcatcttcgaatctccgagacctcgcagtataccgcttatcacgttatacgcaacgataaagacaattcccgccgagcacaccgcaacgtaccgcacggtcgaggaaaacgcctcctccggcgcgttcatcagatgcgcaaacgggcgcgcaagcaagagcatgagaacggtcagcaccgccgcaagtgcgacaaaaagcagcaccgacgttccgaccgcgcgtgcggccttctcgggcttgccctgaccgatccgctgaccgatcagcacggtcgtccccatggtcagcccggtcacgatacccgtgacggtctgcatgatctgactgccggtggcgaccgccgaaacctgggccgtcgccgaaattcctccggcggcacccgagccgaactgtccgacgacgagcagatcgaccgcgccgtacagcgcctgcaaaaggatcgcaagaagtatcggcaccgtaaatttgagaagaggggacgcgatctttccctcggtaaagttggcttccttcatatattgtatatcccgccgccgggctccttttcgagtatcggtcgcgcgaacataaaaaagccgcataaaataccgggcgctcccgacatcttatccgaccgttgcaaaagcgtttacaagtcctccgatgaccttataaaagtatatcacatgatatgtgcactgtcaacaccttcgccgcgcgtttttcggcaaaaggaatacagagcagatcaagagtgtgctccggaaggtattgattccggaaagccgaaaaaaatcgggcattcgcctgcaaggtatcggtgaaaaaacgcagcacgctttcccgtgcacaaaccgtcggacgtttctgcacagaaatcgcccgatgtgcggatcaaagagaaaagctgcggagaacggtgctctccgcagcttttaatttcagtcggacacaagaaccttatcccaaagactttcgtagtacgatcttacatcttcgggaaggtcatggaagtattcgcacttcggcatatcttccttcgcgggataaaggtactcgtttcctttgagagaatactcgtcgttgtcgataaccgcggtgttcggcgatgcatagcggatgtactccgcgttggcaagcgcgacctcgggttcaaggaggaagttgatatacatcatcgcggcatcgtagttctgaccgcccttcgggacgcagaccgaatccacaaagatattcacgccctcatccggatatacaaatccgaggtcggggttcacctccgccatggtgaggtagtctccggcatagtaagcggcgacggcggcgtttccctgctccattttgttgaacacttcgtcgtttactctcgcctgaagtacggcgttctgctcggtaagcttcgcggcggctttgtcccaatcggcggtatcgttcgagtttatgtcaagaccgaggaggaactgcgcgatgccgaatgcgtcgcgggggttgttgaaggtgagaatgtcgtcggcatacttcgaatcccacatgatgttccagcttgtgggctcgccttcgaccatggttttgttgtagatcagtccgaccatgccgacattgtaggggacggaatactcgttgttctcgtcgaaatagagatccttgtattcgtcggagatgtacttgtaattgtcgagcttcgaaaaatcaagcttttcgagcattccttcattcttgaggcgctcgatcatgtaatccgaggggatgattatgtcgtaagcgacagcgccgcttttaagcttggagtacatcgcctcgttattgtcgtaatagctgtaattgaccttgatcccggtgagcttttcgaattccttgttgacatcgaaggaatcctcggatccgtcggatatgtattcgccccagttgaagacgttcagcgtcgtaccctcgaggtcgcgcgaatatgttccggtatatactttatctccgctgtctccttttccggaggagcagccgaaaagcgtaacggcaagtgaagcggcacagacaagtgcgagaatttttttcatttaatgtatcctttccttgaagaattatttgtgaggggcgcggcgcgactttttctcggccttgaactgcatgagatttatgcacacaagcagcatgagcaccgtgacgaaaattatggtggaaagcgcgtacatatcgggcttaaccgtttttttcgtcatcgcgtatatcttgagcggcagagttacgaaatccgcgcccgttgtatagtagcttatcacgaaatcgtcgatcgaaagcgtgaacgccatgaggaatcccgaaaggattccgggagaaatcgcggggagcaccaccttgaagaatgcctgcatctcggtcgcgccgagatcgagcgccgcctcggaaagatgacggtcggtctgcgcaagcttcggcaggacgttgagtataacgtaggggaggttgaaggtgatgtgcgcgataagtattgtcgcaaagctgagagaattgcgcgtgccgatgaagcgtccgataaatacgaaaagcagcatgagcgacacgcccgtgacgatatccggattcatcatcgggatattggtaacggtcatcacggagcttttgaaggcgccgcgtctcatcttgaatatcgccacggctgccgcagtgccgagaagcgttgcgataacggcggaggtaagcgcgaggataagcgtgttctgaagcgccctgaccgtctcgccggaggagaaaagctcggtataccatttgagcgaaaagccctcgaaaaccgatgtcgatctcgacgaattgaacgagaagaacaccatcacgaaaagcggcgcgtagataaacaggaacacaagcgcggcaaaaatcttaccgagaagcttcatcataccaccagcctttccgcatcatcggaggcaaagcggttcattatcgccatgcttatcagtatcatcaccataagcacaagtgatatcgacgccccgaggttgtagttgtactgctgctgtatctgacgctctatcgcgtctccgatcagcatgatctttccgccgccgagcttctgcgaaatgtagaaggtgctgacggacggcacgaataccatcgttatacccgatatcacgccgggcatcgaaagcggaatgacaagcgtgcgaagccgctgaaaagcgttcgcaccgaggtcgtccgccgcctcgagcagtgttatgtcgagctttgacatgaccgtatatatcggcaggatcatatacgggaggtagttgtacaccattccgagtatgaccgcgccgggggtgccgatcatcttgagcggctcaatcccgaaaccggcgagcacattatttattatgccgtttcgctcgaggatgttcatccacgaatacgttctgatgagaagattcatccacatcggaagcatgacaagaagcatcatcatacgctgagtattcgcgccgaagcggctgagcgcatatgcgaacggatacgcgataacgagcgttatcacggttgcgatcaccgagtaccacacggagattataaaggtatccttataatccgcgagcgcggttatgttggaaagcgaaaacgctccgctgcggtcggtaaaagcgtagtacacgactatgaagagcgggaccacgataaagatcgccgcccatacgatatacggcgcggagagaaggcgcgctctgagagaagttcttttcaatcctgcgcctccggattctcgccgtcgggatcttcgtcatcctcgggctcttcttcaaggtcgctcaggtgttctatctcatcgctgtacgaactgtagtcgccgaacattccgctgtacttcgacttcttcattatatgtatggcgtcgggctcgacgaacaggcgcacgttctcgccttctttatgctcgtcggtcgtctgtatcatccatttgaagccctgaacatcgacaattatctcaaaatggactccgcggaacgtcaccgaggttatcgttcccgtaagctgacccgcgtcgcccggcacgatgtcaacgtcctcggggcgtatcaccacgtcgacagcctctccctgcgcaaagcccgaatcaagacattcgaactcccgtccggcaaagcgcacgcgataatcgcgcagcattcttccgtcgataatgtttgattctccgatgaaatccgcgacaaacgcattctgcggctcattgtatatgtccgtcggcttaccgatctgctgaaccgtgccctcgttcatgacgacgacggtgtcggacatcgacagtgcctcctcctgatcgtgcgtaacgtagatgaaggttatgccgagttttttctgcatattcttcagctcgttctgcatatcctttctcagcttgaggtcgagcgccgcgagcggctcgtcgaggagaagcaccttcggctgatttatgagcgctcgggcgatcgccacacgctgctgctgaccgccggacaggcgcgtcacgctgcgattttcgaatcccgacagattcacgaggcggagcatctccgtaacgcgctcctttatctcatccttcggtaccttcttaagcttcagtccgaacgcaatgttttcgtatacgttgtagttcggaaaaagcgcgtacctctggaagatcgtgttgacgggacgcttgtacggggggagacccgcgacgctttttccgtcaaaaaaaacttcgcctgactgaggttgtataaatcccgcgataactctcagcgtggtggtcttgccgcagccggacgagccgagcaaagtaacgaattcaccgtcgccgatcgaaagattaagccggtcgagcacgcgctcgccgtcgaattcaaccgtaatgtcccgaagttcaataacattattcaattttttatccccctttgcggaaaaagactacgttgagccaaagctctgcccagtcccacaaacggctaaccacaacccccgcaaagggtttttacaaaacggaaagcatccgattgcagttatggtttcacagacctttcggtcacggcttctgttcgaaactgccgcttgtgtatattcgtacaggcgcacgaattttaagacgatatcgtattgattatacatatttattcgccgattgtcaatattattcgaattattttgcatttttgtgaaagttccatatacggaagcagaaaaatcgaagaaaactcacgataattatgccgtgttgacgttttttcgtcctgcatgggcaaaatttccgccgtcatgatcggaagaagagacggcggaaatcgaaaatcggggacgaaaatatcccggagcgcgaaaaagcgcgctccgggaacaaagttttcgtattttcgcttatcgttttttccgccgtatgatattccacgtgcgcatggtcagcgacaccggcaggatccgcgtgaacacgtgctgcatatgcgacagcgatccgcagacgcagacgcgcttaccgcggtcgcagaagcggagcgcttttctgacgacagatcggctctccgacattccgggaaagaaattcacgctcgaggcgtcggtcttctccgcatttccgatgaattcggtcctcacccatccggggcagagcgcagtcacggtaatgccccggtcggcaagctcgaaggaaagcgcttcggaaaacgacagcacaaacgctttcgtggcggcgtatatattgagatacggcagcggctgaaacgctgcgaccgacgcaatctcgatgatctttgagccgcggtccatgtacccgatgcaagtatacgtcaggcgcacaagggacgtgcagttgagcacgatcattctttcgctttcgtcatcatcgacctcggcgaacgatccgaatctgccgtacccggcggcgcacacgagatagccgacacgcggcccctccgcttcaagcagctcctctatcttaccgagggattccctctccgtgaggtcgagcgcaagcacgcgcaccggagttttcacctcgcgcgcaagctcgcaaagcgcgccctctctccgcgcgatcgcccatatctcgtcaaatccgtaagcgtcaagctcacgcacgaagtccttgcccatcccggaacttgccccggtcactatcgcaatattcatccttcacccgcatatttatcgggaatcgggcgcgtatccgctccgccgggaagctctcccctcacgccgagccaattcgtccgcgcctcatcctcgagattatccgatattgacactctcatctgataaatggtagctatcgagcttatgttgtatttatactttttcatgcgtgaaataagcagatcgtattttcccgaaagctccttaaggcgcgcggtatcaccgtcgtcatacgccttgaaatactccgagcagcagattccgtaacagatgctcacactgagcgtctcgcagcttctctgctgctccgcgctgccggcaagctcgatcgcgcgttcgatcagcgcttccattgttgcaaacaaaaattgcgtcatatgattttaacacacattatataccaagtcaacagaatttggtttttttgtgagacaccgcggacatacataccggagagccgcagttccccggtatgcggggttgcagcactacacctgtttaacgcttcttaaagcgccgtatctcgtcgcgcaggaaggaaagcgcgtcgctgagtccgcccgcctcatcgatcagtccgcaggagaccgcctcgatcccgtcgatcagcgatcccgtatcggttgcgatctggtcggtcgcaagaaggtattccctgaatttttcctcggtaatccccgaatgcttggtgacgaatttgatgatcctgtcctgcattctctcgaaatagtagtaggtctgcggcacgccgatcacggttccgctcattctgaccgggtgtatcgtcatcgtcgcggacggaacaatgaacgagcggcgcgcgctgaccgcaagcggcacgccgatcgagtgaccgccgccgaggacgagcgacaccgtgggcttcgacatgcttgcgaccatctccgcgatcgcaagtcccgcctccacgtcaccgcccatcgtattcagcaccatgagcatcccgtcgatatcgtcgctctcctcgaccgacacaagcagcggaattatatgctcatatttcgtcgccttggagccgtccgtcaccgtgtaatgtccctcgatctgaccgattatcgtcaggcagtgtacgctttcgccgtcgcgccgcgacacgaccgagccgctcttcattatatattcaagctgctcgttctccgcgctccgttcgtccttcgtctcggatgcgttctcgccgctctccgtgaatctcgtttcctccataaagacctccgtatcccgttttctatattatcggaatagagcgtggtttttattcggaaaatccggcgaaatatcggaaatcgtaagttttgcggcgattgggcggattcgaacggcaggcggattttcgccgcccgatgcatccgatgcgaaaagcccatacgccgaaaagcgccgccgcgcacgtctccggtgtggcgaaatcggggaaacgcagaaatgcgggcggcatacgcgggcgagtgagcgcggatgcgctctctcgccgcaaaaagcgtcggcggatattgaaaaacggcgcaaaaagtgatattatatagaacggtgtccgcaatgcactgcggaactcgcgcggtgcgcgggaaaggcatgtcatgaagaaaatacgaatttccggagagggcgcatacgtcctcggtcaaatattcctcgcgtggggagccgcgctgatcaccgccgcgaatttcggcgtttcgatggtcgtcgcgcccgcttatctcatctcggagaagatcccgtttctcacgttcggaatgtcggaatacatatttcaggcatttctgctcgcggtgttctgcgccgtcgtcggaagattccgcgtaaagtacctgctgtcgttcgtgaccgccttcatttacggcaacctcctcgatctcgatctgtttatcctttcgctcggcggaaattatgttttcggcgtgagagtactgcttttcgccgccggggtcgccgccacggcgatcggtgtcgcgtttttcttcaacacatatcttccgctcggagtgtatgagctgttcgtaaagggactgtgcgaccgcttttcgctcgacatcggcaaaacgaagatcgcctacgactgctcgagcctcgccgtcgcgtgcgttatgtcggtcgcgtttttcgggctgtggccgcttcgcggtatcgggctcggcacgctgatatgcgcgctgctgaacggcgtcgtgatctccgcgttttcaaagctcttcacatcgaaattcgattttaccccgttgtggaactgccccgcatggatgaaataaggaaaaggcactgtctcggcagtgcctttcgtttattttcagtttgactcctcattctgcgagcggatcatgttaaggtagtagttatgcgtgtagatatccgccgagaaataggtctttcttccgtccgaaacaaagaagtagtatccgttcttgctcggattgagagcggcaagcattgccgtcgcgctggggttcgatatcggtccgggcggaagcccctcgtggatatatgtgttgtacgggaggtcgcggtccatatcagccgccgtcaccttcttcgggcgttcgccgagctcgtgcgcgatctgatacacgacggtcgcgtcgctctcgagcctcgggtactgcgccggattgttaaggcggttccagaatacctcggatatcttgaagtagtccgcgcttgtgcccgcctctttctcgatcatggatgcgagagtgacgatatcgtcgaccgtcattcccttttcaacggtcatcttgcggtaatcgtcggtgaacacctgcgcgaaacggtagagcatcttgtttatgacggtctccggctttgatgcgttatagaattcgtaggtatccgggaagaggtatccgtcgaggcggtatattcgatcctttgaatagccgaccgtctcgagatcgtcaaggaaccaatagtcgaaatcgtaattgtttatgacttcgacgtacccttcgcgtgttccgattcccttttcgacgagaagatcaattatttcgtcggtcgtatatccctcggggatcgtaatgcggctcgttccgctcggcttcttctccttgaaggacgcaaggatatcctcatagtccgtggagggcttgagtttatatgttcccgcaaggaactgtccgttgtcatgcttgtatccggcaaaccacttgaacacggacggatattttatgatcccgttcgacgagagcacatcggcaaccgtatcgaggtctgcattttcggggatcacgatttctatttcatcctcggatttgacgaaggcaaacacatcgtttccgaccattatcacggcaagggatattcccaccgagacgatcagcacgcagacaaggtatatcgccgcttttatgaggcttatcaccgcgttgctgctctcggctccgagccgctcgcggaacgacgggctgagcccttttttcttcttttcgcgcttttctccgctgccgttcgcagcattttccgctcccgtcaccggaacaacgcgagttccgccgatggtctctccgtcgtcggtgcggggtctgagcaccgacgcgcggcgaggtgaagatgttgacggtaaagatacgcggtcatcaacgtcagccgacggtctttgcgaaatgtcggcaaatgagctccgcggattcgcgttcgggcggagtgccgaagcacggcgtgccggatgctccgaaggatttacgttttttccctccgcagactcggaggaggatgacggcgtagctgcccgtcccgcgggatttgcatgtccgaccgctccggacgacatcgaccgtgaatcaccgttcaccgaatccgggcgagtgctgcggggcgcgccgtttgcgtttctcacgtccgctccctgcgcgggtcttgccggagatgcggaacgcggcgcggcagcgggattttcgtttcccgtgcgctccgccgcacgcggaggcgtgctgcgc

SEQ ID NO: 2157 - DNA, 7438 bp, Unknown
  16S sequences of unknown bacteria
taggattgccgttctcctttgaatctcttccggcaggcgacgaagttgtcttctgaccgataagagatgtcgcagacatctggcctcccgtcataccgaagttcgtattgttgacaacgattgctgtaatattctcatttcttgccgccgtatgtactgtatgctgcataccgatattgtatgtagcaccgtcacctgcatatgagaacacgagcatatcaggtctgatcctcttatagcctgtagcagtcggaatagctcttccatgtgcgcctgagaaggcgtgaccgtgcgttgcaaaaaggccgtgagaaccgcaagccaaatcgtggaagataacatgcttattcttgtatccaagttcctctacaacttcatatattattctccagcagatgccgtgcccacagccctgacaagcgccgtggcttggtttatccttaagcagttcagggatttcaaatttctttattgccattatttacacctcctcgcaagttcccgcaataatcttttctgcggtttcaacaacaacatccgcatcaggtacaacatcaaggctgaaatagccatatacaggcatattgcattttgttgccagcttaatatcgggaaccatctgtccctttatgctcatttctactgcgagaagacctttacaatccggatttatttccgcaaatgccttttcagggaacggccaggctgtaataagtctgataagaccgagcttaataccctttgcccttgctttcctaacggcttccttacatactcttgaactgataccgtaagctacgcatacaacatccgcatcagacacctctatgttttcccatctctgctcagcttccttcattgccttatacttagctcccatatgcgcagcataagcagggaagccctgtcccggataaccgcctctctggataccgtcttcgccatccttaagctctttatatgtataatcaaatttgtcaatatcaatatcagcaaagtcaggaagcgttatgccttccatcatctgtcctataatcgcatctgtaagaataacaacaggatttctatatttttctgcgatctcataggcatctttcatcatatctacttcttcctgaacagaggcaggcgtaagcacaacatactgcgaatcgccgttaccgccaccgtgcgttacttcttcgtagtcaccctgcgaggcactgatgccgccgcaggcacctcctactctctgtacatccacaagaacagccggaatctcacagccgcagatatatgaaataccttcgtggaaaagtgcaaatccaggacctgccgatgttgaaagtactctcgaacctgcaagagaagctcctataagcatatgaagtcccgtaagttcatcctctgtctgaataagttctccgcctacttcgctcattctccacgaaagatattcaagaacctctgtctgtggagtaataggatatccgctgaagaaacggcagcctgcacgaagcgcagcttccgcaagggcctcgttgcccttcattattgctttttctgccatagttagtcctccttttcaattttgattgcataatcaggacataccgtataacacgatccgcaagctatacaatcagcttcattaaactttactgtttcataaccggcttcattgagctcacccgaaggcgctacacactttttcgggcatgcgtttacgcaatagtgacagcctttgcaccttgccgcattataagtaatctttaccatttctgctcctctctgaaatgacgtttttaaaaaatcatttcactgctattactgttaattgtgtctatatcataacgcttattgtttgaatatttcaaataatatgtaaattactgttttaactgtgctttttgtattaattttgaaatttttgattcggcctgctcaataaaaaaaggactctcccgcgcaggaaaatcctttttattatgagtgtattttgttgattaagcttactatttgatttgaaatcttgattattctatatgatttaagtttatatggcctaagttagattaaataaaatttagcacttttcgtagcctatcttgagcgccatcttgttggcttcgttaaacttagccttgccgtgctctgtgaagtacttgttgatagcttctccgcatccctcgagagtcataattcccgtgtgctttacgagcgctccgatcattaccatatttgctcccttcggattgtcagcttcctttgccagctcctcagtatccacttctacaacattgatatcgtctctgtatgttcttcccgttacgagagaagaatttacaaagagatatccttagcgagcggcgatgcaggcatcgcacaccccgcgagcgtataatcgaatatgcaagcgacgcagccgcattgattccgattttctgcgagatatgcacccggaaatcaaagattgttcttattgcagctagccgctgaattgagatgtctgagctttgtatttgtatagttcataaccgcaatcatctgatcatagaataaataccttacatatagcagaatgtatatttttccgcccatgtaaccgaagaatattttagtaaattattacatttttgttaatgtaccaaagtaaaataatactaaaatcatcctcgaaataaaaagccctgcgcttttgtaaaacgcaggacctttgtccgattttcagtttttattcagcgtcttcttccgctgcttctgtttcggcaggggcttcctctgcctccggagcttcttccggagcaaggcaggccttgatgctgaggctgattctctttctctctgtatctatttcgagtatctgcgcttcaacttcctgtcccacggaaatctcatctgcgatgttagtaactctcttatgagcgatttccgaaatatgtacaagtccatcaagacccggttcaatctctacgaaagcgccgtattctttgatctgtaccactgtaccctttacgatctgacctacttcgtacttgtcgttgattaccgaccaaggctcaggctgattctgcttgtatccgagcgaaatctttcccttttcctcgttcatctggagtacgacaactttaatcttgtctccaattgcgagcacttcctgcgggtgtctcaattttccccacgaaatttccgaaatatgaaggagtccgtcgataccaccgatatcaacaaatgcgccgtaatctgtaaatctcattacagtaccttcgataacatctcctactttgagactgccccaaatttcggcgatcttctttgctctttcttccgccagaacagctttgtgcgagaacactgctcttcctttcatcttgtcgacgcggtttacttttacatcgagagcttgtccgatgaattcatccgctgtttccacaaacttgtccgaaagctgtgaaagcggaataaatcctgtcatttccttatacgcggcaatcactccgccatttacggctctcgtaatttttacattaataaccgatttattttcaaaagcttctacaacttcatcccagttagcattgatttcgagctttttctttgacagaataatctcgccgtcgtcagttcttaaaacttttgcctggacatcgtctccttctttaaataaatctgttaatttctggccatcttccagagaaacttcctctctaggaattatgccatccttcttacagccaaggttaacgatgacttctttttcagttgcttgaagcacttttccattaactatttctccgctgcgtggcagtcttaatgatttttcaatttcatccattaagtcaagcattaaatttttttcgttgttttcaagtgtcatttcactcatattggcaataacctcctcaattacagattcaggtgtcgaagcacctgctgcaactcctattttattacatatttcaacttctttcaatggtaaatcttgcagtttttcaataaaaaatgattttgggcaatatttttgagaaatttcatacaattttcggctatttgaactattttttccaccaattaccaccatcatatccacagacttcgccgtctgcatacagctattttgtctttcacttgttgccgagcagatcgtattattgacaatgatgttttttccgcgctcggaaaatgaagcaacaacatcgtcaaaaagttcctttcttattgtcgtctgtgctactatatagagattatcaatatctattttttctgcttcctctctcgagttgacaatgtaagcgttactgcaccaaccgtttattcctataacttcgggatgatttttgtctccgactattatcacatttttgccgtccgcctccgcatcgcgggctatattatgtatcctttttacaaaaggacaggtcgcatcgattatctttatacccagcctttctgcatcgtcataaaattttttaggctcaccatgagagcggatgataactttatctcccgttttcgcatcatttatatctgctattattccaagaccttttctttcaagctctcccgttacgatatcattatgaatgagcggtccgcaggaataaatttcatttttatcatctgcgctgcgctcgtctatcagtttttccgccgcttctatcgctcgttttactccaaaacaaaatcctgaattttccgctcttatgatttctcttttcattataatttctttaatccttccaaaaattttttaaatgccgcctcgcttccgttctctgtaggctcgtaatatctaacaccctctctatacaggttgtccggcaaatactgctgcttcacatatcctccgtaagcgtgcggaaatttataatcaagcccaattccaagcttggctgcgccgctgtaatggctgtctttaagatgaagcggtacatcgtctattttacgcgttcttatatcctttatagctctgctaagcgcctcgcttgccgcatttgacttaggacaagatgaaagaagaatagtagcctgcgccagatttatctgtgcttccggtaatcctaccataagcgccgcctgtacacacgccgtcacaatagaaattgcgcttggatatgccattcctatatcttccgatgctattaccataagccttcttcctatcatctgaatatcggctccgccgtctataagacgtgcaagataatgaacggcagcatccggatccgatcctcttatcgacttttgcagagctgaaagcagattgtatttatcttcttttttatcgtaaaaagccgtctgcctctgcaatgcctcctcaattatttttacatctattttattcttttcactaaggttgtccactataaaaccgagcgtatccagagccacccgcgcatctcctcccgacatatcggcaagcacggtaagtgcctcttcatcgtatttgatactaaggttgccaagtcctttttctttgtccttaagtgtacgttttattattgtcacgatatcgtttgtctcaagccttttaaactcatatatattccgtaccctgcttatcacagcgttattgacggcaaaataaggattttccgtagtacttcctataaagcgtataacaccctcttcgagtgcagcaagaagcgaatcctgctgaagcttgttccacctgtgaaactcgtccacataaacgtatgtcgtttctttctgaagtccgaaaaacttaagctttgctttgtctattatatccttaagctcctttgttcccgatatgctcgcatttatttcgtaaaaatcagcgtttgtttctcgcgctattatgcgggcgagcgttgttttaccagtaccagacggtccgaaaaatattgctgaatcaaaagttttgttttttatcgaattgtaaagaagcgagcccttgtacataaaatggctctgcccgacaaagtcatcgagtgtctccggtctcatcttggtggataaaggtatcatactttattcttatcctttcattttctgctgctctaagctgtggtattatgcaaatttttacggactgcatcagaaactcgttacaaaagcatcgctgtattttgctcccgtaagagcatcaatactcgctttacttccaagcgcgctttctttatcagcaaaaatctgacctacaactttaaaaaggccgtctttttgaatcacggaagcatctattcccgaatttttaagttcatttaaaagctcgcccgcggcatcttcgcttgaaaaactgccaaactgtatcatataccctgatgtaaggggctgctcgtctgtgctgccttctgcttcctgaccgcttatacccgcctctgtcgttggaatcgcgatattggcgccgctgttgttatctatgcctgccgaattgtctgtacttttcgaatcatcaagattgctctcttcactttcggtgccactgtttttgtcatcatccttatcgccgccgaagcctatcttcccgagaacgacgtcaaaagacgcctcttgtccgagtataagcggataaacaacatatttggtcgtcaaaaatccgagtgcgaccgctaatcctattataacaataaccgcaaataaattcacccctgttttcttcacgtatctgtttgcgtaaacatttcttcttacgtgcatcctgcgatgtttagcttttctcattatcacacctcgtcccttttataattgcttgtacataatattctctttgggaaacaggtatgcaataaatttaaagaagcttatttatctgctttttggccgtcctccttttatcacgccccagtcagctcgcagggcgataagctcatctgtctgctcctctgtcatcagacgttcaattcccataaggcgcagattcatcgttacctttgcatcatattctatactttcgagtaaataaaaagcctgcacagcatcgaatgcccatgtaactgcgccgtgatgctcgagcaataggccgttataatcgcggcagtatctgcctacgctttcagcaagtgcttccgttcctggaagctcatatggaacaacgggaatcacaccaagacgtacaaccgattcctgaagatacgccttgtcgagtggaatacccgcaaccgcaaaacttgtagcaaccggtggatgcgcgtgaacgacagctcctgcatcggacaattctttatatatttcaagatgcattttaagctcagatgatggtttcatactccctgcaattacatttccatcgagatcggtctttataagcatttcttcgatcataaatccttttgatacacctgacggcgtagtccaaacttcgtttttgcctgttcttacgcttatattcccatcgtttgccgctgcaaatcctgcatagtacatcctctgtcctatatctaaaatatccttaccttattaatgagttataatgataaaaagtattgtaaacgca

SEQ ID NO: 2158 - DNA, 32759 bp, Unknown
  16S sequences of unknown bacteria
tcactaccgataatatatgtgatatatgcttctgatgaatcattccatagatcatttatatcacctgcatcagcacactcaacgccgggattgtcaaaagtgacagcaacgtgcttacaaaaatgcagccggatgcatacaacaatccctcctgtccatagatcccttcaataatcggatttcccataaatcctgcattcgaacagatcgtcgcatactgaagcaccttctttttccccggctcggcaaactcaaacaatatctttccgcccagccagcagagaatctgaatgccgagtgcaatcagtaatacttccagagaagctatcagcacttccgaactcaagtcaattaaaaatgaattaataatattgcacggaagtatcaaatcgatcagtaaatctgtcaggcattttcttccatctgccgtcagaactctcttcttggtcaatacaattccacagatcatcagaagtgccaatatgatctgaagctcgattacactgtttatcgtcgtcatatcatcgtttgcctttctgtcgtcctctgatttctctatatttcattttcactctctccagcccggaaaaaggatgccagattctccagcgaactctccacaatattctcgatcgcctgatccgtataaaatgccgtatgggttgtaaacaatacctgatccattgcaagcagcccggaaagtaacgagtcatccagcggttttcccctgtaatccttccgcgcagttagattctcatattcatagacatccatagcaaagccaccaagttttctgttttgcaatgcctcataaacggcctgcgtatcaaccagtcctccacgcgctgtattgaccagcagtgctcccggcttcattttctgaatcgttccggcattgatcatatgataattctgttcagacatcggacagtgcagtacaacgatatccgactgttcaagcagtgtttccagatccacctgttctgcaaggcgctgtacctccggattcgggtgatgcccgtttgcgagaatcctgcagccaaaccctctcagatcctgaatcgtcgctgttccgatcttcccggttccgatcacgccgactgtcatgctcttcagttccctgccacgcagcccattcaaaaagaaatattgctcttctatccgcttcagctgtgttttcattttccgaagcaaagataaaatcagcaataccgtatgttcggaaatcgcatttggcgaataccccggtacatttgccgctttgatcccacattttttaattgcatttttatcaatatggtcttttcctgctgttcttgtcgcaataaaacggatacccgctgcctgcatggcccttgccatatcctgatccactttgcagcctgcattgattgcaaccgcatcatagcctttcaatctttctgcattttccagcgtaagctgttccggcatatatgtaagtaaaaatccaaatctctgatttatcttttcaaaaatttctgtttcatcctgccggtgtgcagttaccagtaccttccgtttttcacttttctccatgactgtacatctcttttctgttttatatctgttacattttttctggcattcaaaaaagcgtacaaagaagttctgtacttccttgcacgctcaatcgtaataacataataagactgtaggcagttcttgcaatcccaaccaccattcattctttaattatgcggctagtatagaatgacgttcttcttttgtcaacctgtttttatagaaattttagaaccctttcctctttcttcattctttttcccttttggtcatgctatactaccggtatcggagagcatacatctgtcccgtccgatgcgatgtttttataatttgtaaagcggaggattttatgacaaacgatacaaaatacgcccttgaggcttccctaaaaaaatttcttctgaaaaaaccaattgacaaaatcaccatccgagacctgaccgatgactgcgggatcagccggatggcattttactatcattttaaagacatttatgatctcgtggaatggagctgctttgaagatgcctcccgcgcgcttgccgggaaaaagacttacgatacatggcaggagggactgctgcagatctttgaagccgtgctggagaacaagccattcatcctgaacgtctaccgggctctgagtcgcgaacaaattgaaaattacctcttccgtctcgtctatgatcttatcatgggggtcgtcgaggaaaaagctgaagggttgcgcgtgacgcagcagcaaaagcagtttgtagctgaattttataaatacagctttgtctgcgtgatgctcgactggatccgcggcggaatgaaggatgattatcacatcatcgtcaatgatatctgcacgacgatgcatggtgcgatctcgaattctctgcgaaatttcgctgactcagataaatatactgctttataaattttcccattttttatcatttccttggttttgtaaatagcagccaccgatcttgtgtgctaagatgtgctcgtaaacaaaaaagagcttttccgaataacctgccgatattttcacatactgagaagagactgcagggacttcggaaccaattataaatcagaaaggtggatttcattatgtcgaaaaaaggaaagaaattagcagcagcatctgctctggcagccggactcggcgcaatgtattatgcatcaaaaaagaaagaaaacggatcggataagtctgcagataatggctatcgcaacaccgagcgtggcaaatatgagaaaaacagcaagggcatttactacagcaacggaaactacgaggcgttcgcccgtccggagaagccggaaggcgtcgatgacaagcatgcctatatcgtaggcagcggccttgcctcactcgcagcagcctgcttcctcgtccgtgacggtcagatgccgggcaagaacattcatattctggaggcgatggacatcgccggtggcgcctgcgacggcatcttcgatccatcccgcggctacgtgatgcgcggcggacgtgagatggagaaccatttcgaatgcctgtgggatctgttccgcagcattccgtcaattgaaacgccgggtgtatccgtccttgatgagtattactggctgaacaagcatgatccaaactactctctgtgccgtgccacaaagaaccgcggtgaagacgcacataccgacggtcgctttaatctgagtcagaagggctgcatggagatcatgaagctgttcatgacaaaggatgaggacctgtacgataagacaattgaggatgtcttcgatgaggaagtattcgattcgaccttctggctgtactggagaactatgttcgcatttgagaactggcacagcgcactcgagatgaagctctatttccagcgtttcatccatcacatttccggtctgccggatttcagtgccctgaaattcaccaaatacaatcagtacgagtcactgatcctcccgatgcagcgctatcttgaggaggccggtgttgacttccagttcaatacagaggttaccaacgtcgttttcaccttccacaacgacaagaaaatcgcatctgcgattgaatgcaaggtaaacggtgtggaaaaaggtatcctgctcaccgagaatgaccttgtcttcgtaacaaacggaagctgtaccgagggtaccatctacggcgaccagaaccacgcaccgaacggcgatgcagaggtccgcacgagcggctgctggagtctgtggaagaacatcgcaaagcaggatccgtctttcggacacccggaaaaattctgctccgatatcaacaagacgaactgggaatctgcgaccatcacgactctggatgagcgcatcatcccgtatatcacaaatatctgcaagcgcgacccgcgcagcggcaaggtcgttaccggaggtatcgtaagctgtcaggattcctcctggctgatgagctggacaatcaaccgtcagggacagttcaaggatcaggacaaggataaggtatgcgtatgggtatacggactcttcaccgaccgtcctggcgactacatcaagaagccgatgaaggactgcaccggtaaagagatcaccgaagagtggctgtaccaccttggtgttccgactgaacagatcgaagagatggcagagcacagtgctgtctgcgtaccgacaatgatgccgtacatcaccgcattctttatgccgcgtaccaagggtgaccgcccggatgtcatcccggatggctgcgtaaacttcgcattccttggccagttcgcagagaccccgcgcgacaccgtatttacgaccgaatactccgtccggaccgcaatggaagccgtatacggactgctcggcgtcgaccgcggcgtaccggaggtatggggcagcgtctacgacatccgcgagctgctcgactcctccgtcaagctcatggacggcaaatccccgctcgagatccgtctgccgggaccgttgaacgcactgaagaaacctgcgctgcatctgattcagggtaccgtcatcgaaaaagtactgcgggatcatcaggtaattaaggatgggatgatgtagggaaagccttgatcgttccaataccatcaggtaaaataatagaaccgggtaggaggcggtgattagccgccgggtgcaccgcaaaaaggctcgttatcggctatttagccaatagcgagtctttttgcttacttttcacaagctattttttcgattatctgctataatattctgtaagataatgatgatacaagggtcaaaaggtcgaaaagccgttcatgagaaagtagcgatttacgtagtaaatcagcggatttcgaatatttgtagaattgcgggagctgcttcgcagcgaagcaatccgtaaggcatcttttgaccttaatatcttctgtaaaaaataaaaaggagttttctatgacaacgacgaattttccaaaaatagatcttcatcttcacattgatggttccctctcacttccgtgctttcagacactggcatccaacgtcggtctttcgatgaccgatgcgcagattcgaaaggcagtcatagtatccgatacttgtcagagccttccggaatatttgcagtgctttgagctgccgacccgtctgcttcagactgaaaaggcgctcacgctttccacattggatctcatccgtaatcttgaagaacagggcctgttctacgccgagctgcgctttgccccgcagcactataccaagcagggactgacccagcagcagacagttgccgcagtactgaagggtgtggatatggcaaaaaaggcaggatttcatatccggatcggcattcttctgtgcatgcttgtaaacggctcacccgcggacaatcaggagaccacagagctagccgtcgcctacaaggacatcggcattgccggactggatctggctggcccggaatcagccgttccgatgtcggagtttcagccactgtttcactttgcctatcagtccggcctgccatttaccattcatgcaggcgaatgtggcgactatgaaaatatctcccgtgccatctcgtttggtgcacggcgtatcggacatggctgtgcggcacgcttttccgaggactgcatgcgtctgttagaaaaagaacagaccatcctcgaaatgtgtccgacgagcaacgtccagaccaaagcggtcccgaccctttccgagcatcccatacggatgttcttcgaccgtggcatcgccgtgaccgtcaacactgacaatatgactgtctccaatacgacgctggacaaagaatacgcactgttgaaaaaacagttccatttcaccgatcaggagctggcgaagatgagtcagacagcgctgcggggcacgttttgtaagctgtgaatttatccatagtccctctgaaatttgacttgcgattattttttctatgaaactcctgctttcccgctattttccgaaacaaaactacaagcttccagtcactgccgcaaccgcccggaacacctgctccacgctttctcgcatattctccgctgcgacttcttttttcatcgcttcttctaaggtcgtaacaccacggacgatcgggaaaaatgcatcgattccggctgcattgcatgccctcgcctcttttgtcacgcttccggcaaaggccagaacacgcacaccatgctttttcgcaagctttgcaaccccgaccggtgctttgcccatcgcggtctgaaagtccagctttccctcacccgtaatcgcatagtctgcatctgtgagctcctgctccagcccgaccgcattcaagatcagctcgatcccaggtgtcagctcagccttcaaaaagctgcggaacgcgaatccaagtccaccggctgcgccagctcccggctcctgcatataatctgatcctattgcttttgccacggcctgcccataacgcgccatcgccgcatccagcggctgcttcatctcctcggtcacacccttttgcggaccgaacacgtaagttgctccattttttccgcacagcggatttgtcacatcgcaggcaatccgaaactggcatgcgccaaggcgcggatccgccccgacacaatccacctgcgctacgtttccaagtgcctgcgctccttctccaacctgctttccatatgcatccaaaaaccggaatccaagcgcctgcagcatcccgatgccaccgtcatttgtcgcgcttcctccgatcccgatcagaaaattccggcagccacgatccagcgcatcccttatcatctcaccaacgccgcgtgtactcgccctcatcggatcgcccctgccatccggcaacagcgtaatccctgctgcagcagccatttccatcactgccatctgctgcccggcgatccatccataatacgcttccaccggttcaccgaccggccccgtcacctgcagcacgaccttttctccgcccatcccttcgatcagggcatccgtcgtcccttcgcctccgtccgccagcggtttcacgaccaccatggcatccggcatcgccgcccgcaccccatccgccgccgcgtttccggcttcgatggagcttaagctgcctttcagagaatctatggcgattactactttcatgagtctttcctcctgctgtacctgatatatatttttatgttacacactggtacgcattgtgtccagctctatttatcagaaatattcccgtaaaaatacggccgattcaagaacggtaaagtctattttttctggttggattaaaccatttatgattttttaccagtcaattcctttgatcgcattttccactataatccagcaaaagctcctgcaaaaaacggattttcgtcttttacaggagcttttgagttccctatattctattcttattccagcacctctatctcacacgtatgctctttcgtcttcctgtcatacgcaatccccaccgccagaattcttccggtatatccggtctcttctgccagcttgccacgaaagcgtgccgcataatttttctgtttgatttgctctactgcttccccggccgaatgatctacctttaattccacaattatacagtccgcatgcctgtcataacgcggataaaaaataaagtctacatagccttttccagaccggtcttctctttggatatcgtattcgtctcttgccgataaataagccagattcacgatcgccgtaagctctgactcccgattataatcccaaagcggcacctccgaatcatgcacatgcgataaaatttcagcaatcgtttttgtatccaacgcgcgtgttgcctgcagcattcgttccgattctttcgccagacagtatacatatcccagcttcggttccctctttagcatttctgaaaatcgcagcatcaactcccggttcggaatcgatacccgcccctgattgcagctcagaaatccatacacgaccatcgccgaaaaaatctcatcccgcgtagtcagtttcatcgctgtcgctgcatattcctgcacatcggcttttaccgtttctcctgagatcaacaatgccagggcatcccggatgtctgcaatgttatgctcaatataataaaaaatctcatcatatggcccagcactcgtccaatagcttccaagctgattattctccagcgcaaccacgatggaacgcggattgtacagacgcttcccggtcttcgtgtaataaccatcataccagatacgcagcccctctcttgtcacacgcctctccatgaccttcctgcaatagcgcgcatacagctcgtccacttcctcttcggtaaatccaaaatattcactgaaccgtgcctgagacgccatactgtactccagaaacatattcagttcagagccactggaatactttgcaataggcaggatccccgtcatataaaccagcgagacgtacgcctttcccttcagcagcgttttcagaaaagtaagatattttctgcgatctacctcagtcacaaaagacatatggaaaaccgcatcccattcatccagcacaaatacaaaccgatctccggtttccagattaatccgcttcagatcctctgccggagatcccttttccttccgaaactccacccgagggtatgcgcgctgtaaatcttcacacagcagttctttgatattcgaaatatagtcctcatagctgtcacaggcatcatccatctcactgaagtcaatgtaaatcacatgagactgatttcggtatttctgatattctgccgcttttgcaatcgcaagagaatcaaaaatatccgccgaatcctttgcatcagaaaagaaagcgccgatcatgctggccgcagtcgtcttgccaaagcgtcgcggtctggtgatacagataaaattatttccaccgctcaccagtggtaacaattcctccagcatctttgtcttgtcaatgaaatacggtttctgcacttcacttttataaagagaatatgcaatctggctgtcaagatacatccccatgttccgactcctccccacttgcccctattgtagtttgaatcaggcggactgtcaagaaatcctgtattcacgttttctgtaaagcggacattcgcaatccgctttaatccggatcaggcaggcagtgaagcaaaaaggctttgcgactacaaccgcaaagccttcacctgtgtacgatattaccatcctactctacattcttcagcgcctcgtccatcggaattctccggatcttgcgcagctgcaagagtgccacaaacaagtacgccgccattcccatcaggaacatcttcggataaatatccggtgcgatgtagagggtgagccagccgctgaattcggccatcatcagcacatagatctgaccaatcagcaccgtcgcgatccagaaactgatcaggattgagagcactacgatccaggtcgtcgccgtcagatacaggctcatgatctcacgtgtctcatatccgaggattttaaccatggagatcgaggtcgcatttttttcgatgatcagctttatcagaaggtagatcagcaggacgaacagcacaatggaaaagatattaatcagatagaacatactgcccatcgacaccttcagctgccgtgagatctttgtcagatcatcctttgtgatcgtcgcaccgatatagccttcatcgaggtctgtaatctctgtttcggaaaaatagccgttgaagtaggtatccggcttctcaaacacactgcgccatgcctcgatcggcaaaaataccgccagcgctgccggataatgataaaaggagccgactgtaaaggtatagcttgtatcctcatatggttcctttacggtgatcgtatccccgatgcggatgccatatttctgtgcaaatccctcagaaatgcaggcggaatctgtgctgtccttttccggcaaattgaaataggcactgtcgtcggtaataccgtaaaccatgatatcttcgctgttttttccggtaatcacgcttttcagggtcgtcacgcaaaacttctcagccgttggattggaagtatccatggacggggtcataagcttctgtaatacccccagcagggtatcctcgtcttcctcatcaatctcttcgggcggacttaagatatactgataggttccaagcatatttgcaagaacatcatcctgataatgttccaggagaggagacatcatcatgccgaacagcagaaggacatttgcaaatgtaatgccaataaataacgtcagatagctggagcggttctgtaaaataatacgcatccggaatcgccggaaaaaccggaaattcggaagctgtaccgcacgtctggttcgctttccgcttaaatccctgcgcaggaatttgagtggagacaggcgcaggcgctttgcgatcagccagacattgaccagcagcatcagcagaatcggcaccactgtcgtgagcagaaatgcatttacattccatctcgtctcatacgtcggcagactgtagcttccatagtacattcctgcgcagatgtccttgaaaaaggtataaccgagcacatttccgatcactgccgcaatcagagtcacgatgaccggcagcgccagatagtgtgaaagcagctcccttctggtatagccggatgcacgcaacgtaccgatgacacacgcttcctttgcaatcgtattgtttgtcgtcaccgcaaatacaaatgccataatcgcgatcaggatatagagcagcacaagcatcatcgaacggtcactgcccatatcgtcgccggtaaagttgatcgcctgattgccatagcgcggaatataatcggtcagagtcatgcccatccgttttgccagcacatccacaaagtcatccgactgctccttctctgcctgctcatcggccggtttttcatcataggtaaacgaataacggtattttaaatgcgccgttccaaatgcatcgaagccctcctttgtcatcagtccgacgccaaactttactgcatcaaacatcatatcgctgttgttctcgaacaaacagctgtagtcagaaaatgccaccagtccgcagatcgataaggtccgattgcccaggcagatttcgtctccgaccgacagccggttgttatccgcatacatccggtcgattgcgatctcgtccttcgattccggcagcttacctttcatcaggcatacgagatcgatttcgttacgtggtccgtaaatgcgcagcttaccaaggctctctttggtgtcgtccttctctgactctgccacatcccccggctccctgcgctcttcttccacaaagaaattttcataaatcttcacccctgcatccacaaggtgctgcagctgtgtatcactcgccttttgggacagggtaaaattaccgtcttctatgttgtacttttcaaagctttcgttatacgcggccagcatactgtcatctgccacgagaaatccggagacgaatccgatcgtagctgtcatgaacagaaaaatcacaatatattttccgatatcgccaatcagttcccgtggaagccgcttcatcaatggattcttcattgtcgcctcctctgtcaccagtccagatcgcaggctgcaatcttttcttcatttacataatttttccggatctgcccgtcgcgcagttttacgacccgatccgccatatttttaatcgcatcgttgtgtgtgaccatgataaccgtattgccatagcggtgattgacctcctcgatcagccgcagaatctctttcgacgtctgataatccagcgcgcctgtcggctcgtcacagagcaggatatccggatttttgatgattgcacgcccgattgccgtccgctgctgctgtcctccggagagctgattcggcagcttgttgcgatgctcatacagtccaagtgtcttcatcagctcattgatgttcaatgcccgatcgctcagataagcgcccacctctatgttttccttcacattcagattcggaatcaggttgtacatctggaatacatagcccagatgacgtctgcggtagcgggtcagtgatttttcattcatatccaccgtccgctccccattgatcgaaatgtatccctcatccgcattatcaattcctccgatgatattcaaaagtgtcgactttccggagcctgacggtccgagcagcacacagatttctcctttttccacagcaaaatcaatgccctttaatacttcggttcggttcgcctgtgttccgaagctctttttcagatttttaatttcaagaaacatctcttcccacatcccttctctttgtgttagagtttgctaactagtgttatcatactgcaattgcacaaaaaaagaaatggcatttactgagtatttttctcaataaatgccatttctatcatttctgtctcagatgagcgccgcgtatattactcggtcactgcctccgtctcgctctcagctgtctcggtcacgctcagggagcaaacgatattggttacataagcctctgcattctcgatatccttcggtcctatctgaacgttgtacatgatacccgcatcatccaggaatgcgataccatacgttgactcggtcgtaaagctgacggccggaatactattcacaataccaagctcaacatcagtattacctgccttttccagttccgctttgactttcgacagatcataatcggttccgatttccgttgcggtcacaaccatattcagtccggaatccgacggatcctttgcctggaacatcatacccttctcctgatcctcctcggagatctcaagtacatcccagtcagacggaatatacagatcaaatccacctgcaaaggatacccaggttccttcatagaggtctgcatccatcatatccatcgtgatctccggaatcgcttcggaagaagcctccgtcgtcacttccgtctcagtttctgccgcaaatacacatgcagagcttccgaacgtcatcaatcctgccagcatcagtacaaataatctttttttcatatcgtttatccacctttctccctgcacagggaccttccatcctgtctgttccatttttcagtcacaggcgttactcaaaaaagctatgtctatttatttatcagaatctttctcccttttcaaccggtcttgcgcaatgcgcagattttttgcgcaatccgcagattccgggcggctatttcagacttttttcatctgacggatcgtgctataatagagttctgtggattgttccgtgtattgcacagagcagcagatttttatcaaaaagaagggattttttatatgaatattgccattgtggatgacctcgcctctgaccgtctgcagcttatcggaaagctgcagacttatatgcagcaggcacgaattccgtttaccttatatgaatttgacagcggagaagcatttctcgaggcattttcccctgggcggttctccatcgtatttttggatatttatatgggtggaatgaccggaatggcggtggcacatgccatccgggagcaggactttgactgccgtctgatctttctgacgcagtcggaggaatatctgcgggagggctactcggtcaatgccgtacactacctgatcaagccggtatccgatccggactttacacaggccatgcgtttctgccgtctcacctcgtctccgcagccggtctatctggatgtcatctcttccggcactccgattcaccttgatacgtccaatattgtatatatcaatcttcagaaacggatcgtccacatccacaccctgaagcatacgcttccggtcaccggcacctttacgcgcgtgacagagccacttttatctgacccgcgttttctgctctgcattcagggtgtccttgttaatatggatatgatcgtagatcagcccggcagcacgtttctgatgaaaaacggtgatgctgtacagatcaatctgcgcaaaaagcgctcaatcgtacaggcctaccgccaatatatttttgaaagtatgagtgaaaacagatgaaaaaagacataaagaaccgttggaaatatcggctcggaaaactgatgtgtgtgatgctcgcagccacaacgttaggcggaagcattgatgcaaaaacgctggcagattttcaaacggaaacacacgaaacatccgaagcggaatcagataaagttgcagaagcaacatccgaagcggaatcaaataaagctgcagaagcaacatccgaagcagaatcagataaagctgcagaagcaacatccgaatccgttaaatcagcggagaccgaaacagaaaccgaatcgtccgaaacatcggaagtaacaggcacgtctgaagcaagccagacaccggaaataaaaaccggcacaattcttgaaattctggattcggatgcactctccgctctcgatccggtcatcatcgtgcagaacacgagtgaaaacaatgacgcactgctgatgcgtattcttcagctgcagtctgtcagtgcccgcgtgcgtacggctgacggtgaggagacaatcatccggctttccgttgactggaatgtcggacggctcgatctaccgcagatcgatgtctctgtcgccggcgaatacgaagagctcggaacgatcgtcttcccggacggctacgcatgcgcggatcatatactacgcacgctgcggcttccggtccatgtcgtgctcccggacagtccggtcgttctgacaaaggtcgatgcgtggaccgccgaaggagaagcctacgctatcgcgaccggaagtgatctgtctgctttcataagcacaaacttacccgggctctggagctgctatgatgcatcccatactttgtatcaggcgaatatctgctggaatacggattccgttaataccacgacgcccggtctttactggctgaccggcaccctggccgctccggcccacaccgttttttccgagactctcgccgtcccggtgctgcgtgtgccgatttccgtacaggatcctaaacatccggatatcaatttcatttttccggcacgcggcaagctctgtatcccgatcgccggtctgcccggtaatccggcgcagatacgcatccggctttgcacacacgatggtatctggcaggatatcacagattccggcgcttgccaggtttcctccgatgccatttatctgtccaatttcctgtttacaccgcaggaaacctataagcttcaggtcacctatgaaggcggaaagaccggaatcctgacctttctctttgatgagacgcttgagcatttccaatattccggcggcgaccgcgatggcggcgactccgacaccggaaaggaggatgaccggatccagcccgcaccggaactgccggaaacagagcaaaccgaaccgaaacttccggaaacggagcaaaccgagccgaaagtgccggacacctcccagacagagacaaacctgaccgaaaccaagacaccaggatcctcatcccggccgttcaatccgtctgccgctgaacagacggaagcaaatttcaagagcagtcaggattctgaccggacggaatatttcacatccgactatgatcggatctccggaacgcgccttttgctgacacttgagacgtccggctgtgcccagttctccaagcacggaattagcatctccatcccggaagcgactctgcatgcgctttcgattgcctgcgaggactttttccgcatcacgatcctgcaggcatcggatgatacattctcctttttctttgaaaaaaatgagactgtcatcccagcactccccggagtgcagatcatgcttccgtggtccggagatgacaagtatggactgctcctgcttgatgagaagcgatgcatcatctcctatggcagctgtgatccgaattctcatatcgcatccttcgttaccgatcagaccggaacctttcagattgtcccggatgatggaacggtgtccacacttgtcaggcttatcgatgactgccgcagttcctttttacagcaggtatcccgatatttcttctggcttcttagtatctaaatatgttatgtgttgtaacgcatatctcgcagcaaaaatgtcggggcattcttgaactaagtcatcaaaaatgcgcttaaaggaggtctccccttgaaaatatctatccgcaggctgcttccgctttttctcgcagccctgctcacctcgttcttttgtctggcgctttattttttcaataacaaatatacccgacagacggtccagccggcaaatggactgatggtcgtctcagaacaggacctggatgaactgctctacctgattgatggctgggccttttatccggatgttcttctgacgccggacgattttgccagcggaagcccaaaacgctatatggtctatacaaacatcggggatcatacccgtttcgacacgcccggcgagccggataccccatatggctgcggcacctatgtgcttcatctgcttcttccggagcagactgccgtctacggactggagctgccggaaatcttttctgcctaccggctgttcatcaatggaaaaaatgtcctctccgtcggcgatccggatccggatacttataaagcgcggacacagacccggatggccaccttcgaagcttccggccgggccgatctgcttttgcaggtcagtgattactcgcactattacagcggtattgtctacgcgcccgcacttggaaagccgcttctgatcaaccagacacgcgccatgcgtctcaccctcattctcatctgtgacacaatcggtctgatgctgatgctgttttctttctatgccgcaatccggatgaagcaaaggcatgcactgctcttttccctgctttgcttttccatgtgtgtctttacctcatacgggttcattcacgtactgtttgagcttccggtctttcctctgtacacactggagcttttttccggctacctgctcatttttctgacgatccttctgcagaactatctgtgcaaaacggactggtttgcctcccgcatctcctctgccgctgcgcttgtgttctgcctgctctcgctgctctacggtatcacctccgcagcatcccggatcacaaactgggaacgtgacgcattctccatactcgtcatcgcatataaggctgctgtagctgcttatctgctgattacttcctttctggccttccgtgcaggaacggtacgctcccgcgcactgctgctggcgaatgtcgtctatggcgcaacctttgtatgggaccgcctgctcccttcctacgaaccggttcttggcggatggtttacagaatggggcagcttcgtgctcgtacttgcaaccggctacacgatctggcgtgacatcatcactgcctattcctacaatctggccttcgccgaggaacaccaccagatgactaggcagcttgccatgcagaccgtctacgcaaaacagatcgctgaacaaaatgaaagccgccggaaactgacacatgatttccgacagcatattcacactttaatgactatggccacacagcttcaacaaatgcctcacttagatgaaagcgacgcacttctggctgagctgatgaattatctctcccacatcgaaacttcccctatccggctgcgcacacagggctccttttgcagcaacgtggcggtcgatgccctgctgcagtattatgcaaatgccgcagaggaatcacatattcagataagctttcagctgctgcttcctgctcttctgccactcacagatgtggagctgtgcaccatgctcggcaacctgctggaaaatgcacttgacgcctgccgccggatggcacctgcaacggacgcttctcctcgcaccatccgccttttcacaaaagagaccggtatgcttttctttctctgcgtggaaaactcctacgacggaatcgttctctccgacaaagggcattttctctcacggaagcgtaacggcaaacgctccggcatcggcatctcctccatccgcgaaatcgtcgaacgtcacggcggcagtgtgtccgtctatccgatggagcatctcttccgcgtcggaattacgttgccgatgaagtagaggcaaacggatattcgcaatccgcttcgctacttgcttgattcggttaaataatcttcctgcaaatatctgccagacagcaccgctcacaatgcggcttcgtccgggcagtacagacctcccgtccatgatagacgagccgatgacagaaatcactgcccttttccggaggaatgatatcccagagctgcatctcgactttcttcggatcctttgttccgtcgaccagccccatccggttcgtcagacgaatgcaatgcgtatccgtcacgatagcaggctttccgaatacatcgcccatgatcagatttgcactcttgcgcccgacacccggaagctttaaaagtgcatgaaaatcatccggtactttcccaccgtattcatcgcggagcatccgcatacaagcactgatatcccgcgccttactttttccaagtccgcacggacgcaccagttcctcaatctcctccgggtcagccgctgcgagggcttccacatccggaaatttctcataaagcttttctactactacatttacacgggcatccgtacactgcgccgcaagccgcacactcacgagcagcttccatgcatcatcataatccagagtacacccggcatccggatactctttttccagccgttcgatgatctcaccggccagcctgcgcttttcctgcagtgctgcatcatccggatgcccttttcctgctctgttcttctctgtcacctgtatctcctctgaacttatactgatttattcgcagtggcctctgaattgctgtactccttaaagaagtcgctcagtgcatctagcgtcttcaccagcaccgggagctcctcctcgtcgagccgttccagcacagcctgtgtcatcctgcggtgataatcctcgtgatggcgataagcggcaatccctttctcagtcagctttacgaataccacgcggcggtccttttcacttctgcgccgctcgacatactgctttttcaccagatggttcattgaagtcgtcagggaacctgtcgtgatattcagcctgcgtgccacgcaggacatgttattaccttctccaagccctaccgcttctatgacgtgcatatcattattcgtcagatctgcgaactcttctgtaataattgcctttccctccagctcccagatttcattaatcaggctgacgagtatgtaattaatctttttatatgcgccgtccatatattccatgtgctcctgccctttcgcctctccttcatgtacgcccggatcctttctgtgctcgatgttcaggagaatttcagacatacatattatgctacagtgcttattataccccttccgcctgcgtaaaatcaagtaacagttcagaatttccgaaagcgcgcatagcggcatttcaaccgctcttcgtccgtctgcctgctctgctgctgtaaaaactgttccatagcagcaccaagaagctccgtcaccggttccatatgctcccgcgtgtagtgctctccttccggaaatacccgttcgataattccctgcttttgcagatcctgtgcagtcagccgcatcacgtttgccgcttccttcgcacgggaaacatccttccagagaatgctcgcaaatccttccggggaaagaatggaatacactgaattttccagcatccatacttcatctgccaccgctagggcgagtgcgccaccgcttccgccctcaccggtaatgacggtcagcaccggtgtgcgcaatccggcaagggtaaataaattgcgggcaattgcttctccctgcccgcgctcctctgcttccatgccgcagaaagctcccggcgtatcaacaaagcagatgaccggccggtggaatttctctgcctgctgcatcagccgcagtgctttacgatacccctccggcttcggcattccaaaattgcaggcaatattttctttcgttgtagtgcctttctgctgcgcgatcaccgttaccggctttccgcgaaaatatgcaatgccgccacggatcgccgcatcatccccgaactgccggtcgccgtgcagctctatgaaatccgtaaacagtgcttctatataatccattccgaccggacggtctgcgcttcttgaacactgtacccgctgccaggcatcctggctctccattcgttcttccggtttgcctaccgattttttgcagctttttttcagaagtccaactgtaaaacttcgctcagaggacactttacagaccgtcgactgaccgctttcgttactttctttttcactatgcagcctcagaagcctcccaagctcccgcttcatctcctgccgctgcacgatcgcatccagaaacccgtgctccagcaaaaattctgcgctctgaaatccttttggcagcttctgccggatcgtctgctcaatcacgcgcggtccggcaaagccgatcagcgcacccggctctgcaagaatcacatctccctgcattgcaaagctggccgtcacaccacccattgtcgggtcagtcagcacgctgatatacaaaagacccgcgtcactgtgccgccgcagcgccgctgacaccttcgccatctgcatcaaagatacaatcccctcctgcatcctggctccaccagagcaggcaaggatcacgactgaaatctgtttctccgtcgcacgctcgatacagcgtgtcagcttctctccgacggtttcccccatacttgccatcagaaaacgtccgtcacataccgcaatcgcagttctatatccttcgatatgacattctcctgttatgaccgcttctttcagtcctgtcttcttgcgcagctgtgcaagcttttcctgatatccgcggaactgcagtggattgccggccggcatctccttatcccattcctgaaatgtgcccggatctgcaatcattgatattcttcgatttgacggaacatgaaaatatccgccgcacttcggacagatataatattgctcctctacctccctggcaatgatcgccccatgacatttattgcacctccgcagcagaccttccggtacttctggttttccggcagatgcaccgccccttaccgctgcagcgggcttcatctttttaaacatattgtccagtttcatgtatctctcctctatcgtaccgggcggatattcgcaatccgctttgctgcttattgcttcatctgctctatgcaatggaagcaggggacttgcctgattcgtttaaaaactccacatcaaattttccgctgcagtagtccggatcctgaagaattccatattgataatccacgtttgtctcgatcccctcaatgatgatctcgccaagtgcactgcgcatccgttgaatcgcttcttctcgatcctttccccatacgatcagctttgccagcatggaatcgtaccagggcggaaccgtatagccgcgataaaccgccgaatcgatccgcacaccgtttccgcccggaaaatagacgtccgtgattgtccccggcgacgggcggaagttctgcttcggacactctgcattgatacggcactcgatcgcatggccgcgcaaaacaatctcattctgggtaaacccaagtggctctccggatgctatccggatctgttccttgatcagatcgatacctgtcacccattccgtcaccggatgctccacctgaatccgcgtattcatctccataaaatagaactgaccatctctttccagaagaaattcaatggttcctgcattggtatagcctgccgcctttgccgcctgcactgccgcctgtcccattctactgcgaagttcctcatcaatcaccacagacggtgactcctcaatcatcttctgatgatttctctgaatcgaacagtcacgctctcccaaatggattacgttcccgtaacaatctgccagaatctgaaattcaatatgccgtggatttctcacaaatcgctcaagatacatcgttccatctccgaacgccatctgtgcttctttctgagccgtctgaaagcttgccgcaaatgtctcgcgggtttctgccacacgcattcccttgccgccgcctccaagcgccgccttgatcattaccggataaccgatctcctctgcaatttcagcgccatgtgaaacgtcccttactgcttccttacttcccggaatgaccggaacacccgcttctatcattgtgctccgcgcctgtgctttattccccatcttttgaatcacttcagaggaaggcccgataaacgtaatgttgcatttctcacacagttccacaaatttactgttctccgataaaaatccaaatcctggatgaatggcatctgccccggatactaaggtggcactgatgatctgctccatattcagatagctttccgaagatgacgccggtccgatacagattgcttcatctgcaagctgtgtatgaagcgcctcctcatctgcctgcgaatacactgcaactgtctcaattcccatctccctacatgcccttataatacgcaccgcgatttctccgcggttcgcgactaatactttctttatcatagttccaccctttttcctatcctaccataaacgtcagctctgcagtcgctgcgattttcccattcacacttgcgactgcctcaccaattccaagcggtcctttctgtctgatgatttttgtttccagtttcaattgatctcccggaatcactttctcacgaaagcgacatttctggattcctccgaaataagctgttttgccttgattttcctccatgctcaaaatagctacagctccgacctgcgccagcgcctccacgatcaatactcccggcatcaccggttcttgcgggaaatgtcctttgaaaaattcctcccgataactcacacatttatatccgaccgcatattttcccggctcataatcttctatgtaatcaatcagaagaaatggatggcgatgtggaataatcgcttctatttcctttacattcaatcgtttcatctctctacttcccttctacaattcgaaacagcggttgtccgtaagaaacagcctctccatttgccacatagatttctgccacagtacctgcaaaatcactttcaatgtcattcatcagcttcatcgcctccacgattgcaagcatctgccctttctgaacaatatcgcccactttcacataaggcgcttctccctctgccggagcttcataaaatgttccgacaagcggcgaggtcacaatcgttccttctggttcctcctgaacttcctcgcaactctgtaccagattctcctgcttcttttctttctgcgaatccaatctgcttgcctcttcctctgtcattttcttcccggaagttgcatttccggagaaactgatctgactttccatatctccttctaccgttgtaccgacatggtatccagtccttttttctccttttctaagagagagcttcactcccttttcttcatacttaaactgtgtcagttcggatgcagacaccgcctgaatcagctgtattaactgttctgtttccatttcttgtacctcttttcccaatgactttctgaaagcgaatccgatcgtactaatgatactttctgatcagaagtgttgcattatgcccaccaaatccaagtgagttactcatcgcacagcacacttcctgtctgacaggcgcaccgagcacataatcaagtgtgcactcttgatctgcctccatagttcccacagtctgatggataaacccttcttctatggatttgacacaagtaataaattccacagcgcctgccgctccgagcagatggccgatcatcgattttgtagaattgatcttaagtttatgtgctgcctctccaaatgcagcgatcactgcccttgtttcaaacaagtcattgtggtgggtgcttgttccatgtgcattgatataatccacctcttccggagcaattcctgcctcctccatcgcaagctgcattgccttttgggcgccgcttccatcttccgccggagaagtgatatgaaatgcatcggcagtacagccatatccgatgacttctgcgtagattctcgctcctcttgcctttgcgtgttctaattcttcaagcacaacaatgcccgctccttctccgagcacaaatccgctccgttccttgtcaaacgggatggaggcacgaagtggatcttctgttgttgtcaatgcagtcaatgccgtaaaccctgcaactccggtcggacagatgcagctctcacttccacctgcaaacatcacatctgcatcgccatactggattgcccggaacgcatctccaatcgaattggttccagatgcacaggctgtaacaacactcgtacattttcccttggctccagtgtgaatcgacacgtttcctgctgccatattagagatcatcaatggcaccatgagcggattgactcttgccggccctttttccagtatcttttcatactctttctcgactgtggcaagacttccgattccagatcctacgataactcctacccgatacggatcctctttttccatctcaagtccggcatcggcacacgcctcttttgccgccgccactgcatactgggaaaataattccattcgttttgctgctttaaaatccatatgttcttttgcggaaaaccctttcacttccgccgcaatctttactttgtactcagctgtatcaaactttgtgatcggcccgatcccgacttttccctctttgattcccttccagaatgtttccacattattgccgatcggagtcactgctcctaatcctgtcacaactactcttcttttcatgtcgttctccctcattttctacattgccattccgccgtccacacagagtacctgcccggtaatatatgccgcttcttctgtagcaagaaatactgccgcatgtgtaatatcttccactgtcccgaaatgccccatcggaatctgtgtcaccaccgtttctcttacgcgatcggaaagtttttctgtcatatctgttgcaataaatccaggtgcaattgcattcactgtaatattttttgccgccaactcccgcgctgccgcttttgtcagcccaatcacgcctgcttttgacgcagaataatttgtctgccctgcatttcccattacaccggaaacagaggacagattgatgatccttccacttctctgccggatcatctgtcttgccgcaaatctcatacagtgaaagcttcctttcagatttgtatccaccacactgtcaaaatcatcctcagacagcttcatcaacaatccatctttcgtaattcccgcattatttacaagaatatccagtcttccaaactgttcgatcacctttttgaaaaatacttcgcatgtctgaaagtcagatacatcgcactgcatgatagctgcttcatttccttcttcttcgatacacttctgtacttcccgcgctcgttcttccgatccgttatagttgatcacaaccattgctccttttcgggcaagttccagagcgattgcacgtccaatcccacgagaagctccagtcacaaccgcaacttttcccgcaaaaatttctttctgtctgtttctttcctgattttgttcttcttttctatccatcttttttcgtaccagagaatgctatcctctctgcttcctttctgtcagattcttccgggcgctttccttcccattaaagttctccacatagatttactgccgaagctactttatccacatcttcaatgcaactaatgttcataaccgtgaccgttcgattgatcttctttaaaaagcctgccagtgtctttcccggaccaatctctataaatgtatctacaccatcttcgatcatccgctccatactctgctgccatctgacagaggccgccacttgctccttcagcagttcttttgtcttacaaatatccgtgatcggttctgctgtcacatttgtcacatatggaagttccagctcatggaagtggatctggtcaagcacctcggacagcttttctcctgactcttttaacatcggcgaatgaaatggaccactcacatttagcggaagtactctcttggcaccacactccaatagtttttcttttgccgcatccacactgtccgtttccccggtgatcaccacttgtcccgggcaattatagtttgcgaccgtcactcccttgatctcctctgttactttctcgatctgctctgcagaaagtcccagaactgctgccattgcaccaactcccgtcggcactgcctcttccataaggactcctctttttcgtactgcccagactgcgtccagatcagacattccgcctgctactgcaatagcacagtattctcccagacttagccccgccgttacatctgcacgaacacccttttcttctaaggtccttgccatcgcaagacaagtagtcacaagcgctgcctgtgtgtaagctgtctggtctaatttatcattctcatcaaaacaaagagttctgatgtctatttccatttcttcttttagcctcttagatgcagcatcataaatttctgctgccctctggctttgttcataaaaatcttttcccataccagtcttctgtgcaccctgtcccgggaaaataaatgctattttactcataaagcttcgcccctttcagacacgcttccgcctcgctcatcagtttttgaatcaattcccgacagctgaattcctctttgacaagacctgcacttaatcctgccatcagactgccattgactacatctccttccacgactgcctttctaagcgctcccagcgtaagcttttccaattcttcaaaagaagctccttctttttccagccgaaggtattcttttgtcatctgatttctcagtacacggattggatgtccggtacttcttcctgttacttttgaatcaatatctttcgctttgataatacatttcttataattttcgtgcaccaccgactcctttgtcacgacaaagtgtgtgccaacctgcactgcggatgcccccagcatcaaggatgctgcaaccccgcgcccatctgcaattcctcccgctgcaatgaccgggatggatactgcatcggcaatctgaggaacgagaaccatcgtcgtgttttctccgatatgtccccccgcctcagaaccttctgccacaaccgcatctgcgccacaccgttccattctctttgccaacgcgacggatgccacaactggaataactttgatgcccgcatccttccacagtttcatatatttttccggatttcctgcgccggtcgtcacaaccttcacaccttcttccgccacgactttcgctacttcatcggcatatggactcatcagcataatgttgactccaaacggcttctctgttcgttctttcaccttccggatctgctcccgcacccattctcccggcgcgctcgctgctccgatcaatcccagacctccggcttcggatacagcggctgcaagatgatgctctgcaacccatgccattcctccctgaaggatcggatattcaatttcaagtagttttgtcacatctgttctcatacggacacctttccttttcctgtcttttttatttctctaagtatgcaacaactgctccgattgttgtcagctgttctaaatcctctgtcggaatctctcttccaaattcttcctcaaaagccataaccatctcaaataagtcaagggaatctgctcccagatcttccttaaaagatgactctgcagtcaatgtacttacatctgctcctaatgaatctgctacaatttcttttaccttttctaacatagtgaatattctcctttttctcttacatgcatatggtctgcatgcgtttttcattttttcattttatttgtaatccggcagaaacatctttcatttctccgggaattaccctttttattaccactcaatcaatgtggctccccaggaaagtcctgctccaaaccctgccagcacaatcttctgtccttttttcagtacaccggattgcttcagctcagcaagcaggattggaatacttgccgaggaagtatttccatactcctgaaggttcattggaaatttttctactgtaagtccaagcctccttgcaactgcctctacaattctctgattcgcctgatgcaggataaagtaatcaatatcttccggtgcaagcccctccttctctaacaattcgctgatacatagaggcacttgtcggaccgcaaatttaaataccgcctgcccatccatatgaatatagtctgctctactgccacaggagagcgcctccccctgtgccccgtttgaatggaataccatcgacggaaaatcgccctcttctgcctgaagtatagcggctcctgctccgtcaccgaacaaaatacaagtactcctgtctgtccagtccacaagcttagacaaactctcggttcctataacaagtacgcattttgcaagtcccgctgcaatataagtctgcgcagtattgtaagcaaatagaaatcctgtacatgctgcatttagatcaaaacagactgcatgtttcgcgccaagtttcttctgcacctcacatgcggtacacggaaggactacattcgaagaaatcgtcgctacaatgatcagatcaatttcctctggatgaatctttgcatcttccagcgccctctcggaagctttccatgccatcgtgaccgttgtctcttcttctgatataatatgtcgtcttgcaatcccggtccgttcccgaatccatgaatcactcgtatccacaaacttctctaaatcataattgtcataatagttctccggcacatacgagccggttcctgtcactcttcctaccattgttttactttttctttcttattattttgttttaaaatattttgatattcaaagtatatcacaataatcaattttgtcaacatttttttatttttctcttgctttttcattttccatatgataaaatacattttgttagcggaaatgtcggaatggcagacgagctagattcaggttctagtgtgggttaccacgtgtgggttcaagtcccattttccgcatacatttgaacagagacaaaatcattggggcactttccttccggaaggtgccccgctgatttttgtctctcaaattttcactttaaaacggcatgccttttggctatgccgttttttctttccgctttcctttcagctgtacagccaatccgacaatcagtatcagtggaaatacagtcgcagcaaacaatcccactttgagattcccgccaaacatattagaaatatttcctaccattgcaggactgatcgtagcgcctaaatctcctgccagagctaaaaatgcaaacattgccgtgccaccccttggacacttctgtgacgaaatactgatcgttcccggccacataattccaaccgaaagtccgcaaagggcacagcctgccaatccgatcattggtgtcgaagacagagatgccatcaaatagcatattacgcataacacaccacatgccaacattgttttagtcaagtccagcttctcgctcatttttccatatactattcgagatattcccataaataccgcaaacaggcaaggccccgccaaatcaccaaccgttttagaaacacccatcgtggattctgtaaacgaagatgcccattgagccatagacgcttcagatgcaccggaacataccataagcaatatcatcaaccagaacaacggcaatctaagcaattggctgatccgcatactctttccatcttccactaaacgttccatcggacaagagatgaaattgaatgcattatataacggcaccactgcccaaatcattgtaagtatcttccaattttctacaccaaatactgtaaaaaagagagtggaacctaaaatcacacctacagccccccaacaataaaaggagtgtagtaaactcatcatcccgtctttattttcaaaaggacaagcttccacaatcggacttactaatacttcaataagaccactgcccatagcataaaggatgactgcaatcagaatacccgcaaaggagacaggaagcagttcaggcagaacagccattgaaacaagccctgctgcggataacacctgagacgaaactacacaggtacggtatcctattttgtcaacaaattttgtggcagcaagatcaatcagtaattgtgtgagatagaataccatcggaatcaacgcaatcttttcaaatccaattccataagtgttcttaaacgtcaaaaataacagcggagtgaaattggcagatatcgcttgggtaacaaaaccgagatagcaagctataagtgtttttttgtagtttttttgttttgtcataactgctcctttaaaatgaatgtaatattatagtcggattgcattatatcatcatagccaatcaaaacaaaggcacaaaagaaccaaatacaagcattatttacccaaaacacgatattgtcccggcgtatacccatagtttttccgaaactgacgactaaagtagtgtaccgaattaaaaccacaggaataactgatttcttgaagagaccgcgttgtatcttttataagtctgtgtgcaacttgaagtcggtgctgaatcaacgcatccactggagaacatcctacatatgcgttaaagcaacgtccggcttcgctgcggctgatattggcagatcgggcaatctcttccagcgtgacggcttctgcataatgctcccggatatacgagagcatcttttggatgcgtatttgagtattgatttgaatgcgtgtattttctgttttaggtaattcatcaaaattcgaaaagatacattgaaatatactgctaagttcgcgttgcacagccatttcgtaacattgaccttgttcagacatcagaccgtaaacatttttaaccaactgattcacttcattgtgccaactatttttttgatcaaacacaataaaaggcaaagcatcacagttcgcgacaggttgaatatatttttgataaatatcactagtttcagatgcaattaaggcacccgaaaagacaatattcggcatcggatcaggagtatcaccggataactgattgattccatgcaggatatttccattaacaaatatactgtcacccgcttcaaggatgatgtgatgttgccccacttgaaagtccagcacaccacttaccgcagtggcaatttcaaaatcaggatgccaatgtaaaggtccagcccagttaggaagcgcagcaagttcatcacaaaaatatgtaataggaaatttttcaacatcatggggaatttgttctctcagttgataatcaagtatgatcgccatagtttatcgctccaattctatttatttccgattgtacacagatagagaggacacaccctctttcgtaatccagtatgtcctctctattataagcgaaactcttctccaaaagtcaagctgttttctttccttatacattgatttctctagcgcaaagaaacaggcacttaagattgtgggaaggaatcttaagtgccccaagttttttaatattttatttttacagaaacgctgttctctttttgacccacatccgcgcttactctattcttcccagtaaattcttctctgtcgctcatccaagccttccacaaatcttcgattaaaaatgagaaattcttccagatccatcaaaatatggtataactttgcccgactctcaaaatcatccgttgtctttggcaattcatagtaatgaatttcttcaaataattcatgcaatttctcgatctgtggagtaggatcatttttctctgtcacaaatggtcgcagataggagatgtaatccgcaacgatatctgcttctttcgggatataacgaatctttttcatctcataatgcaggttgtgcaacacattacattgctttgtacgcatttcaaaatagtcaatgtaatatcccggatgagactgaaacgtattgttctggtattcatatgccgcttccacatggtattccaatttcttctccaacgcgataatatcatcccacacattcttatccatcggaatgttccgcagatatttctccagttcttccataatctgctgaagttttctctctacataccgcatatcttccacaagacttctctgctgtgcattattataatgaaacagattcaacaccgctgcaaatccaatcccgatcagtacaagaagaaattcattgagaataaattccagactgaaatcgtgtgtcatcaaaaaatgagttcccgttactgcattgaccgagattgtcgctttcaatcccgtccattctgagaacacaactagaagaaatataaacaatccgtatgccagccactcactgtccatatgctggaaaaaggtccacgcaacaatcaccgacaacaaaaaagtaatgacccgatacatcgaaagcttcagtgtatcccatttcgtcggtacaattgaaagcagtgtaataatccctgccgtcgttgcatactccagattcagtgccattgcaatagaaatcgccccacagcttccaactgcaatcttcgctgcttgaaaaataatctttc

SEQ ID NO: 2159 - DNA, 12988 bp, Unknown
  16S sequences of unknown bacteria
gcccggcacggcggcattggccccggcgctggaattgctgcgggtgccgccggcgtgtggagcttatgccgataacggagcatccctttgacggctcatggggctatcaggtgacgggatattttgcccccacctcaagatacggtctgcccaccgattttatgaaatttgtcgacataatgcattcaaagggaataggagtcattctcgactgggtgccggctcattttcccaaggacgaatgcggtcttgccgattttgacggcggcccctgctatgaatatgccgacagccgcaagggcgagcataaggagtggggaaccaaggttttcgactacggcaaaaacgaggttcaaagctttcttatctcaaatgccgtttattggtttaaaaattatcacatcgacggccttcgggtggacgcggtggcctccatgctttatctcgactacggaaggcagccgggcgagtgggcaccgaatatttacggcggaaacgaaaatcttgaggcggtcgcctttataaaaaagctcaacgaggcggttttcgcccgtttccccgatattatgatgattgccgaggaatcgacggcgtggcctcttgtgacaaagcccacattttcgggcggattgggatttaatttcaaatggaacatgggctggatgaacgacatggtcagatatatgtcgctggacggcatttatcgaaaatacagccacgacgccctgacgttttccttcttttacgccttttcggaaaattatgttttgccaatttcccacgacgaggtggtgcacggaaaatgctctctcataaataaaatgtcgggcgaatatgacgataaattcgattcgctgcgggccttttacggatatatgatgtcccaccccggtaaaaagctgttgttcatggggcaggagttcggccagtttatcgagtgggattataaaaaggagcttgattggctgctgcttgattatgaaaagcataaaaagctttcggattatgtcagagaccttaacaaattttatgtcggtcatcccgagctttggcagatcgactattcatgggagggcttttcctggatagccaacgacgacaattcgggaagcaccattgcctttatgcggcgggacgacagcgaggattatctgatttcgctgtgccgatttattccgaacggcgagccgaattaccgtatcggcgtgcccgagagcggaagctacagaattgtttttaattccgatgacgaaaaatacggcggtaagggactgtgcggcaaaaaatcggtcaaggccgaaaaaattccaatgcacggctttgaacagtcgatttgcgttcctcttgcgggaaacagcgtcatgtatcttaaaaaatatcgaaggaaaaagtaaggaggcgcctttatgttttataaaaccgagtgtgtggccatgctgcttgccggagggcagggcagcaggctcggggttcttaccaaaaaggtggcaaagccggccgtgccctacggcgggaagtatcgcataatcgactttgccatgtcaaactgcgttaattcgggtattgatacggttggcgtgctgacccagtatcagcccctcgagcttaacgattatatcggctctggagttccctgggaccttgaccgaacaaacggaggggttcacattcttccgccctatcagcgcaacaagggtgccgattggtataagggaacggccaacgcggtttaccagaacatgaatttcatcgagcgatacgacccggaatatgtgcttgtgctgtcgggagaccacgtttataaaatggactactccgagatgatcgattttcacaagaaaacaaatgccgactgtaccattgccgtccttgacgtgagccttgaggaggcgtcgagattcggaatcatgaacaccgacgccgacggcagaatatatgaattcgaggaaaagcccgccaagcccaaatccaccaaggcctccatgggagtttacgttttcacatggaaaaagctcagggaatatcttatccgcgacgaggccgacgaaagctcaagcaacgatttcggaaaaaacgtcattcccggaatgcttgccgacggacagcggctcatggcctttccgtttgaaggttattggaaggacgtcggcaccatagattccctttgggacgccaacctcgaccttttgaatcccggctcaaatctcgatttaaacgaccgcaaatggaagatatattcgcgaaattccgtcatgccccccgcctttatcggaaaagaggccgacgttcagaattcggtcataagcgagggctgtgaaatcgagggctttatagactattcggtgctttttcccggagttacggtggaggaaggggcagaggtccactattccataataatgcccggcgcagtcattaaaaagggcgccgccgtcaaatatgccataatcggcgaaaattccacggtggagcaaaatgccgccgtgggagccgctcccgagcagacaaagcagggagaatggggcgtggccgtggtcggcccggatgtgacggttaaagaaggcaccgcagttgcacccaaagaaatgattgacggtaccgcttcggaggtgaaggaaaatgcgtaaggatcttctcggaattctttttcccaacatgggcgacggctttgtcagagaaatgaccgaaatccgttgtatcggttcggtgcctttcggggcccgttaccgccttatcgactttgccctgtcggccatggtcaacgccggcataaccaaggtcggggtcaccacaaggcagaattaccgctctcttatggaccatctcggcagcggaaagccgtgggacctttcgagaaaaaaaggcggaatatatttcttcccgccatatacaaacagcgtgggcagcagcaattccacccgcatcggcgagcttgcttcgctgcttccattccttgaaaaatccgtggaggaatacgccgtgctcagcgactgcgactttgcgggcaacatcgatcttgaggccatggccgaaagccacattaaaaacggcgctcaggtgaccgtcgcatatacaagcggcaaaaagccgagagcgggcggcgagcgcatggtgcttaaggttgacggcggcggacgtgtgaccgaaattctcatcgacccggaggaggaagtttgcgactatgcgataaacgtggtcattatgaaccgcgagctgcttataaaaatagtcaaggacgccataagccgaaattattcaagcctcgggcgggacattttgcagagaaatctcggaaatcttaagatatacggctggaaattcgacggctatataagggtcatggattccatgaagaattatcttgcctttaatttggagctgaccgaccgggaaaagcgtgcggcgctttttgacaaaagccgcccgattttcacaaaggtggccgacgagtgcccggcaaaatacggtctcgactgtaaggtcaaaaacagcctgattgccgacggctgcattatcgacggcgaggtggaaaactgtgtgctcttccgcggagtgacggtggaaaagggagcgcggcttaaaaactgcgttgtcatgcagggctcacatatcggtgaaaacgccgagctttcctatgttgtcaccgataaggacgtggttatttcgcccacaaggctgcttgcgggatttgagtcctatcccgcctttatagaaaaaggctctgttgtttagattaagagaggttgaaacatatgaaggttcttttttgtacaagcgaggcggcgccctttgccatgacgggaggtctcggcgacgtgtcggcggctctgccctcggctcttcgaaatcgtatggtgggctgccgtgtggtcatgcccctttatgaggacattgccgacaaatacagagaaaaaatgacgtttatcacaagcattgtcgttcccgtttcctggaggcggcagtattgcggtatcttcgaggccaaggagggcaacgtcacctattattttatcgataatcagtattatttcaaacgccacgggctttacggatattatgacgacgccgagcgttttgcctttttctcccgcgcaattctcgaaatgctgcccgcaatcggatttttccccgacattatccattgcaacgattggcaaacggctcttgtcccgacctatttaagccttttctaccgtcaaaacgagggctttgaaaacatcaaaaccgtgctgaccgtccataatattcagtatcaaggcaaatacggcatggagattttggaggatgtgctgggcattcccatggataaaaagcccctgcttgaatacagtggtgacgtaaacattctcaagggcggaatcgagacggctcattcggtcacgacggtcagtcccacctatgccaaggaaattctcgacccgtggttttcccacggccttcacgacattttaaggctgagggaatggaaacttcacggcattgtcaacggaatagacaccaaggtatacgaccccgaaaccgacgagagcatttttgaaaactattcggccgaggacatgagcggcaagcttaaaaacaagaccgagctgcaaaagcttatgggacttcccgaaaacccggatgttgccgttatcggaatggtcagccgccttgtggggcacaagggctttgaccttgtaaaatattccttcgaggaacttatgcaaagcgaaattcagcttatctgtctcggttcgggcgaatgggtctttgaaagctttttcgatgaaatggctcagaaatatcccgaaaaattcgcgcttcacaccggctttgacgtggagcttgcccacaaaatttatgccggctccgacttcttcctcatgccgtcaaaaagcgagccctgcggcctttctcagatgatcgcgctgcgttacggttcggtgcccatagtcagagaaacaggaggtcttcgcgacaccgtcagcgactgcggcgacggaaagggcaacggctttaccttcaaaacctacaacgcgggcgacatgaacggcgccgtctatcgcggcctttccctttattatgacgacaaagagggctttgaaaagcttaaaaagcgcgccctgaaatgcgacaacagctggaaaaaatccgcgcttgactatataaagctttacaagagcctgcttaaataatatgacaagcaaaaatccccgagccttttcggggatttttttgttgacaaaatagggagaaatagtataataagtataacaaatcatacttttcggaggcagtatcatgaacggaccaaaaggaaaatacgcctggacggcgacggtgggcgaaaaggggcaaatcgtcattccaaaacaggcaagagagattttcgacataaatcccggggacacgttgctcattctcggcgacaaaaagcggggtatcgccattccgcccaaaggcgcttttgcaaagcttgcaaacaaggttttcgaggaggaataatccgtggagaaaatttgcgaggttaaaaatctgaaaaagtcctacggcggcttttctcttgaagatgtgagcttttttcttgaaaaaggcagcataacaggctttgtggggcgaaacggggcgggaaaatccaccacaataaagtcgatgctcaatctggttcacagggacgggggcgaaatctcctttttcggccttgacgccgacgaaaacgaaagacggattaagcaaaaaatcggttatgcctcggcgggggttcattattacgagcaaaagaaaataagagacatcgccgacgttatgtcgaggttttacgacaactgggacggcgggctttttgaccgctttacggccgatttcggaattgacaaaaacaaaaagcccatcgagctttcggagggcatgaaggtgaaattcagtcttgccgcggccctttgccacggagccgagctgctcattctcgacgagcccacaagcggtctcgatcccgtttcgagagaggagcttctcgagctgcttctcggccttgcggcaaaaggcgtcacgatatttttttccacccacataatcggtgacatagaaaagtgcgccgaccgcattgtttatataaaaaaaggtcggctgctcgcttttgacggcatcgaaaattttaaatcggattataaaatcgtgaaaaccccgcaaaatggcgaaaattgccccgaatttatcggcgtgtgtcggtcaagggacggggccacggcgctcataaaagccgccgacgccgaaaaatttgaaaatacatactcgccgagccttgaggaaatcatggttcacatagaaagggagggtgaaaaatgaaaagcctgctttacaaggaattaaagctttcttcgcttgccgtgacatatttctttatcgccttcgggcttatgacatttttgcccggctatccgatacttctcggcagcttttttgtgtgtatggggattttttattccttccagttttcaagagaaagcaacgaccctcttttcaccgtgctgctgcccgtggcgaaaaccgacgccgtgagggcaaagttcctgtttgtgcttgttgttcaggggctttcctttttgctcatgacaatttgcacgcttgtaagaatgactttgctgtcccgcgccgccgtttacgagcaaaatccgctttcaaacgccaaccttttctatcttggcttttgtcttgtcatgttcgggcttttcaatttgatttttgtgagaggttattatgaaaccgcctataaaatcggagtgccatttattgtctactgcgccgccgccatgctgcttgtgggcgtcgacgaggcccttgttcacataccgggatttgaggctttttcggtcacggatttttcctttatgggtgcccaaattgtcggtcttttggcgggatttgcgattttcgccgccatgaccgccgcagcatatgccctttcggtaaaaagcttcgaaaagcttgatttttaaagcttataatcacaaaataagacccgcttggctgagtgttcataaggaagtattggtttctcgcataaaagtcctctcaagacgacagctttgcaccgctttttcgaattcggcacgaaagaatttttaagcttagaaactgcaacgcacttcaaaatgatatatttttgtgcaagaaaagacaaatcccacagataatgccggcgcatatctgtgggatttaacgcattcgttgtgcaaaaagatgttattttgaagcaaaactgccttattaacgctcagccttttcggcgggtctttaaatttatccgtttcttgaaggctctttcataaagcttcccgcaaggtcgggaacgctgtccataatgaaattgccgtttttgtcaagctttgccttcataaagcagagcggacggtgccaggtggcctcctcggtcgaggtgcggccgtggaaggctatccaaagctcgctgccgtcgggggagaggaaaaaggaattgtgccccgtgcagtatattcctccgcctgcgcgaagcagcggacgggaaagcttttgccatttgctttggtcggtgaggtcgtcctttttgtaatcgcctttgaattccaaaaggccgagacaatattccttcgagtcgccgttgtttgccgaaaagcaaatgtaaagctttccgttttgctcgataaaacagccgccctcgttgacctttcccgtttcaagctcccaggagagtgtgggacttgagattacggtgcggctttgctcgtccatcgtccatgggttttccattttcgccgtggctatgcggttaacgcccccgcccgccgaaacataggtcagataaagggtgtcggtatactcgttgtaatacggcgaggcgtcgatgcagtagccgtctcccaaaatccctttgaagtgataatttccccaaagctcgctgccgtcggactcgagacaaaagagccgctgggtttcatagttgccgggggagagagttccgttggcgtatatataccatttgttttgatttttgtcaaaataaaattcgggagcccatatgtcgctttgaataacgtcccagccgcctgtatagaccgtaagctgctcgtcggtggtgacggtggagagataacggcttcgataaagggtcaggcgggtggcctcggtgaaaatcgcatagtaatatccgtcaacatatttgacaaaggggtcgggacaggacatttcggtcgcgggatttttcaaaatatcgcccttaaagttttgcgaagagtcgagcagcacaaatccgtttgaataattttcggcggatatgacctttgtgcaaaaataattcacggcgtcatttatgcgttcgccctttgcggcgataaggattttgtcatcggaaatttccaccttgatttcggggccctcaagctcgttttcggggtcgtttgaaaggacaatgcttttttgcccctcgccgtttgtgatttcaatttcttttccagaaactgacaaaatccgctgctttatgacctcggcatagggggaaagggcgctgtcggccgttatgacaaaatcggaaatgtcgtttttgcacacctttatgccctttgcgggaattgcgggcgtgtcaaagggactgcaaaacccgaagtcctttgaaagcatacaggcattgttttgcgattttaaaaagtttgtaagatattccgccgccgcaagaagggtctcgtcggaataggagcaaatcgcaagctgtccgccgctttccttgactgcgaattcgccctgagaaagctctgaggagatttccgatgaaagggaacggttggtgtttccgatgagaatgtcacccgcctgctcggctctcgaatcgggggaaaagagaatttttgcccccgtctgctcatttataaagctttgcagctttttaacggcgtcaagcacatactgtgaacagcccgaggggtagattatgcgggagccggtcttgccgccggcggcaaagattgaaaacatccccatcgaatactgaaggtcaagaagcgcgtcggaaaccgtgacctttccgtctccgtcaaggtcggctgccgatatttcgtcctgcgtcggtgtgatttttcccaccgaatactgaagaatgagcagcgcgtcgcccacgtcggtccttccgtttaaattaagatcggcgtaaactccgaaattcttaagcgactgtgcgggagagcttgcctcctccgccgcggggtaaacgccgaaaagggggcaaagggaaagtgataaaatcagacataaaagttttttcattaaaatcctcctaggggtacttataaagagttaaagctttgccgacggctcttttatataggtgcgcgacggctcgggagttgtgtccatgacaaagctgccgtcgggattaagctgcgccttcataaagcaaagagggcgctcccatgttatttcaatggggtcggtgcggccgtggaaggcaatccaaagctcgctgccgtcgggagagcggaaaaaggagttgtgtcccgtgcagaagatgtcctccccggctttgagcagggggcggtcaagctttttccacaaatcggggttgttcaggtcgtcctttttatagtcgccgagaaattcgagcagtcccacgcagtagggcttggaatcgccgttgttggccgaaaaagcaatatacatcttgccgccctgttcgataaaacagccgccctcattaactctgccggtgtaaagctcccaaggatattcggccttgcagatgatttgcctgctttgctcgtttatcgtccaagggttatccattttcgcaatgcaaaccctgttcattccgccgccgataagggcataggaaaaataaagcgtgtcggtataggggttatagtaaggggaggaatcgatgcagtaggtgtcggggtcgataagccccttgaagtgataatcgccgaaaatgtcctcggtgtcggactcgaggcaaaagagccgctgggtgtcgagatcgccgggagtcatggtgccgtttgaatagacataccaacgcttgtaattcgggtcaaaataaaattccggtgcccaaatgtcggcctttatgacctcgtctccgccgcggtagatgaccttgctctcatcggtggtgagggtggagagatggcggcttctgtaaagctcgagacggtcgaaagcggtaaaaacggtgtagtaatatccgtcgacgtattttacaaaggggtcggggcaggaggtttttgtggtggggtttctgaaaacatctcccacatagccgtccttttgagaaagctccaattttccgtcctttgcgttcttttcgcaaagaacgttttggcagaaaaagcctgcggcgtccttaatgcggccgccctttgccgaaattataacgtcgtttccgatttgcaccttgatttgagcggcgtcaagctcgtttgaaaattcttccgaaataataattttacgctctgaattttttgacagagtttttcccgtcagctcaaaaacgcggttttccacagactccttaagagcaagaaggccgctgccctcggtgaccgcggaaaattccgaaatatcggtgccgttaattttgatttgaattttcgatttgctttggttttccatttgttcctccgtaattaaaacaggtttttgagagcggggtaaagctctctgaatttttgatatttttctttatatttttcgaccgcctcggggtcgggccttgttgtgctcacgaccctgacaatgctttgcgccgcctttgttaccgagtcgaaagctccgcagcccaccgccgccagcatggccgctccgagagcgggaccctcctccgattcgacggtttctatgcaaagccccgtgacgtcggcgattatctgcctccaaagggggcttttggcgccgccgccgcatatttttgccgaggttactacggcaccggtgctttttgccgcctctatggaatcattaagcgcaaaagctaccccctcaagtatcgaaagggtcatgtcctgtcgggtagtatccatggacattccgaagaaaacacctcttgcgtcgggattgttgtggggcgaacgctcgcccatgagatatggcagaaagatgaccgggttttccccgagcttaaggtttccctgctgctcggccgcatagtcggaggttttcagaatgttttcgcaccaccatttgttgcaggatgcggcgctgagcatacagcccatgagatgatatttgccgtttgcgtgggcaaaggagtgcagcgcgttttgcccgtcggttccgaaagcgtcttttgagataaacaccgttcccgaggttccgagggaaatgttgcagtcgccgtccgacaccgttcccgtgccgattgcggccgccgcgttgtctcccgctcccgccgcgattttaacgttatttgaaagaccgagggcttttgcgtgctcctccttaagggttccgacaggttcatagctttcataaaccctcggcagcaggctttcgtctataccgcatatgtcaagcatttcctttgaccagcggcggtttttcacgtcgaaaagcagggtgcccgaggcgtcggaaacatcagtgcaaaagcttcccgaaaggcgataggcgataaaatccttgggcagcatgattttcttgattcgcacgaaattttccggctcgttttccctcatccaaaggattttcggggctgtaaacccggcaaaggcgatgttggccgtaagtgccgaaagtcgctccttgccaacggcggtattcagatattcggtttgctttgcggatcgtccgtcgttccagagtatagccgggcgaatcacatcgtcattttcgtcaagcgcaacaaggccgtgcatctgcccgccgaagcttattcccgctacctcgcttttgtcaagaccgcaaagcagctcacaaagtcccgacattacgcccgagaaccaatcctcgggattttgctcggaccaaccggatttcggaaaatacaggggatattcctttgaaacggttttgagaattttgccgttttccttcatggcaatcagcttgaccgccgatgtgccgagatcaatgcctataaagatcatgaaaatacctccttgtcaccttgattatatcaaacaaaaagccttatttcaacacaatgttgggttcaaattcccttaaaggcgcaaaaaaagagcccatgcacacgcataggctcttgaaattgcgaaatcggactgccagaagttatctcttggagaactggggtgcgcggcgggcgcctttgagaccgtatttcttacgctctttcattctgggatcgcgggtcaggaagcctgctttcttaagaatggggcgaagctcggcatcatactgaagcagagcgcgggaaagaccgtggcgaattgcgccggcctgaccggtaactccaccgccgcctacgcggcagacgatgtcgaattttccgttcgttttggtggccgcgagaggctgacgaacgatgagcttaagagtttcaagaccgaaatactcgtcgatgtcacggtcattaatggtgattttgccggtgccgttatagacacgaacgcgagccacagagctctttctgcggccggtgccgtagaaataaggtttgctgtcgtacattattcgttacctcccttaaagtgtgtaagcctcgggcttttgagccgcgtgcttgtggtcggcgcccttgtaaacgcgaaggcgggtgagagcgctgcggccgatggtgttgtcgggaaccatgcccttaacggcaagctccattgcgagctcgggacgctgagccatgagggtaccgtaatcggtttccttaagatgtccgatgtaaccggtgtgacggcgatagaacttctgggtgagcttgttgccggtcagcacggccttgtcggcgttgatgatgatgacgtgatctccgcagtcgagatggggaacgaaggtagtcttgcgcttgccgcgaagaagatcggcggcaactgct

SEQ ID NO: 2160 - DNA, 16397 bp, Unknown
  16S sequences of unknown bacteria
gagatctccgccgcccggaaggaagtccccggccgccgcggctaccctggctatatgtataccgacctggcgacgctgtacgagcgcgccggtcgccagaaggggaaggacggctccatcaccatgatccccatcctctccatgccggaggacgacaagacccatcccatcccggacctgaccggctatatcaccgagggtcaggtcatcctgagccgtgagctgtaccgcaagggcattatgccgcccatcgacgtgctgccgtcgctgtctcgcctgaaggataagggcatcggcgagggcaagacccgcgccgaccatgccaacaccatgaaccagctgttcgcggcctatgcccgcggcaaagaggctaaggagctcatggtcatcctgggcgaagcggcgctgtcggacattgacctcatctacgccaaatttgccgatgagtttgagcgggagtatgtctcccagggctttacgacggaccgggatatcgaagaaacgctgaacatcggctggaagctgctgagcattctgccccgtagcgagctcaagcggatcgacgacaagtatctggatcagtattacggcaaattctaagccgcaaggcagaaagaggtgacgtcagtggcgacgacccaagtgaaccccacaagaatggagctgacacgtctcaaaaagaagcgcaccacggcggtgcgtgggcataagctgctgaaggataaacgcgatgagctgatgcgccagtttctggacctggtccgggagaatatggcgctgcggcagaaggtcgaagccgggatccgcgcggccaatacgaattttgtgatggccaaggccgctatgtccgaggcgacgctgcgcacggcgctgatgtgcccgaagcaggaggtcagtctggatgtcagcagccggaacgttatgagcgtggatgtgccggtcttcggctaccggacccgcacggcggatgagaatgacatctactcctacggctttgcctttacgccccaggatctggacggcgcggtacagtcgctggcgcagatcctgccggatatgctgcgcctggccgaagtggaaaaatcctgccagcttatggccgaggagatcgaaaagacccgccgccgcgtcaatgcgctggagcatgtcattatcccggagacggagaagaatatcaagtttattaccatgaagctggatgaaaacgaacgcagcacccagatccgcctgatgaaggtcaaggatatgatgctggagcaggcgcatcattacagccggaagcagcagggctacgcggtcgaagtcgagacggccccctgagctccgagccaattgcattttcaaaaatccccggctgcaaagccggggatttttgcgcttgtaaagccgcctggaaatggcagaagaaatgttaaatccggcggaaaaactaggcagcgcaatctcttggcgaacatcatgcccggtggacttctttcggtaaaaacggccaaaatttatgagaagagccaaaaaatttttaggactctcaataaaaaaagcaagggcatattgtgtgttttcacaaagttagccgtccatttgcacaaattcaaaatgtaaaattagctattttaaacaatgtgaaattgctatattgacaagccgaaaaaacactgctaaaattgcagtatgaaagcggttacattttaagagaattttagattttatttggtagagtcagatattttcgcagcgcttctccggcagcagccagcggtatggcatcggtcgggcgcgatggaaaggaagtcgtttgcatgaagagtaagattacagtatttggcagcttcgtcgtcgacctgatggcgcggaccccgtcgttgcctattcccggtgagacggtcaagggctccatgttcaagatgggcgctggcggcaagggcttcaatcagtgcgttgcggcacacaaggccggtgcagacgtcgccatgtgcacgaagctcggcaaggatacctttgccgacgtcgcgctcaacacgatgacagagctgaacatgccaaaggattacatctttacggatgataccctggcgaccggcattgccctgattctcgtcgatgagaacacggcgcagaacgagatcgtgatcgtttccggcgcctgcggcaacattacggatgcggatatcgccaaggtcgccccgcgtatcaaggaatcggagtacatcctgctgcagctggaggtcaatcaggacgccaacgaaaaggtcgccaagatggccaaagacgccggtgtcaaggtcattgttaacacggcaccgtatcagcccgttacggcagaatttctctccggctgctatctggtcacccccaacgaagtcgaggcagagctgatgaccggcgtgcatgtggaggatctggaatcggcgaagaaggctgcagaagtgttccggtccaagggcgtcgccaatgtgctgattaccctgggtggaatgggcgttttcgtctcctcggaaggccgggaagagattatccccgcataccatgtcgatgcgatcgacacgaccggtgctggcgacgcattcaatggcggtctgctggcagccctgtctgagggcaagcccctgtgggaagctgccgcatttgccaacgcgctggcggccctgtccgtccagaagctgggcacaacgccctccatgccgacccgtgcggagatcgacgcatttatccaggcacatcagaagtaaaccatagttcagtatttcaatgatgaaaggaagtcttacatatgttaagaggtatcccgactgaaatcagccccgatctgctgcatgcactggcctgtaccggtcatggcgacctgatcgtcattgcagacgacttctatcccccctacagcaagtcccccaacgcgacgacagtcttctgcaagggcaacacggctgcggagatggtcgacgccatcctgaagctggtcccgctggatgttgagtacgaagcgcacccggtggaatacatggtcccggatgcggattccggcgtcaccatggagggctccaaggcgtgggatgatgtcatcgccgctgtcgaagccaatggctacaagaaggaatgtgtcggcacgatcgagcgctctaaattctatgaaaaagcgggcagagcggcggtcaccgtctgcaccagtgagcggctgccgtacggctgctttatcctgcaaaagggcgtcctgtaagcccagcgtttctatttgtatgttgtttgcaaaagcaaataaacataatatttttaaggaggaaccaaaatgaaaaagatcattgcgttgttgctggtcatggccatggtggcttgcctgttcgtgggctgcgacaacaaagacgacagcaccggctctccggcgaatgaacctgcgagcacgggcagcgacaacccggatgcggagaacaccgcaaacggcggcacctacaagattatttacctgaccccctccaccgcttctgacttctggtcccaggttgagaccggcattcagcaggctatgaaggactaccaggaacagctgggtgtcaccatcaactacgaagtcatgggccctgctgaagagtccgacgcggaaggctatgtcactgcatttgagaatgcaatcgctgcacagcccgatgccatcctgaccgctaccctgaacatcgacccgaccatcccgaaggcaaaggaagccacggacgctggcatcatcctgaacttcgtcaactgtggcctgggcaacggcaacgacggcgctcactccgacaagtacaacgaattctactactgctccaacaccaccatcggcgagatggctgcccaggcattcctggacgcgatggaagcccagaacctgtccactgagtccggcacgatcggcatgcagatgaacatggaaaacgctgctctgaacttcagaatgcagggcttcgccgactacatggcggaaaaggctcctggcctgacgctgaccgacatccagtacaacggcaatgactccgctgacgcacaggctgacgctgagggcaccatttccgcgcacaaggatgatctgatcggcatctacgctggcaacaacgtcacctgtgacggcgtctgcgccgccctgcgtgctgccaacatgaacagcggcgttgtctccgttggcgtcgactccgacgacatcgagatcgctgcactgcgtgacggcttcctgtctgcaatcattgtgcaggacgctttcacccagggctacaagacgatggaaaatgccatcctgacgctggtcaacggtcagaaccccgagaccgagcaggctgtcaatgttcctcccgttgttgttactgctgacaacatcgacagcgaagagattcagttcatgatgtccccgtacgtcaagtaattttagcaggacacgattaccgtattaagcgaacgagggttccctgcggcctaaaaaccgcaggggcccttcatcctagggaatggggtgtaacattgcaagataccatcattaaagtcgaacatgtgagcaaattctatcccggcgtcaccgctttgaaggacgtcagcttggagctgaaaaagggcgaggttcgcgccctggtcggcgagaatggcgcgggcaaatcaaccctgatcaaatgtatcatgggcgtggaaaagccggatgaaggcaagatttccatgaattatgacggccagtgggtcgtcaacaacagtgcagtagaggcgcaggcccacggcgtgtttgcaaactaccagcatgttaatatcgctcccgatctgagcatcgcggagaactactatctgggccgccagcctaagacgaagatgggctttgtggactggaaaaaaatgcagagagacagccaggctgttattgataaattcgctatgggcgtggatcctctggctaaaattcgcgaactccctattgctatgcaggcaatggttacaatcagtaagatatctgtcaatgaagacatccgtgtggtaatttttgacgagccgacggcgttgctggaaaatgaaaaggtcgatatcctcttcaaattcattgcggagctgaaggaacagggcgtcagtattatttacatttcccaccgtctggaagaaatcgttcagatctgcgacagtgttacgatcctgaaggatggcgcttatgtggacacgctgcctatcgctgaggtcacgaaggactccttgatccagcagatggttggccgtccaatgacggacatttacaacatcgagcattttgaaccgggcgaagagctgctccgtgtcgagcacttctccgatgagaagtatttcaaggacatcaacttctccctgcacaagggcgagatcgttggctttgccggcctcgtcggcgccgggcgcagtgagatcatgcgggcgctgacagctgtcacaaagcacaccgaaggtgatgtttacatccacggtgaaaaagtcaagctgaaggatcccagcgatgcactgaagcatggcatcggcttcctgacagaagaccgccgcgccgacggctgtgcactgaagctggatatcaagcggaacatcaatatgagctcctatgatatgattagcaagagcggcattgtcaacctgaaaaaggagacccaacgggccgaggagtattctaagagcgtcaacgttaagacgccgtcaatctcgcagctagtcgggaatctgtctggcggcaaccagcagaaggtcgtcatcgccaagctgctgtgtcgcgatccggagatcctgatttttgatgaaccgaccgtcggcatcgacgtcggtgcaaagcaagagatctttaaactgatcgaacggctgacagcgcagggccggggcgtgatcttgatctcgtcctacctgcccgaagtcatggggctgtctgaccggctgatcgttatggcccagggcaagattaccgcgcagtacgataaagaagccctgaagaccctcaccgaagaggatgtcctgcgtatggcatccatcgaagattaagaggagagaatgctatgtctactactacgaaagtaaagcagcccggcaccttgagaagactcacgaagcactctgagtttaccatcggcctggtcgttatcgttctgttcctggtcgctgcgttcggtaccagcaactttctgacgaaatacaacctgatgaatctgacgaagcagggcgccatcatcggcgttctggctgttgcccagacgtttatcatcatcacctccggcattgatatttccggcggtgctatcgcaggtcttggctgtatgaccatggccatcatgattcgggacggctcctcggtcggccttgccatcctggtgaactttgtggtctgtatcctttgcggcttcctcaatggtgtgatcatctttgatttgaaggtccctgccatgattgccaccctgggtacctctacaatttaccgcggcattttgaaaatgatgtgtgccggtaactccatttccttcttcaatgatgacggcgtgaccttcatcagcctgtttgacaagatcggtaactacgacgtgttcggcttcatccccgtgctggcatgtatctggattgttgttgcggtcctggccttcctgatcctgcggtacacgatcttcggccgtgacctgtttgtcatcggctccggtatcgatgttgcccgtctttccggcgtcaaggtccgcaagaccttctacatggtctactccctggccggcctgatctacggcatcggctccatgatgtttgctggccgtattctccgcgctatgccgaacaccggtgatggctacgacatgaacgccatcgctgcttccgttatcggcggtgcgtctctggctggtggccgcggcgcagtgactggcaccttcgtcggcaccttgctgatggtcgttattcagaacgcgggcaaagcgttctccatcagtgactatatcctggaagttatgacgggcgtcctgatcatcattgctgtcgcaatggatatgatcaagacaaagaagggctaattctcaatcgaactgggcgcgtacagcagtacgcgtccagtagaaaaatccccgcactgcacgggatatccgaggcgcggggtaaagaagcaatctatgatctatggaggattttaacatgaaagaagcactcggtatggtagagaccagaggcctgatcggcgcgattgaagcagccgatgctatggttaaggctgcaaacgtacacctgattggcaagcagcagatcggcagcggcctggtgacggttatggtccgcggcgatgtcggcgcagttaaggcagcggtggatgccggtgcggcagcggccaagcgcgttggcgagctgtacggcgtccatgtcattccgcgtccgcatagcgacgttgaattcatcctgccgactcttgaagcaaaggcataagataactggtacatagcaggtgaaacctatggatattgaggcgattaaacgcgaaatggagcgcctgctggcagaggatttccctgtggatacggcagcagctgtgtccggtggaaaccaagacgttgcggcactgccccattatggtaggatccaaggcgctgatgttattagccatctggagcacagcctcctgaacccggatacgacaggcgagacgatcatgcgtgagtgcgcgctggcgcggcggctttccgtcgcggcagtctgtgtcgcgccatactatgtcccggcggcaaagatcgcgctgtccggttcgaccgttgctttggggacggctgtcggcttcccgcacggctgcatgtccgctgccgcaaaaatggctgagctacgtgagtgcatggcaaatggcgcacaggagatcgacgttgcgctgaataacctggcgctcaagtcccatcagatggacgtcgcccgccaggaactggacgagatgctggagctgaccaagggccgcgttctggtgaaagcggtgtttgagcacagtatttttgacgaagatgaaaaagaagccgttctaaaaatgctgaagagcagcggcgttacttttatcaagatccaaaatatgctctctggccacggcgcacgcgtcgaggacgtgcagtatgccgccagtattctgggccgccatatcgcaatcaagatcgacggcggaatcaagacgctccagcaggcgcaggatcttctagctgcgggcgcgtcacggctcggtttgacggcgacggcgaagattgccgcggaggccggtattcactgaccgccggatagaggaaaggataaaactatggatatcaatgaaattattcgccaggtcaccgaagagatttgcgcgaagtacggcgccagcggcgtcgcttccgcgaatgacggtatggacccggcgggtatggcgaaatatatcgaccatacctatttgaagcccgaagcttccctggaggacatccgcaggatttgcgatgaggcgaaaaaataccacactgccagcgtctgtgtgaacccttcttacgtgaaatttgtcgctgagcagctggaaggctccggcgttacgccctgctgtgtcattgcatttcccttcggcacgagcacgcccgaggcaaaagcctttgaggccagcgatgctgccagcaatggcgcgaaggaagtggacatggtcgtcaatattggcgccatcaagtccggtgactggaagctggtcaaacgggatattgaaagcgttgtcaacgcggtccggggccgtgccctggtcaaggtcatcattgaagcctgcctgctgacggacgaagagaaggtcaaggtctgtaccgtggccaagcttgttggcgcagactttgttaagacctccaccggttactccaccggcggcgcgacggtcgctgatgtggccctgatgcgtcagacagtcggcccggatatgggcgtcaaggcgtccggcggcgtgcgtacctatgacgatgccgttgccatgatcaaggctggtgcaaaccgcctgggtgcttcggccacgaagaaaatcatcgccggggatcgggacgatccgcataagtgctgcaactgcggcaactgcaaagctgtctgcccgtccggcaacgtcgaaatccgcaagaagctttattaaaaaggctcgacggcaggcgcagtactgtgcctgccgtttttattttgagttaggagagatcgtatgagaagacctatgattgccggtaactggaaaatgaatatgacgccgggccagacggtccagctggttgccgcgctgcggaatatggcccaggcctcccaggccgaggttgttgtctgcccaatgacagtcagcctctttgctgctgcccagggtctgaagggctcgagcatcaagctgggggcgcaaaatgttcactttgaggacaagggcgccttcaccggtgagtgcaactgcgcgtcgctgaaggagctgggcgtggaatatgtcatcctcggccacagtgagcgccgtcagtacttcggcgaaacggatgagacggtcaataagaaggtctgcaaggtgctggctgagggcctcaagcccatcatctgcgtcggcgaaaagctttcggaaaagcagatgggcatcacggaggagatcgtctgcttgcagacgaaggctgccctgcatggcgtgagccggacacggctggatgaggtcgtcattgcctacgagcccatatgggccatcggcactggcatgacggcgacaccggaggacgcgaaccagaccatccgcgccatccgaaatgcgatccgtggcgtctacggtgacgtggcgcagaatatccgcattctctacggcggcagtatgaacgataaaaacgcccgggatctgatggcccagagcgatattgacggcggcttgatcggcggcgcaagcctggtggcggaaaaattcgagaaaatcgtcaactataaccgttaaacgcggctgttgagggagaaaagtgtatgacgatttcagaaattgccgccaaagctggtgtttcggcggcgacggtttcccgtgtcctgaacggtaaaggccatgtgaaggacagcacgcgccagcagatcctgcatgtcatccggcaaaatgaatatgtccccagcgagattgcccggggcctgagtaaaagtgactccaataatatcggcgtctttgtgacggatattgagaacccctttttctccaaggccgtgcgggggatcgcagaaaaggcagatctctatgggtataatgtctttctgttcaatacggatgaggacccggagaaggagcaccgctatttgcagacggtcctcggcctgcggatcaagggcctgatcattgcgccggtttttgagacggacgatgagacgcggctgcgcctgcagcggatgcaggagcgcggcgtgccggtggtgctgctggaccgggatattcgtggtctgccgctggatggtgttttttccgaggacgaagagggggcctatcaggcggttcggtcgctgatcctggcggggcaccggcggatcgccatcgtcaccggtccggattatacgcgccccggcagggagcggacggcgggataccgccgcgcgctggaggaatttggcctgccgctggaggcagcctatatccgccacggcaatttccgctcggacctatcgtatctctgcacgaaggagctgctgcatctgccgcagccgccgacggcggtgttctgcgccagtaatatgacgaccattggcgccctcaagtatctaagtgagcagcgcctgcaggtgggccaggatatttccatcatcagctttgaccatgtggaatatcttgattgcgtgggcttgtcactgacggcggtggagcggtcctacgatgagatgggccgccaggctatggagctgctgcagaagcagctgacctcaagcgcaagacccgccgggcggacccgtgtctatcaaaagacgacgctggatgtgcaaggctcagagcaattggcgtccttgtccccggtatctgccgggctatgacggcgcgccgtgcaatgcgccgtgcaatggaatgcttaagtgaaaaaggaaaaaacggaatgaacgcacctgcgttcgttccgttttttatgcaagaggttccggtggtcagtccatgcatttggtcagtccgccgcctccatggatgcggcgtaaagctgattctttgcaaggcccgtctgcgcggcggcttgccgggctgcttccttgcgagagagtccagacgccatcagctgccgtaccagcgtcgcaccggtcgccaggttcggcgcatcctgccgcgcttccggcgcgccgccgacgaccaggacaaattcaccccggggggcgtttccctggaaataagccagggcggaggctagatcgaagcgcagaacctcctcgtgcagctttgtcagctcccggcagaggctgatggggcggtctgggccaaagcaggcaagcagctgccccagggttgccagcaatctgtggggcgcttcgtagaagatcatggtccgcggctccgtgcgcagctggtccagccgtgcctgccgctgcttcttttgcgctggcaggaacccttcaaaggcgaagcggcctgtcggcagcgcggagatgctcagggcggtgatcgccgcacaggggccggggatcgcacagacagggatctgcgcctgggccgccaagcggaccaggtcctctcccgggtcagagatcgccggggacccggcgtctgtcaccaaggcgcaggtctgcccctgggcgatgcgggcgataatctccggcccggcggcacccttgttgtgctcgtgatagctcaccagaggcttatgcagctgcagatggttcagcagcttccgggtgacccgggtgtcctcggcggcgataaaatccgcttcggccagcgtctggcggcagcggtcagagatatcggacagattgccgatgggggtgggaaccagatataaaagcgcagccatgggggtcactccttgtctaaataataaagctggcggtattccgccgtcggcgcgccgtcgggcgtgaaaagcagcaggtccggctccaatgccaagccaggcttgccgcctcggcggctttcgaccagcagcagcgagaccggcgccccggcgtgatgacgcaccaggcgcatccgttttggctcaaagcccgcctgccgcaggccgcacagcaggtcgcacagccgttccggccgatagaccagcgccagacggcctccggtcttgacgagccatgctgctgcgtccagcagctgcgccagggtgcaggttgcctctgaccgggcggcggcaagcagcggtgaagcggctgcctgcccgctgctctgggggaaatacggcgggttggccacggcggcgtcaaagctgtgctggggcagaatcgtgcggatttgccgcaggtctgcctgcagaatttcaacgcggggcgcaagcgcattgcggcggacgctctcctgcgctgcctggcaggccagaggctgcagctccagcccagtgatccggcagtccggcgcgcggcctgccagcaggaatgtgatattcccgctgccgcagcccaggtccgcaatgcgcatcgcatggcccaaagtgagaaaatttgccacaaggaccgagtccgtgctcatgcggaagcagtcatccggctggagaatccggatcccgctgtgcagctgctcaaaatacgccatacgaccgccttcccgcgtagaacgcaaatggttttccaatggcaatacaagaaacgagcctatgcgcaatgcaattgcaacataggctcgtttgctttttcttaccgctgttcaattgcctcggtgggacatgctgcagcgcaggaaccgcactcaacacaagcatcagcatcgatgacgtactttccatcaacttcggagatgatgctcagggggcaggtgtcagcgcaggtgccgcactgaacgcaagcgtccgtaatgaaatatgccatttttgtaacctccaaaataaattgcaaaagttttgcacttttattctaccatgttttttggaaaaagcaatatcagaattacatttccgccagaaagaccggccggtttaaaaccggatttttccgacgacaataggggggtaagatctggcacagagcaaggaggtgcggtatatgcgggtgaaattttcctgggaaacagagcgcctgctgcagcaggcggcctgcgtggcccggggcatgggccacggctacctgggcagcgagcatctgctgctggcgatgagccgcgcaccagagacgacggctgggcgcattctgcagtggtgcggcgcgcagtatacggcgctggcgccgctcctgctggcgcagatcgggcagggctgtcccggcagttcgctgcgccaggggatgacgccgggggcggcgcaggtgctgggaattgcggcccaggcggcgtcagacctgggcggcggcccattggagccggtgcatctgctgctgggtgtcggccgactgcccgagagcggcgcggcgcagctgctgcagcagtgcggcgtctgcctggacgatatttttaccgacactgttgcaagcctgcggcgacgggaattggacacggaaaagagggggattcctacgagagtattagatcaatttggcataaacctgctggaaaaggcggagaagatggagacggtcatcggacgggaggcggagattgcccaggtcatccagattctttgccggaagaacaagaacaacccggcgctgatcggtcagcccggcgtgggcaagacggccatcgtggagggactggcccagcggatggccctgggccatgtgccggagccgctgcgggggaaacggctcgtcagcgtcgacgtggccgggatggtcgcggggacgaaataccggggcgaattcgaagagcgtctgcgggatatgttggcggagatccagcgggcggggaatatcatcctttttgtcgatgagatgcataccctggtgggcgccggagccgccgaaggtgcgatcgatgcctccaatattatgaaaccggctctgggccggggccaactgcagctgatcggtgcaacgacgctggaggagtaccggcgctatatcgaaaaagacgccgccctggctcggcgcttccgcagcgtccagatcgcggagccgagccaggaccagacgctgcagatcctccgaggcttgcggcccggcctggagcagcaccaccgcctgcagatcacggatcaggccctggagacggcggtgcaaatggcggcgcgctatctgccggagcattatttcccggataaggcgctggacctggtggacgagggcgctgccattgccgccctggaagccgcccggggcggacgggagcgctttacccggcaacgggcggcgctggaccgggacctgggcagcgccctgcaggagcggcggctggaccaagccgtccagctgcagcagaagttgagccgcctggagcagacgatgccccaatataccgttcagccgcaacatgtcgcccaggcagtggcaaaccgtaccgggattccggcaggcgaggtccagaaccaggaacggcagcggctgcaacagctggagcagttgctgcgggagcggatcgtcggccaagaccaggcggtgcatgagatcgccggggccgtccgccggggccgggcagggctggccagtcacaaccggccggtggcggcgatcttgctgatgggccccaccggcgtggggaagacggccctgtgcaaggcgctggccgccgttgtctttggcagcgaaaaggcgatgatccggctggatatgtcggagtatatggaaaagcatgctgtctcccggctggtgggtgcgccaccaggctacgtcggctacgaagatggcggtgatctgacggagaaggtgcgccgcaacccctatagtctcgtcctgttggatgagctggagaaggcccaccgggatgtgacgggcctgctcctgcagatctttgacgatggcgtcctgaccgatagcaccggccgccgtgtggatttccgccacaccctaatcgtcatgacctccaacatcggcagcgaccagaccggcaaggggggcctgggcttctgcccggacagcgaaccggcccgccgacaggcccagttggagtcgctgtacccgccggagtttttgggccgcatcgactgcatcacccaattttctgcactggggcaggcggagctgacgcagatcgcggcgatgctgctccggagtctgcaggagcgggcggcgcagcggcaggtcatgctgcaaatcagcccggcggtggcaccgctgctggccagccaaagcagccgggagcgggcaggcgcccggggcatccggcaccggctacagcaggaggtggagaacccggtggccgagcaaatgctcagctgcagcggccgccccctggcgatccaggtgaccgtggcggagggacacgtcatcctgcgctgatcgtgcgtttgtttgcaaaactagaaacaaatattcgaagaagtgcgtgtttttatgaataaagcttaaattttactggaatattttccgaaaatccgaatttatggttgcatttttattttgaaacggctatactaaaatcaaagtggagtaaaatggatgaaaaaagattcgaagtggagcgaagtgaagtgaggtgaagcgagatgttcggaaagtaccgccacagtgtcgacccgaagggccgtctgtttgtgcccgctaagctgcgggaggaactgggcgacgctttctacgtcacgctgggcctggaccactgtgtttctgtttacacggaagctgcctggcagcgctgcatggagaagtacaataacctgtccatgtcccagagccggacgatacgcctgctactggccaacgccgccaagtgcgagccggataagcagggccgtttcctaatccccacggagctgcggaactacgccaatatccggcagaacgtggtcttcatcggccagggaaatcacgcagagatctgggatgccgaagcatacgaagccatggaggcggaaatgctcacgccggagaacctggcggccgccatggaggaattggggttctgatggaattttcgcatcggtccgtcctgctgcaagagagcatcgacgcgcttgcgatccgaccggacggcatttatttagacggcaccctgggcggcgcggggcactcgctggagatcgcccggcgcctgagcggcggcggacggcttgatcggcattgaccaggacaccgtcgccttgcaggcggcaagccaacgcctggcgctataccgcgaccgggtcaaactggtgcacgccaattttcgcgcgctggatactgtcctgcatgacgccgggctcaccggggttgacgggatgctgtttgacctgggggtatcctcaccgcagctggatgacagcagccggggcttttcctatatggcg

SEQ ID NO: 2161 - DNA, 10433 bp, Unknown
  16S sequences of unknown bacteria
agaacccccggctctcgtcggcgatagccgccgtggggcaggcgtccgtatgggcgacaagctggaagccatccggtacctgggccaggtaatcgccgtggctcatccaggtgatgctctccgccggcagaccggcaaagagcttgcagctttccgaaaaataggtgttcgtcttgccaaattcccgcgccgtcgcttccgacgcggcggtcacacagccgcccagggtctgcgccataagctggcagccgtagcagatgcccaaaatcggcagtcccaaggcaaaaatctccgggtcgacctggggggaatccgccgtgcggcccgccggtgaagataatccccttgggcgcaaacgcccggatctctgccagcggcattgtgtaaggcttgacctcacaatatacgttacattcacgcacacggcgggcaatcaactggttatactggccgccgaagtccaggatcaaaatcttatccatcgtaaatcaatcgtcctcacggaagacaaagccgttctcatcggccttgtcaatgatggccagggacttgatgggcatccccgcctcgcgcagcttgtcgccgccgtgctggaagcccttttcaatggcgatggcaatacccttgagctccgcaccggcttccttgacgatgtcgcacaggccgcgcatcgcttcgccgttggccataaagtcgtccacgatcagaaccttgtcagtggatttgatccaatccttcgaggcgatcagggtgaccttcttctgataggtgtaggaataaatatcgctctgatacaggccgccttcgatattatcgctcttggccttcttcgcaaagaccatcggcacgccaaagcgcagcgcgcagatcgaggccagggcgatcccgctggcttccgccgtcaggatcagggtaatctccttcgggtcaaaatactttgcaaattcgtcggcgatctgctccataaaggccacatcgacccggtgattcaggaagccgtcgaccttgatgatattaccgggcaagactttgccttctttgatgattctctcctttagtgcctgcatatttctgccatcctttccatttttgtggttgatttcctgccaattgtcagtataataaaaagtgggatataagtaaaatagctttcgttaatactcgttataagtattactaatttttggaggtgcgcatgactgctaagctggaattgtaccgcgtatttaagaccgtcgccgaggcggggaatatctccgccgccgcccagagcctgtatatctcccagtccgccatcagccagtcaatcaagcagctggagaatcagctgggcgtccggctgtttttacggacaccgcggggtgtcaacctgacagaagaagggcggatgctttaccaatatgtcaaccgcgccatcacgacgattgaaaacggcgaggagcgtctggcccagatgcagcacctgctgcggggccgcctggccatcggcgccagcgataccgtcacaaagcgctttttgctccccgtcctgcaagaattccaccgggacttccccgcgctgaaaattcagatcatcaacggtaccagctccatggtccttgaagcgctgcggggcgggacggtcgacctagcctttgccacctcccccatcgacgagacggagtacgacgccaccccctgctttgacaaccattatatcttcgtcgcctcgccggactatggctgcgatttcagccacgcctacagcctgcaggagttgacccagttcccgctgatcctgctggagcgcaaagccagctcccggcgctttctggagaatttcttcctggagcatggcctgaagctgcagcccgagatcgagctcggctcccacaacctgctcatcgcactggcccgtatcggcctgggcgtcgccggggtgacggaggaatttgcccagtcgggcctgattcgcggcgtcatctgcccgctgcggctgaaagaggagattccgacgcgctatgttgccatgtgtaccttaaaaaaggtccagcccagcgcggccacgctgaaatttatggaatacatccaggattatctgcgtaaatcgccgcactgagccaaccatctgattcaccgcagccgcccgcatttcccgcgcgccgctactatgcttctattatcgcacactttttccccttttgcaagaccaaacccagcaccatgtgccattttccgcgctgggttttcattgcgattctttaaaacgtacacgaaagcgcatctgccgcggcgggcgcgctttcgtgtacgtttcgttttgcttgtactactgggcctcctgtgggaacaggcacgcgatggcgctggcggcagcggcctgttcggcacgctttttgctgctgcccttgcccgtacccaccgggcggccgttgagctccacctgcatgacaaattgcttgtcatggtccggaccggattccttcaccagcgtataggcaagatgctggtccttcttccgctgcaccagctcctgcagggccgtcttatagtcctgattgcgcagatgctgcagcggcgggacctcgtcgaggatcatccggtagattagcgccttagccgcgggatagccgccgtccaaatacgttgcggcaaagacagactctgtcgcatctgcgatcatactggcccggtggcgtccgccgccggtctgctcaccgttgcccagctgcagataatcccccagcccaatccgctcagcggcccgggcaagattcgtctcgcagacgagatcggcccgcatccgggtcatctccccctccgggagcgacggctcgttgcggtagagataatccgccgtgacaaaccccagtactgcgtcgcccaaaaactccagccgctcattgcagacgatggccgggtcacgctgctcgttggcgtagctgctatgggtcagcgccgtacgcagcagctgccggtcgtgaaaccggtagcccaatttttcctccagctccatcagcttatccatgctcgctcgctccttgctttattgctccttcggcagctgcatcgccgcgatattttcgctgatcttctccgccacgccctgctccacgacctgcttggcctgggcaatggcgctccggatagcccgggccttggaagagccgtgggccttgatgaccggcttcgcgatgcccagcagcatcgtcccaccggcttcgttataatccagccgcccgcgcatggcctgcacaccgggtttacagagcagatagcccagcttgctccaaaggttccgggtgaacatgcccttcatcatgcgggccatatacattgccgtcccctcgatgctcttgaggaggatattgccggaaaacccgtccgccacgacgacgtccacgacacccagggggacatctcttgcctcgacattgcccgcgaagtgcaaaagcccctgcgcgtccgcctcctgcagcaggcgatacgcctccagctgcagcggcgtgcccttggtatcctccgcgccgatgttcaaaaggccgaccttgggcttgggctttcccaggacgtattttgcatagattgaacccataaagccaaactgcagcagatactccggcatacactcggcattggcgccgcagtcgatgaggaccgtcccgccgttgtcgttcggcagaaccggacccagtgccgcccgccggatgcccttaacccgccgcaccatcagcgtcgccgccgtcagcagtgcgccggtggacccggcggagaccatcgcgtcatagccgccgtcgtgaagcatcttcagtccgatgagcatggaagaattcttccgctggtgcatgaccgtcgaaggattgtcatgcatatccacaacgtcgtccgcgtgggcgatttccaccccggcgggcagcgtctcgatcccccgggccttcaggcacttgaggatctcctcgccgcgccccactagggtgatctccacattcagctccttagccgcgtccagcgctcccaggacgatttcatccggcgcgtagtcgccgcccatggcatcgacaataattcgcatcgtcgggacctcctatttctcagattccagtttccagcagcgcatccagcgtttccagcgcccgctgggcaatggccaggtttttattggccttgcccttgacccggtagcctaggggctccagaatgccgaagttgatattcatcggctggaaatttttcacgctcgggtcgctgatataatagcccagcgcgccgatggctgttttttgcgtaaagtccggcacaggcttgccctgcagccgggccgccagggtcaccgccgccagatagccggaggcggtggactccacatagccctccacgccggtcatctgcccggcgaaggccgtcagcgggtcccgccggtcggcgtagccacggtccagcagctggggcgaatttaagaaggtattccggtgcatgacgccgtagcggacaaattccgcattggccagcgccgggatcatggaaaagacccgcttctgctccccgaaccgcagatgggtctggaagccgaccatattatagaccgtcccggcggcattgtccttccgcagctggacgacggcatagggctcccgccccgtggccgggtccgccaggccgacgggcttgagcgggccgtagcgcagcgtatccagcccccgccgggccatgacctccaccggcatacagccttcaaagaccagcttgtcctcaaagccgtggaccggcgcttcctctgcgctgaccagctcctgcacaaattgccggtagacctcctccggcagggcgcagttgatataatccggcgtcccccggtcgtagcgggaggcaaaccaggcctttgtcatatcaatgctctccgccgtgaccagcggcgcagctgcgtcgaagaagttcagatactctccctgtccaaaatgcgccgtgatggcgttagacaacgcgtcagacgtcagcggccccgtcgcgatgatcacaggcggcgccgggacctcggtcacttcgccggaataaacggtgatattcgggtgattgcggatcttctccgtcaccagcccggaaaagccgtagcggtcgactgccaggcagccgccagcctcgacccgcgtcgcctcggcgcacgtcaggatcaggctcccggcccggcgcagctcctctttcaaaaggcccacggcgttttccagccggtcgccccggaaggagttggagcacaccagctccgcaaaatccgggctgtgatgtgccggggtcatcgcgctgggcttcatctcatacagcgccacagaaaagccccgctgggccagctgccaggcggcctcgcagcccgccaggcccgcgccgattactttgatcgtctccatgctcactcctgttttttcttcgcctgcgccgccttcggctttcccttggcagcgggcttcttggcggctttcgtcgcgggctttttcgccgtcttagccgcggactttgccgcggtcttttcggcggccttggcagtctctgctgtcttggcagcctcgtccgccgtcgtatcctgtttcggcttgcgcttatagccgcgcttgtcctccggcaggaaattcacgcatttctcgttgatacagaagggcttcatatgcccgcggcccgactttttaaacagcgtctgcccgcactccgggcaatccagctctgtcggcacgtcccaggacataaagccgcattccacgcccttttcgcaggcgtaatagacatagcccttggccgattttcgtttcagcatcccactgccgcacttggggcagcggccaggcatatgctcgaccagcggcttcgtattcttgcactccggatagccggggcaggctaagaaccggccaaagcgcccgctcttgatgaccatcttgcgcccgcagagctcgcagacctcgtctgtctcctcctccgggaccttgatgcgcacgccttccagcgccgcctcggcgtcgaccatctcctggtggaagcctgcgtagaatttctccagaacttccttccagcctactttaccggcttcgacatcgtccaactcatcttccatgtgggctgtaaatgccacatcgacgacatcctggaagcgctccttcatcaggtttgtcacgacctcacccagggccgtcggcatcagccgcttgtcctttttgaggacatattcccggtcctggatcgtcgagacgatggccgcgtacgttgacgggcggccgacgcccttctcctccatcgccttgaccagtgtcgcctcggtataccgggcggggggctgggtaaagtgctgctgcttctccattttatcggcgttcagctgctcaccctctgccaactccggcagggccgcgcccttttcctcctgctcgtcgtccttgccctcttcatagacagcggtgaacccggcgaatttcaggctctggtgatttgagcggaacagatgcccggcgcattccgtcgtgatggccacggcgtcgtaaagggcattgctcatctgtgtggctacaaagcggctccagatcagcttatagagccgatactggtcccgcgacaggctcgccttgatggactccgggtccagctgcacattgctgggccggatggcctcgtgggcgtcctgcgcggcattgctcgtcttgtaccggcggggcgcgccgttataatagcgggggccgtagcgctgggtgataaactcccccgccgccgccagcgcctcttccgaaaggcgcagcgagtcggtacgcatataggtaatcaggccgacggtgccgacatccgccacgtcgacgccttcatacagctgctgggccacggccatggtccacttcggcgtcatattcagcttccgcgacgcctcctgctggagggtcgaggtgataaacggggcaggcggcgtccgctttttctccgtccgcttgacactctggacagtaaagggcttccccttgacatcgtcgatgatctgctgcacttcttgctccgaatgcagctcccgcttcttgtcctcgccgtggtagtggccgacaaacgtccccggtttgccgatgcgggtaaactgggcgtccagcgtccagtactcctgggggacgaacgcgcggatctcctcctcccgctccacgacaagccgcgtcgccacggactgcacccgcccggcagacaggccccggcggatctttttccacagaagcgggctgagctgatagccgacgatccggtccagcagccgccgcgcctgctgcgcgtccaccagccgctggtcgatttcccggggctccgcgatggactggcggacgaccttctgcgtgatctcgttaaaggtcacgcggcagcttttgtcatccggaagctgcagcagctccttcagatgccaggagatggcctccccctcccggtccgggtcggttgcgagatagatcatagacgcatccttggaaagctgcgtcagctccttaataattgcctctttgcccttcatgggctgatagatcggcgtaaagtcatggtccagatcaatgccgaatttgctcttcggcagatcgcgcagatggcccatgctcgccttgaccagatactccggccccaaatattttccaatggtcttcgccttggacggcgactccacgataaccaaatttgttgcttcctttgccatggaagacctccgcattttttcgaagcggcgagcgccgctcgtttttacgtcgatttcgccgccaggcaaaactgcccgtccggcatacggacgacgtaaccgctgatctgcagcagggtcagatccgcaagcaaatcctgcggcgcaaggcccagcgtctgggccagcacctctggcacctgcgggccatcctgcagcgccagaacaatcttctgctgcccggcgtccagctcctgcaaaatcatattgacgtcaatataatccctggaaggctcgttgtcaacgtctattttgtccttttccggggcaaatgccacagtttttgttatttttttcggcgaagccgcctcatccgggtgcaatccgatggggtgcagcccgctctcctgccagacgatccggtactgctgggcgtagcttgcaaggatctgcgtgccatcctccaccagggccgcgccgtcacgaatcagctgatgcggcccggcgctccccgccgcgtccacactgccgggcagtgcaaacacatccctgccctgctcggcggcataccgggcagtgatcatcgcgccgcttctggcaggcgcttccatgaccgcgacgccgtcactcagtccgctgataagccggtttctgcggggaaaattctcccgcttcggcggcgtgcccggtgggtacgcactgatcaggcagccataatggcgaatatcttcaaacagctccgcattctgcggcggataaagccgatcgatcccgccgcctaggacgccgatcaccggaccgccgccggtcagtgcgcccttcatcgccacggtgtcaatccccagtgcgcagccggagacgacaattgcgccgccctttgccagctggtagccgaagcgctttgcgtggagcaggccataatccgtcgcatcccgggttccgacgacagcgatactgggccgggtgtccactggcggcataacgccctgataatagagcaccaccggtgcgtcatcaatgctgcgcagcttttgactatagagcgtgtcgctgcacggcagaatgccaatgcccttctcggcgcagtcgtctaaaatgcgccgggccggtgtcaggtcccgttccagcatcaggtcgatctggtcccggcgcaggcaatccagcgccgccagctccacccggcttgcatagaacaaaagctccggcgttccgaaggccgcaagcagctgctgcttcttgcggctgcccaggccaggcaggctcgccagccatacgaagtattgcagcatctttctcgcctcactgtctcatctgccacatgacaatcgccgccgcaatggccgcattgagcgattcgcagcgcggatgcatgggaatgatcagctgccgctgcgccgcctgcaaaaactccgcgctgacgccgcgcccctcgctgccgatgacgacggcgcattcggccgggttcccctggcggatatccaccgcctgggggctcagcgccgtcaccgccagcgggatgctctgcgcccggcaggcgtctaagaccgcctggggctcccccatctggggtggtgtccggaaaatcgcgcccatgcttgcccggaccgtctttgcactgtacgggtctgcgcagccgctgctaagaatcacgggaatctccagcgcgtccgccgtccgcaggatcgtgcccagattgcccgggtcctgcaaaccgtccagaatcaggcagcccggcgtgagggaaagcgggcgtggctctggcagtcgcccgacaaagaggaccccctggggcgcctgcatctgcgagatccactgcatcacatccgccgggacccggagctcctccagccccgccggcagcggcggcagcggcacattgtccgccgcgaccacaagctccagccccggcagccattgcagcgcctcggcaaagagctttgtcccgtcggcgacgaattggccgcaggcataccgatatgaccgcgacgcctggagcttccgcacatgctgcagcgccgcattatggcggctggtgacccgcttcatcgcttcatcacccgcgccaggtctctgaccgtgcccagggcgaccagtgtatcgcccgcggcgattgccgcatccgcgcctggtgagaccgtaatgtcatcgccccgccgcagcgcgatgacagagacatgatactttgcccggatatccagtgcacgcagcgtctttcctgcccacgaagccggtgcggccagttccgcaatgctatactcttctgaaagggcgatctgctccagcacattgccggagattagactctgggccagcttatcgcccatctcctgctccgggatgatgacccggtccgcgcccagcttgattagggcgcgcttatgctcccggctgcccgccttgcagaccacctgcccgatgcccaactccttgcagagcattgtcaccaaaatactggctgccacatcactgccgatggcaataaccgcacagtccacattctgcacgcccaggctccggagaacgtcctcctcccgcgcatcggcgacgacagcccgggtcacccggtcagccaactgcgcaaccagctgctgactctcgtcaattgccagcacagaatgccccagggtcatcaatttctccgctacagctgcgccgaaccggcccaagccgattactgcaaatgtcttcattcgccgttatcctctctttataatccagctaaattttatcatccggataaaccggattttcgtccggttgcatccggcgtgagagctgcgtt

SEQ ID NO: 2162 - DNA, 4575 bp, Unknown
  16S sequences of unknown bacteria
gccgcacatgcgccgaggatcgcggtattatccgattccgtacctccggatgtgaaataaatctcgtcttccgatacccccagagacgccgaaatcgcctttctggatgcctttaccagtttctccgcctcgacccccatccgatgaagagaagaaggatttccgtaggtattttccatcgcagagagcatcgtctctgtgacctctctgcgctgcgccgtcgtagcgctgttatccagatagatgagcatgacatcaacctcctgtaacagaatatcaaatgtattccggacggtaaaacgggctgtcccgatccaggagacagcccgtacttcagtttcaaattccagatccgctttttgccgctgtctttcgatttttacgacaaccggcttcagcggttcttatttcgcgtaatcgatcgcccgtgtctcacggatcacgttgactttgatctgacccggatactggagttcactttcgatctttttactgatttctctcgcgagaagaggaatatcgtcgtccgacttttcttccggtctggcgataattctgatttcacgtcccgcctgaatggcgtaagatttttctacgccaggcgtcgtattggcgatttcttccagcttctgcagacgattgatatacgtctccagagtttcgcgtctggctcccggtctcgctgcggaaagcgcgtcggccgccgcgatgagaacggcttcgagactcttcgcctcatagtcgccgtgatgggctgccatgccggagataacggcctccgattccttgtacttgcgcagaagatcgattccgatatctacatgcgtcccctccacttcgtggtcgatggatttgccgatatcgtggagaagtccggctctcttcgccagcttcggatccagtcccagctcggaagccatcagacctgccagatgggcgacttccaccgaatgctgaagaacattctgtccgtagctcgtccggtatttgagacggcccagcagcttgaccagttccggatggagattatgtatgccgacgtcgaaagtagcctgttctccggcttctttgatcgactggtttacctctctctctgccttctctacggtctcctcgatcctcgccggatgaattcttccgtctacgatgagtttttcgagacagatgcgcgccacttctcttctcaccggatcaaaaccggaaagaatgactgcttccggtgtatcgtcgataatgagatctacgcctgtcgccgtctcgatcgctctgatattgcggccctcgcgtccgatgatgcggcccttcatctcgtcgttgggaagattgaccacagatacggtggattccgctacctgatcagctgcgcagcgctgtatcgcgcctgtgataatttccttggctctcttgtccgcttcatcttttgccctggactcgatctctttgatcatgatcgatgcgtcgtggcgaatctccttttcgagattagacagaagaagcgctttcgcctcttccacagtatagccggaaactcgttcgagctcgtggagctgcttttcgataaagccgtccagctcggcttctttttcggcgagtctgtgttctgtattcgttatgctttcctcttttttttcaatattttctaattttttgtcgatggactcttccttcgaaatcagacgcttctccagacggttcatctcgtttctgcggtttctgacctcgcgttcgacgtcgctccgcattctgtgtgcgtcttctttggcttcgatcgtaatttctttcttgatcgtttcagcctgattctctgcgtcgagaatgatattggatgcgcgctgctctgccgagccgatcgctttttctcctaccgactttctggcgatatatccggccagaataccgataatcagagcggcgacagcagccaaaatggtagtgatgattgggtttatgggaaaaacacctcctcagtgtctcgatgattttaatgaaacatcagttcgtacttatgtttacggaaatcgctgccgcaccttttacggtcaggaagaaatttccggtcacaattctgtgcgccgactgtatcagcgcggaaataacgtcaaaaatataagcataaaacgaattacatattgatatatgtatcttaattatattataatgtttgcactgaaatgtcaaggtttcaagggaggtgcagggaatcaattacttaaaagatttatttaaaaatgctgaccgtatgcttctgatcctgccggtcatatttgcggtcatcagcattgtcatgatagaaagtacagtgtatgacggctccatcaagattacgagggatgttctgatccagtttgtcgcctacatcatcggtatcatagccatttttgtcatgctgctgtttgattatatgcaatataagggaattacgaagattttatatgttatctctatcctgtgtatgctttcggtgtacacgccgctgggcatcgaacaatacggttcgagagcctggctgaacctgggggttacgacgattcagccctgtgagatcgtgaagatcacctttgttctgatcttcgccaagtaccttacggagcacgccgccgagctgctctattttaaagggctggtaaaagccgttctcgttgccgctcctctgatcggtctgattctcatcgaagacatgggcaacgccctcgtcgtatttttcatgatgatcgtcatgatttacgcggccggtgtaaacagaaaaatctactggggatgcgccgctgcggcctgcgccagtgtacccgtggcgtatttcttcatgcaggatcatcagcgcgcccggatcgacgcctttctccatccgaacgacctgagcatccaggcgaattatcaggtttggaattccaagatctccatcggatccggaggttttttcggaaagggtctctttcacggagaacagaaagctctggattttctgccggtggcaaaatccgacttcatcttcgccgtcatctgcgaagagctgggatttctgggcggcggagcagtcatcgggctctatgcctttttcatgtaccgcatcatacgtatcgccgagcgcacgaaggatacttacggttatctgatcgtcatcggtctgggggccatgtttttcttccagatctttgaaaatatcggaatgaccatcggcatcatgccggttacaggtatcacgctgccgttcatcagctccggcggcacgtcggtcatcatgaatatgatcgccctgggacttatcatcagcgtaggactccggagcaaggtcatcaacttctgacatcagtatttttaaaacagacgccgccctcttcgggcggcatttatttttatcatccgctcaaagtcttctgaaacctttcgaacttctctgacaaaaattaccgctggcacagctataagacgggatttcaaaccggaacggaaacaattccagaagagcgcagaaaacagagagcgccgcagcggtgagacatgttgacacagtaccgcgactcatgatatactattaaagtattaaattttcatataggaactggttttattggaaactatacactcgtttcgactgtaggaacaacactttttctgttcaaccgcgaaaggagtgttttttatgccaaaaaacaagtttcaggatgtcgtatttacttttctgatggcctctgttatggtctacgggatggtggtctacaatctaactctcaataccggaactgtaacggaagccgtctttgtctcagcgttcagggagctgccggttatgattcccgcagcattcgttctcgaattttttattgtcgggaaaatagcaaaaaaactggcattcaaagtcattcgcccggatgaccgcccgcagtttatcacatacgccgtttcgatctgtatctgctgcatcatgtgtccggtcatgagccttatcgccgtattgctctttaaaacacccgatttcggaacatggttgaaaacctgggcgctcaatttcccgatggccatctgctatcagatgttctactgcggtcctttggtacggttcatcttccgaatgctcttcagaaataaataagtctgcgccgcgaggtctgcctgctctgtgcagaaaatccgaatagaaaagaagaggatacgagtctcaatgaccgcatcctcttcgctctgtctattctgttttatgcgggcgcccgatccgccgggattttatccccggggagccatgaccaaagcgtttcccttgatgacttccacaccgtcctgattgcggtaggaaacgtcgaagaacactctgcccttctctcttttttccgccgcggtaatctcacaggtgatggtgtctccgatatagaccggtttcacataagagacactcttctcaagaaatatcgttcccctccccggatatttcattcccagaacagtgctcaccaagctgtccgccagacatccgtggacgactctcgaccgaaagagagaagactccgccgccacctgattgatatgcaactcgttgaaatctcccgtaattccagcgaactgatatacgtcgctttcgct

SEQ ID NO: 2163 - DNA, 2863 bp, Unknown
  16S sequences of unknown bacteria
gacgccgcccgcgcggacgattcccgcgttgtttacaaagacgtcgagcccgccgtactcaaggacggcgcgggagaccatctctttgacgctctcctcgtcggtcacgtttgttttcacggctatcgccgcgccttttccgtatttgtcgcatatcgcggcggcgcattcctttgctccgtcctcgttcatgtcggcaacgactatgtacgcgccctctgaggcgagctcctcggcgatgcctttgccgaagccctgcgcgcttccggttactatcgcgattttgttctcgagtcttcgcttcacggtgcccgcaagcgataccttcgagcggtagctctcgacctcccagttcgttatgaaatccacgagttcgggcgtcatcggttctggaccgccgaagctctccgtgtagaccgcgatcttaacggcgtcgagccagaccgacgaaacggtctccgcctcgcgccttgtcgagcctatcgcgaacatcccgagaccctttatgaagacgattttcggtttcacattgtatttttccgtgtattcgttccacgcggagatgattgtctctttttcggaagacgtaatgaagagtggatgcgccttacagtatacaatgtggtcgggcgtgaagctgccggcgagcggtctgaacgcgtcctcgcccgccgcgaagcccatcacttccttgttgcagacaaaatgcacagttgacggcagtccgttaagcgctcttagaaccggcgcggcggacacggcggcgtctgtgtcgaacggcacctccgagaagtccggacggcggattatgacggcgtcgagcttatccatcacgctctcaactatagcgtcgagctccgcgaccgtgtccgcggcaaagaatatcccatggttcgcgaggaagagcaccttggcgtcgcgtgagaactgcttcctgtacgcgtcgagcttttcacggcagagcgacgcgagcgtgtagccgggtctcgtcgacggcacccagattgcctccgggaagagctccgcgacgaacgcctcgccgccctgagagcaagtgacgccgttgaccttcgccgggtggacgtgcaggacgtatttctgcgggaagaggtcgtggagaagcgtctcgacgctcgggcgcttcgattcctcgcccggcgcgcgggccgccatcatgtcagcgagaacggcggcttcgcgctcatcctcatcggcagggtaggtcttcgtccacatgagggcgagcttttcgcggtccatcttcacgaattgttccggttttattgtcgagagggaggagccggagccctttatccagaggttgttttcgtctttataagaggtgtttccgccgccggcgaggacgaactcgggattcgcgccgtagcggtgggagtattcacagagtgcttcgagcatatttttctccttggtttatattggtttcgcgttttcaagcaggaacttttccgcctcggcgctccagagaccgctgtgcctgccgcatatttccgcgagcgcgcgcatcagcgggtcggtctttccgagcttttcaaggtcggatatcgcggtgagcgggagggagatgttcgtgtagcagagcttctttccgccggggatcttatcgaggttcagcgtcacgtcggcgacagcgtcgagaccgcagatgtgggttatcatcgcggcgggattcagcctgccgtcctccatcatccgcagcgcctcgcgcatatcgtcggtgtttcccccgctcgtgccgacaatgtgggtcgacgcgtagtggacgttgtagaaattgagctccgcgcggaaatccgtctttgtcggaccggcgaagaaattgagacagccgtcccgcccgagcagcttgtcgcccatctcgatgaccggcttcaccggggcgtagacgaacacgtcgtcgaatccgtccggggcgaaacgcttcatgaacgctatcgggtcctcgaaattagtcgtgttgacgtacattagtttgacaccgtgccgttccgcttcggacggcgggagtatcgacgcggctctcgacagtctcgcgctgtcaatgtctgtgacgatgacaagagacggtttccggtcgcagtggacaatatagtcaaccatcccgagccccatcggacccgccccggcgagaagcgcgagctttccgccctcgcgtatgcccatcttgtggacatagctgccgcttttcgtgtggtatgacgcgtgtgctccgccgatgatgcagctcatcggctctgcgagcgaaccgtagaagaacgcatcgcctgaatattttaacaggcagtcctcctcaagcgtctcgcgcgggatgatgacgtgcgtcgcgtctccgccgcagaagcggtagctgtaaccgggcgcgtcgagactgccgccatggttatgtgcgggctggatggcgaatttctctcccggagcgaatttgtctttccatttttctccgaccttttctatgacgccgcagaactcgtgaccgactatcgtcgggttttccgcgacgtcgtccgggacgcgcttatgcgacgagccctgcatcgccgctttgtgtgtcgacatacagacgctgtccgacaccaccgccgcgaggatttcgtcgtctgctatctcaggcaggtcgaaggtgtcgagtctcaggtcgtttgttccgtggatgcgcactgcttttgtctgcatattgtagtcctccgaaataatgttgtttattcctggctgtcggggctgtgttttcttatgagccgtttcatcctctcgcgcaccgccgcgcggcgctcggttgtcagttcttcgtcaaatgaaagcgaattatcgtcatcacgcgtgaagacatcgccgctcctgtgcc

SEQ ID NO: 2164 - DNA, 2869 bp, Unknown
  16S sequences of unknown bacteria
ggctcgcggaggcgagcacgagcgccgtggcgaagaacacggccagaaaaatgcccgaggcgagggaaaaatagcgcttcttctgcccgcgcaggctgcccagcgccatgcgcgtcatggtgaggcgggtcattttcccgccgcctctttggtgtcgcgcaccactttgccgtccaccagggaaaggatgcggtcggcctgctccgcgatggccagatcgtgcgtgaccaggatcagcgtgatgccgaactcgtgccccacctgccgcagcagcgaaagcacttcgcggccggtcttggcgtccagattgccggtgggctcgtcggcaaagagtatggcgggcttgttggccagcgcgcgggcgatggaaatgcgctgctgctggccgccggaaagcgcgctgggcaggtggtccacgcggtcgcggatttccagcatgtcgatcagatggccgatgtaggcctcgtccggcgcgcgcttatcgagcatcacgggcagcaggatgttctcgtaacccgtcagctcgcgcaccaggttgtatgcctggaacacaaagccgaaccggcggcggcgcagcaccgaaagctggttgtcgttgtaggcgaacaggtcggcattttggaaaaagactttgccgcccgtggggtattccagcgcgcccagcatgtgcaaaagcgtggatttgcccgagccgctcggccccgtgatcgccgtgaaactgccctgctcaaaggcaaggctgatctcttgcaccgcgtgcaccgcggtttcgcccgaggcgtacgtcttggaaagcgcttcgcaggataaaatggccatgaaaaaaacctccttgcgtggttgaaattgcttgatggagttttgccgcgcagcggttgggcaaacccctcagttgattcgcgacgatagcgcgccgatccctccgtcacggctacgccgtgccaccgttcctcagttcagcatggtcgcctctctgcgctcacgggactcgcttgagatgctccctgcttcactgggcttacttcgcgctgtttcgcccacagggcgcgcgcttcgtgcgccccttttcccttcgggaaaaaggaggcttttggacagcgcaacttccagcgatagtgccacttcccaaaaggctcccctgtgtaagggggacgaaagaggcggcgcagccagtggctgcaatagccgccgatgagtccagtgaggcaaggagagccgcgagtgagcttgcgaacgatgcggattgactatgccgaactgaggacgctgtcggcgctagccgactgaggggttgccgactgaggggtcgccgtgctaccaacattggccgtgactaagggactgcacaattgtcctactttgcattcccggcatcatttacaattcgcggattccctccgcgatgctcctttgcagggcggcgcgaaggcgtgcgcgcaggccaatggccacggcggagcacacgatggccgcgtaggcggcgagcagcgcggcaaaggtacttagcgcggtggaacccgccattgtctgatagacatgggcgcgcacgcccaggagcagcgccagggccagtgcgaggcccggcagaaagccgttgcgcagcacggcgaacgcctggcgggtatagatttcccggatgacggtgggcggcgcgcccacggcgcgcagcatggcgatggtgcgctgatcggcgcgcacgcggctggaaatggcgctgttgagcaggacggccatcagcacggtgaacagcgccagcaacgcgcccgcgcccgatagcagcagggagaagcttttcccattttcgcgcaccagggcggcgtaattcgtgatataaccgcccgacacccgcagggcgacgtcctccagcgcgctttgcaggatttcctcgccctcttcgctgaggccacgctccgccagcacgccgatctccgcgtagccgccggggctcaggcccagggcggcgaggcccgcgtgcgtggtcaaaaggtcgcccatgcggctcggccccagaagatcgtccggcacatcgccgagcagcgcgcccacgcgcacgcttccctgccggttgccccgcggggaaatctgccagaaggtcagcgcactaccggcagaaaacaggtcgtttgtataggtgtttccatccatcgggcttggataggcatccggcgcgagcaggagcacttcttctcccgcgttcagcgcgtccgcgtcgatggctccggcgagcacgaatgtttccagcgcggccaggcgctcctgcggccaggcgtagagcgcaacatcgatcagttcgccggaggcgcccagttcttccctgcggcgcaggtaggcttcgcgcccggcgccgttctcgcgcaggtactcaaaatcccagtccccgcaatggagcaggtagtccgtggcgcgcgggatttccaggccgagcgcggtttgttgcgcgccgtccacgcgcgccacaaagggaagggcggcgatgtcctgcgcgtccgcggcggtgtaaagcgattccggcggcgcgctatcgagaaagggatcgtccccgctcgcgcgccgcgcgcccaatgtgaaggcataggggaagtttgaggcgctccggcgaatgacttcctccatgagcaggcagccgcaggcgaggatcgcgaggctgagcgccagaaggatggagacgctcgccgaacgcgacgcgtacaggcgcaaaaagcgctgggtgatgagcgctggcgcgcggaagcgcacgtggctcctggtgcggatgtgtttgtgaatttgcagcatctgcgtatcgcggatggcctgcatgggcgatatgcgcaacgcgcggcgcaggggcgtttgcagggagagcagcacgcccagggccgccagcagc

SEQ ID NO: 2165 - DNA, 11630 bp, Unknown
  16S sequences of unknown bacteria
cggcgggggaaagaatctatccccgaaattttaaatttcccgcaccgaaatatcggtaagcgcgcccgacatcgtgttcgcccaaatcaccgcgcagccgagcgttccgttttgcgcggagagattcctgtgcgtggcctcgggacggccgtctatatagaaatagacgttgtacttgtcgcccgtctttttcacgtcgatcttgtaagcgtgcgtcccttgacaatactgcgcgtattcctttccatcgcggaacgcgtactgatggccttcgcccgtataatcgggatcgttatcgggaataaactcgtccgtgacgggagcctgccagacagagcgccattgatattctacccagccgaagccgtaaatattggtgcaatatccccagaaatcgccgtcgggagagccttccaaacatacgtcgtaccacccccacggactgcccgccgtttcataggcgccgagcgtaaaatgaattttcttgttcttttcatggaagttcaaatcggttactttgaattctatcgtataatcgcccgtaaagttcaggttatcgtaaacgagttttgaagtttcgtaatttgtggatccgttcgccttaaagatgacggtgttgtcgccgtaaataatcttatcgagctgaccgttgccgatatccagtttttcgttgtcgtacacccagatcacgtcgtccctgacattgatttccgccgcgcggatcgcgtacgtcttgccgctgccgaacgtcgccttcacgaaatacctgcccgccgtcttcggcttgaagtaagtatacgtgacgttgttttcgagcgtcgtcgtggtatacgtttccatcacatccgcagtgacgtccgtcgcgtccgtcagcgtgtcgcctttgaagatacggatttccgcggcgtttgccgaatctgcgtagacgatatgcgcgacgttggtgcgcgcttccctggtattcttggaaacgtcgatattggcggcgtccgcgccggaaacggtgaattccacgctcttttctatctgtttgcccgcgctcgtcgccgtcattttcgcggcgtatacgcccgtatccgtcatcgtgaacttaaagccgtctttggcgttgcccttgatctcggtattcgtgtcgacgccgtttttataaattttaagcgtcgcgccgttgatcatgtccgcgtcgtccgaggtgaaggacgcgttcagcgtaatttctttccccacctgattgaaggaagaaagtccgacgttcgtgatgttgaaatcggaatatacgttgatatccgcgctgaccttattggaaacgttgcctttaagatcggtcacttggacttcgactttatagacgccgccgctcgaaagggtgagttttccgttgctcggcgtgacgtcgtcgcccgatggatcggtcactttccacgcgaccgacgcatacgcgttgtaaatttcgtccgtaacgacgagtccgtctttaagattgatcgtgctgcccacgccctgatcctcgtagtcgagcacgaccttgggagaggtcttgtcatcttcgagctgcttatagctcttgattccgatagagccctgcacgttcatggattccacccaaacgccgcccaaaacgtccgtgtaatttccttttacgttgagggaagtgaaatattcgccgtcccaggtgattacgtaatagccgtgtttgctctcggagttactgatcacgcgggtaaagccgatttcgtgctcctctccgttcacaagggtttgatatccgctcaccgatttattggtgctgatccagcccgtgcccgtccaatcgtcgccgctcgccgtaccgttgtcgtcgaaaatccaggaggaaagcgtgccgtcctctacgttgagggcgatgttgtcgtcccgcttattttcgtccgttctgtccatgccgaaatacagacgcttgggcgaaccgctgccgacgccgtctattttcactttataggcgatctcgtaatcgcccttgaaagtgacgcccgtcgctctgtactgcccgctgtcgttctccccttctcccgtataagtattgtcgaacgtgatgacgggacttaaaggatcggtattgtcgacggtcacgcccttgccggcggaggccttcggcacgaagttcatcgtgcagtaatccaccgtgaacaccgcggtgaaaggtttgccgttttcgtctttgatctcgccgcccttgtcgtccacaatcgtaatcgtaaaggtatacagaccgattgcgtccttgttttcgcccggggcaaacattttcgtttcggcgttatacactttttccgtgacgtcttttccgtccagcgtcactttgaccgaatacttcgcgttcaccacttcgccgagatttttcacgaccggatcgatcttcatcccgttgccgtacaacagttcgctcgtcacggacgaagtgtcgatggaataataatcgttatacttattattatcatcggtacacgccgccgcactcaacgtcagcaccagcgataacgccgccgctaacattccttttaattgcttcatactttttcctcctgaaattttttataaatacgtcgccacgatacagtcgagatacaaactttcaagccctctgaacgttacgacatttttacctttttggaattttacgttgatttgggtaagcgtaaacaattcttcgtaatgggtataaggcacggaaagagaaatttcctctccgtttacgatagcctgcgtctttacttttccttttgcgtcctgcgcgttggaataacggaaagcgatcacgcccctgccctcgcgctttgctttaaattcgaagcggacttccgtgccgtccgtttggaatcccacggctttctccgaagaagcgtagctgaaatccctgcctttttcgaaagtttcgacgaaacaggacgacgccttcaccgcatcctcggcttcgtattttaccttttccgaaacgtcacccgacggaagattcacctcctccgtccacgcggacaactccactttcggaacgtttccgtcccattcgagtttttgaaggcgcagcgttctgtcccagcccgcgcccgagtacttggccgcgtgataaacgatccagtcctcttttccgtccggcgacttcaccaccgagttatgccccggggaaatcacgtccttttctttaagatccgtttccatcagcggcttatcgcacttcgtccaatgctcttttaaaagcggatcctcccccgtcagcgtgagataggcgatagagtagccgtccgagccggaatagcccgcggaatacatcagaatcggcgtgccgtccggcgcaaaggcgacgcagggaccttcgttctggctcgcgccaagccgctcccaatcctctttcggctcgctgatcaaatacctgcccccgtcggacgtttccctgactttggtcggatcccccggttcgagttcggcgatatagagattctgcgtccaaaaggcggtatgtacccgattcggccaccccgaccaaatcacgtactgtctgcctttatagtccataaaagtggcgtctatcgaacgcttgtcctcgggaagttccagcttgacgggcggggcatagtccccgaaagcgtccccgccttcgctcttcatgatatacgtgcgccgcgccccgtctatcccgtccggctcctcgaattcgaggggcgccgccgtgaacagcagataccaatgccccccgaaaaagaacatctcgggcgcccagatctgttgaattcccaaagcgcgcaccggagaaacgatcttggtcacctcggggttactgaaatccggaaacagagtcgtgaggcttttggatttggtgatcgtgagcgtctgttccccgtttagcgtttcgcagaccacgtaatagtactcatctccgctcttgtaataccaagggtcgtgtcccgtgagattgacgggattatagaacgtgccgttcatttgcgttcctttcatgagtccgccgcctttgcaccccgccgccccgaagccgaaaaacaaaatcgcggaaagcagaacgccaaaaatcttttttctcattattatttatccaaagcgtccactacgatgcagtcgagcagaatgttctgatcgcatttgatttcgatgtcgttggggccgttgggtttcaggaataagtcgcagaaaaacgcgttgttggagaaggtgtcgtcatagggcgttttcggcgtatacagctgataagaagtgccgttgacgatcatttccaccgtcgttgcggaaaccgcctgattggaatatctgagaagtatccgatattgtccgttcgctttgacgtttactttaaacgtgagcttatcctccgcgtccgaaatacgcaccgctttgccgcccgacgccgccggaatcgtcccctcgccgttttcataggtcacctccgtaaccgtacagctttcgccgaggacggcgtcctccgcttcgtaacggattctgttcgtcttttctccggagggcatgggcgccgcctcgttgtaggagtagatcctttccacaacgggaacgtttccattccaggtcattttctgatagcgcagcgtcctgtcccagcccgcgcccgaatatttcgcggcgtgataggcgatccaatattcgctgtcgtcgggggacttcaccaccgagttatgtcccggggaaatcacgtcgtcctccgtttccatcaggggcttttcgcccttcgtccagctgtccggatggagcgggtccttctccgaaccttcgagcgtaagatagccgatacaatagccgtccgaccccgaatacgaacccgagaaaagcaaggcgggattgccctgaggcgaataagtgacgacggggccttcgttctggctcgcgcccagcttctcccagtcgtattcgggcgtcgagatcatcacccgctttccctccgtcgtcttagccttggtggggtctttttcggcaagctcggctatataaagatcctgacgataatctatggtatggttcttttccggccaccccgcccaaacgatatactgtttgccgttataatccataaacgtggcgtcgatggcgcgaagatcctcggggagtttgatttccacgacgttttcccattcgccgaagacgtcttcccccttgctcttcaagcaatacgtccttctgttggcatccttgatctcgttgtcgctgttgtcgcgcgtggcggtgaaatagatataccaatgcccgtcgaagaaaaagatctcgggcgcccagatttcgacaagggacatcgccttctgccgggcgaccactttcgtccgcgtttcgtcgcccgcgttggcggtgagattggtcatccacggagatttcgtcacggtgatctgcgtgccctcggagtaggtgagataataatttccgtcgtgtttgtacacccacggatcgccgagccccgattccacccgaaggggattataaaacgcgtcgttcatcgccgtgccgaaagtagcgtcgtttttcgtcccctcgccgccgcagcccgcgcccgaaagacagaacgcccccgccagaatcaggctcagcgcccatttaaaatgcttcatgtatccttttcctcctcgttctattttcagcttaaaaattcaagccgtttgatgatgtgattttggtactctatatcgagctcgttgaagtagccgctccatccccatacccgcacgatgagatttttatgatcctcggggtgcttctgcgcgtcgagcaggcaatcgcggttgaccgcgttcaattgcagctgatgcccgccgctctccacgaacaattggacgagccgcgcgactttttgcgtcccctcgtcgttgcggaaaagggtgtcgtgaaattcgagggtgagcggaccgccgttgcagatcctctccaaatgaggtttggtgaaagagtgaatcacggagagcacgccgtcgaatttgatgttgagggagggagaataattggcgctgaaaggctcccccgccttcctcccgtcgggcgtcgcgcccagattttcggaaaaccagatataatacatggcgctgcccgtacccgcgcggaaaatgccgccgcggtcgtttttcagaccgctcacgctgtcggcgaagcaatcggtgagttctacggcaatatcgtccacgtaatcgtcgttgttgcccattttgggggcggcaaggcagaggctacggattttttcatatcccgcgaaattgttttcgagcgccttgacaagctccgacgcggcgatcttcttttcgtcgaacaccagttttttgacggcggcgaggctgtccgcagccgtggaaagtccggcgccgtggaagccgtaattgttgtattttgttccgtccgcgatatctttgccctctttgacgcagttcgtcatcaggagggattgataaggggaaggctcgatgaagatatttctcgtattttccgccatcgcttcgcaggaataggcgatgcccttcctgacttccgtcatgaactcttcgaaagtgccgcatttttctatcttcgccctgacggcgtccagcaccacctgcggatagttcagcgcgtcgatattggggatgtcgtaagcgactccgggaatgataaattcccagcacgccgccacgacatagctgcgcgcgtcctccaattcgtagcccattttcacgagcgcgggaatcaccacgtcgtcgttggaatactgcgggaaaccaagcccctgtttggtgagaagggtgccgtgatagtacgtttcaaaaggcgtgtccttattgacgcggatgtttattttcggatcgatcagattcaaagacagggaagcgtcaaggcagatctcgctgagttcgttatacacttcctttccgtctttgcccgcgccgccgaggacgaggctctgcccgttgtccccctgctgcacgccgggatagaggtcggcgtcgaaattcagatcgatgaaaaactcgctcgtaagttccagcgccttttccctgtcgagttttccgctgtccatgtcctttttgaaaaagggatacatatagacgtcgaagcgcccgagcgtattgtgcttgttgccgttgagccataagacgaaattgagaaggcggagcatcaccagcgcttcgtaatagctctcaggggctttcgcggggacgtttgcaagcgcctcggcaagctcggttatccccatccgcatggcttcttcgcggtattttttcgccatcagctccacggcgtcgatgcacacgtccatcgctttcagctcttcgcatttttcttcgtccccggcaaattttttcatctgcctccggatctgttcccgctttttttgaaagccctgcgttaaaatcccctcgtaatcgctggaaatattccccacctgcgccgaatcgaatataaaatgcgtgtcgcggatctcctccgactcttgtttcgtcaaaagcgcggggatttttttgatcgtccgcatcatgccgatgcggtcttccgggaaaagcactgctctttccgcctccgccattttgaggagcctcgccgcgctgcgtaaggagaggtttttatgcccggcgtaaaaagcctcggacaaaacgacctcgttttctccgcgcaggtttctgtattcacgcttttgcagtctttgatagaccgctttaatcctgtcgttcattgtatattgcctccttctttatcattcacatcacttttacgggaattccctctctttcaaagagggccgtatcgatattcacttccgctttttcgtcgaaaaccggtcgatattcctttcccaccaatttgtatttactgcctgccattttattataggggagcagttccacgcccgaagcgtttgaatttttcacccgctccgcgatcgcttttagattttccccggtatccgtcacgccgggtatcaaaggtacgcgcgccacgaacggaacgccgctgtcgcttaaaatctgatagttctttaaaatcagggtattgtcgcagcccgtatagcggacggcgccttccctatccatcactttcagatcatacatcacgtaatcgacgactgagagcactcttttgaacttttcgctgtccgcgtagccgcacgtctgaatggcggtgtgcactttgcctttcaaattcccgatgacttccgccaaaaaatctgcgtacagcagacactcgccgcccgaaaaggtgacgcctcccccgcattcgttgagataatcggcgtttttgagaagttttttcgtcaggcgctccgccgtgtaaatttcaccgctgaaacggatcagattccgcgggcacgccgcgatgcagctgccgcagaggatacactttttcctgtcgggacacactcgctcgcaggcgccgcaatgcagacagccgttgggatttttgacgatctgcacgcgcggttccagtccctcgggattgtggcaccaattgcaccgcatcgggcagcccttgaaaaacaccgtggtgcggattcccggaccgtcatagacggaaaattcctcgattgaaaaaacgataccttgttccatggcttacttatacatattttcgtcgttgcgctttgcgatttccacgggatcgaacttcatcttgtggtgtacgtccatcagtccgttgacttcctgtttcacgtccgtgagctgcgtatagcaaaagcccgcgaactcgcacgaaaatacgcccctatttaaattttcatatcttttcaaaaagctttccacgcagttatccaccgcgtatccccatttttccccgtccttttcttcgcctaaattcttgacgccgttgagctttaacgccaccccgccgtactcggtcatgatcacgggtttgtccgggtccagcgtttctccgaatcccatcaggcggcgcgccatcgggaacaagtcgttgagtttgtccttcgcgtacttttctccccatccgtcgcccacgggcgcatagtcgtggatgctgacgatgtccgtttcccccacttgttcccagccgtcgttggtgctgacgaggcgggaggaatccatcgccttggtgaggtggtacatggtgcgggcatactccttctgccgatcgttcgtcaacagcttgcgcaccccccagctttcgtttaagggcacccatacgatgacggagggatgattgtagagctgtttgacgagttcgatatactgcgaagtgtgcaggccgatctcccgcaggttatactgataggcgctgggcatttccccccagacgagaaagccgagcttatccgcatagtaataataatacggatcctccaccttttgatgcttccgtcccccgttaaagcccattttcttggcgaggagaatgtcctctttcaggctttccgcgctcggcggcgtcaaatccgtttcctcccaatagccttggtcgaggacgagcttttgatacaggggaatgttattgaggaggatcttatccttttccgcgcttattttgcggaaggcgaaatacgtgtccacctcgtccaccgtttcgccgtttaaggtaagttccattttcagatcgtaaagattgggacgctccaccgaccagaagtggatctcgtcgatgctgtcctcttccttgatccagacgttgattctttcgtcccgttcggacagggaacaatactgcacctttacccgctgtccctgataggaaacggtgagtttcacgccgtcgtagcgcccctgcccctcgaaatccacagaaatgcaattggcgtcgatattcggggtgatgagggcggagcggatatgcccctcgcctactttttccagccagacgctctgccagatgcccgaactcgccacgtaccagcagcggctcggctcccttttccaaaactgcttgccgcggggctgcgacgtgtcgtaacgatcggtgacttttacggtgagcacgttctcgtcttgaagatagtctgtcacatcgaaagaaaaataggtatagccgttgacgtgcccgccgacataggtcccgttcagccaaacgtccgccttataatcgacggcgttgaagctcagcaataccctgcccccttcaaagcgtcctccaacgcaaacgtccgcctgtaccacatcacttcgtgctgctcgtccagtcccaatccgctcgccttgctctgataagtaaacggtacgtttatccgcatatcgaacggttcttccctttcataaaatttttcggctacgccgcgttcctcgtcgtcgaaacaaaatccccagcttccgttgagattttgccaaaattttctctgaaattgcggtcttggatattccgtcctggtgaatgccatagtctataatcctctctgaaattttcttcatctttgcttttgcaacttcaatatatcattaaaaaaagaaagtgtaaatacatagtcagaaaatatttttataatctacccccattttagtaaaatcttgaatatccccccttgccctccttgacatctattttttttatggtataataagaaaaaagaggtgaaatcatgctgaaaattatacagcttaccttaaaagaagaaaattctcttttagagatcgcgcgcgccatctcctctcccaatcggctggaaatcatcaaatccttgaatgtgaagagcatgaatatcaaggagttaagcgaacttttgaaccagcctatttcttccacctccctcaacgtggatattttagaaagctgcggactcatcaagacggaaatgcagttttcgcagctcgggcgttcccgcctgtgctcccgttgctgcgacggcatttcggtagatctgcaaaacgacgatacggtgcgggcggacgagataaaaatttctctcccaatcggttcgtatttcgactgtcacgttcgtcccgattgcgggattgcaacggtcacgggcaatctcggcgtggatacggagaataattgttttttcaagcccgagcgttacaaagcggagcttatctggttcagcagcggatatctcgaataccgaatcgcaaaaaacgagatcccgcccaatgcgaaaaaaatggaaatttctttcgaagcctgttcggaagcgcccttttaccgcaatgattttaagtcggacattaccctttgggtcaacgatatagaaatcggcacttatactagccccggagatttcggggacaggcggggtaggctgaatcccgaatggtggcccgattccatgacgcaatacggtgtattggtcacctggaaaatcaacgataaaggctgtatgctgggcgcgaacgaaattaattccaaaacgttcgcggacataaggcaaaacgaaaaggattacctctctattaaaatcggcatcaaagataatgccaaatacaagggcgggatcaatttattcggaaagaaattcggagatcacaatcaggatattgcggtaaaattcagttggtagagaacagaaacgaagggatggcgcttttgggaaagagaggagcgcgggaatttaataaaagaaaaatatcgcggcaaaaaagaggctgaattcagcctcttttctatttctatccctcttaattttagctgccgtatctgtacgtcgctatgttcccgtacttcgtcagcactcttccccgcttcca

SEQ ID NO: 2166 - DNA, 3592 bp, Unknown
  16S sequences of unknown bacteria
gggtcgagccgagcgtcaggtcgccgcccgccgtgatatcgccgctcacaacgccgctaactgtgacgtcgccgccagcgctgatatttccgcgcacgaagccgcgcaccgtgacgtccccgccggcggtcaggtcgccgtagacatttccgtcgactattatgtccccgccgctaatggcgctgtttatgtcacacttcacgacgaggtcgttttcgacgttgtagtcgcggagttccggctcgtcctgcgcctgcccggtcgttgtctccggctcctcgggttcttccgattcttccgattcgtctgtctcctcggattcctcggtttcttctgtatcgtcggattcctcggtttcttctgtatcgtcgggttccttggtttctttcggttcggcgggttctgtcggctcttcggtcttctcgggttcctcctccggctcctgcgctatgattatctccggctcctcatcctgaacctccggcgcgtccgccaccggctttccgccgaacatcgggagggtcacaggctccgacttcacgccgaacagcgcgtttatgtctattccgagcgcctccgctatcgccgggagaagcgttatgtccgggagtgtgtctccgcgctcccactggctcaccgcctgatggctcaccatcagcttatcggcgagctccgcctgtgtcatcggtaccgcgcggcggttttcagctatcaccgcgcctattattgatttgtcgaacattttgctgccttcctttcgttatcgttctactctgtcgatatcctctcacggcatatcgccgcgggaatcctgtctgttgtgatcacgctcccattatagcacgcggcgggatttttgtcgataaagccgtgattgaatggatgattttgcaagcaacgcttgaatcggattccaaaataatacgcgccgcgcagaaacgacgcgtattatctgagaaaacactgaaaaaatcggcgttccccctgtttattttccggtatggcagacggtgatatcctttatcttcgcctcgccatcagactttatgacctcgacggcgatctcgctcgtcattatcgccgggaagcggcatatcgccttatgacctatcgtgtcgccgtgatagacgcagacgaacttatcgtagcagggcatcttcgcgaacacgcggaactcctccaccgcctcgccgtcggttatgtcctcggaaataataaccgtgtcggtcattatcgtcccgaccccctccgagcgccaactcggggcgtaccgctccgcgggcactctccatctcgtgtccgagaccttttcgaccttcgcgaagggcagaggagcatagcggcggcggatctcgtcgccgaactccagcagtctcgccgcgtccttctccgggagcagaccgtcgctgtccggaccgatgttgagaagcagattcgcgccgcgtccgaccgaatactcatatatgccgcagagctcgtccaccgactttatcgtatccgcgttcgcctcgcagtcgaaccacgtcgtgcgcatcttcatgtcgcactcggcgggaaggtagcggaaacctccgaccgatctcgcctcggtcgtgttgaccgagaaatccgccttgtcgaccgcgttgatgttcggcatatccgcaaagccgtcctcgttgccgacccacctcgtgtccgggtcccacatcgagaaaatgcgtatctccggctggagaccgcgtatcacgccgattatacgatctttgtcgtactcatgattctccgagccgcagccgtcgaaccagagatagtcgatctttccgtaattcgtcagaagctcgcttatctgatttatgaagtaatcgtcataagccgccggctcgtcgaacttcacggttccgccccactgcgccggggaataatacagaccgaccttcacgtcgtactgacggcacgccttcacgaactccgcgacgacatcgccctttccgtccttccacggggactgcgcgaccgaatagtcggaatacttactcggccagttcgcgaagccgtcgtgatgcttgcagacgagaatcgcgtaattcgcgcccgccttctttatcgtccgtatccactgcttgcagtcaagcctcaccgggttgaacgccgacgccggcataggctgtccgtcccagtcgctgtgacctgggaaaaacgaacggataccgaaatggaagaacacgccgaactcccagtcgaggaactcggtctgcttctctgatggtgctatcttcatggcaaataccaatcctttcagaattatacctatatgatagcacatcagacgttccgtgtcaatagaaaatccggtaattttatggattttcgagcaaaaaaagagctgccggtttcccgacagcccaaggttctgccgcctttgcggcagaaccccgtcaactgatcagccgcacccgcagccgcatccgccgcatccgttgttgttgtaggaagcgccgcatccgcagccgttattcccgcagcagaagatgatcagaagcgcgatgatgatgagccacacgcacttgtcgtcgaagatgttgcaaaggcaattgttattcatacccgtaacctccgtcggtcttttttcgagaaacagaaccggacagcgacgccatcgcgcaccccttccgggggtccgcttctatcctctgataccatattattccggaggaaactttttgctactcatcttcagggtaaacactgaataaatcgggttttggcaataaaaagtcttggatttatgggctttttattgccaaaacatcctcaaatcagtgtttacctcgtgagcttaagatgatccgcctcgaggaaccgacgggcaaacgaagggtcatctatcggcaaatccaccgacgccccgcacctgcggcaaaacaacttcacatgatcatccgaaaccgcaatatcataatccggcatctcatcctccgacgcgcactcctcgatcggcgggcaacacggaacaggggtcgctgttttaggcgggcaaagacactccacctgcccctcctcgagaagactctttatcccgaacataaccgcgtcaaacaaaaccgggtcagcgtcatgccgcctgtcatcctcgtcctgctcatcctcctcgttatcaggtcgataaggctcaaaatcctcatccgggtcaatcccgaacacagaagcaaagctctcatacccgtcaatccccgactccttcagaatccggacaatctccttctcattctcgtcaagcgccttctcaacctcctcaagcccgccgacaaacaacacatccatccccgtattcggacacgcgaacgacactatccgccggtcaaaaaacacctgctttgacacagtaaacgtatgctcaccatgacaaaacatacacggcacctttatccgtatcttcccgtcacgcccactctccacgtccgccgaactatgtccgcacggacacttcagacgcttcaccgcgcccgacaatgaaaatatgccgacgacactcttcacgcccgaaccacagcacgggcatctgtaagctatgcacgtatcattggagtttaatatcatcgctagcttgcgg

SEQ ID NO: 2167 - DNA, 32759 bp, Unknown
  16S sequences of unknown bacteria
aacagaggcctgacgtgctcgtctacgttgaggtagtcgtcggtcagtctgtaaaccgcgaggtcggcgttatcccgtgaagctgagatgaagaacgcgtctcctgagacagggtcggagaaaagcgtgcagtcgcgtgacatctttccgtagggattaaagctgccgcgataggtgaattctccgtcgggggtttttgatgtagcaatgcatatgcgcgcgttgctgtagtcaagtccgttttcgtagtgcgcccacataacaaatgtgtctgtcaaagcgttgtacagtaccttcggacgttcgatgttgacttttactgcctttccgtcgcgttcgtgtgagagggaagagtcggtgtggaccgctatcggctcgaatttggaggaaaccgtcaggcagtgcgcgcggaattcccagtttacaaggtcgcgcgagcggtagaccgagacgtaaatgtcgtctctcctgtcctcgccgtaccagtagtagaatccgccgtgaaatagaatgtgaccgccgtgcgcgtgaagctcgtttccgtcagtgtcgcgccaaagagtgccgttctgttgcagctttatcatggtgtttctcctttgcataattatataatctactcgtattatagcatgccgcacatcaaattgcaataaaaaagtcggattaaacagcattttaaccatttaaccgactgattttatataaattttattttccgccgagggcttccttcagcgttctccagccgagcattgcgcattttactcttgccggcatatgggagatatcgcgcagagccgacgcttcttcaagggattctatctcatcctccgaagcctcgccgcgtatcattttcatgaaggtttcgcccgttttcagcgcgtcttccttcttcatgccgattatcatgccgagcattatgtccgccgaagcctgtgatatcgcgcatccgtcgcctacaaacgcaccgtcaacgatttcgtctccctcgaccttgagcttgagctgaatgttgtcgccgcagcttgggttcactccgtcaagtacaatgtccgcgtcgggcaggtcgtgcttgaattcgggatgcatattgtgctctgtcaaaatttcgttgtaaaagctcctattttccatatcccatgcgctcccttatagtttcaagactttctatgaatttttttgcgtcgtcgacagtgttgtagaacgcaaagcttgctcgaactgtcgcgcggtatccgagatgctcgagaagaggctgtgcgcagtggtgtccggcgcgaatcgcaatattatcggaagcgaaaatctcgctcacgtcatgcggatgtacgtcgtctattgtgaacgtgatgattccgttgtgctcctccgccttgtccgagccgattatgtggatgtacggcatttgtctcattttgtcaaaggcatatgacgacgcttcaagctctaacttgtgaatggcgtcaaatccgacggactcgacgtactttattgccgctccgagacctgccgcacctgccgcgtttaccgtgcctgcctcgaatttgtgcggaagctctgcgtatactgcgctcgtgcgggagacagtttctatcatttctccacccgagaggaacggcggcatatcgtcgagaagctctctctttccgtagagcacgcctattcccatgggtccgtacagcttgtgaccggagaacgcgaagaaatccgcatctatatcctgcacgtttacgggaatgtggggagtgctttgtgcgccgtcgactactatgacagctccttttttgtgcgcgagagctgcgatttcctttatcggattaactctgccgagaatgtttgacacctgagctatagctacaatcttcgttttgtccgtgattaggctctcaaccttgtcgaggtcgatagtgccgtcctgttcgcagtcgatgaattttaatactgcctttttctcgcgacataccatctgccacggaagaaggtcgctgtggtgttcggttatcgaaacaagcacctcgtctccttcgttcacatgggtaagaccgtagctgtacgcgatgaggttaaggctttcggtggtgttgcgcgtgaatattatctcgtcggaagataaggcattaataaatctctttacgtcgcgtctgccgttctcgagcgcttccgtagcttcaacgctgagggaatagattccgcgcagggggtttgcgttgtggtagaggtaaaaatctctctccgcgtcaaggactgtcttcggtctttgagctgtcgcggcgttgtcgagatatactatgtcaacgtttgagaacagcggaaagtctgacttgtagttattcatcttctccgtctccttcaaactggggattcagctgacgaacgagagcttcctcgactgctttttcaaattcgggttttcccggaagtctcgcgattctctcaaccgacgcgcgtgccataatgtcggaggcgtgctccttgtcgattccgcggctctcgaagtagaacagcgtagcgtcatcaagctcaccgatagtcgcgccgtgagtgccttcaacgttttcttccgcacagaggatgagcggcactgtcttgttcaccacgtcgtcgccgagcatgagtacggtttcgttctccgcgccgactgaatcggatgagccgtttttgaagtcgatagttccgcggaataccttttcggctgaatccatgagcgcgccgtttgctttgatttcgctctcggtcttctttccccagtgatttaccgcgaggtttatgtctatcttctgcgagttcattccgaggtagccgtagtccgcttcaagcgaggatgagtctccgtcaagctctacggcagtgtcggtgtaaatgtcgccgtctccgagagctgccgagatgagcgagaattttgcaccatccgcaagtcttgccgttaccctgtgtatgagcagcgcgccacttgatgggttcagcagctggacgagctttaccttagcgccggcggcaagctcaaagtcaagctccgtgcgggaagcgtctgcgggatccacaagctctacaactgtaacggtgctgccttctcctgccgaaatcgtcactttcttcgagccggagctttcgcagagctttatgggagagtccacagcggtgtaatgctcttctgcggtggggatggagctgtcccactgaaccgtggctgagtttacacggaggaagttccatgtcggtgtgggaagtttgtttatctgtattttttctttcatatatcagttcaccaaatcagccgatgctgcctttcatctcaagcctgatgagattgttcatctcgactgcgtattctacggggagttcctttgacacattgtccgcaaatccgcttactatgagcgcacgtgcgtcttcttcggacataccgcggctcatgaggtagaaaactgcgtcggagctgatggagcctatcttagcttcatgaccgacagccgcgtcctttgtgcggatatccatagctgggatggtgtcggagcgggattcggagtcaagcataagagactggcacgatacggaggattttgcacctgtcgcacccttctgtacaactacgctgcttctgaatgtgctgacgccgccgcttttgctgatggagcgcgtgttcatgtaggagcttgtgttcttgcccatgtgtactacctttgcgccggtgtcgagatcctgtcccttgcccgcgaaggttacgcctgtgaattcggacttggagttgtcgcctttgagcacactcatgggatagagacagccggtgtgtgagccgaacgagcctgaaatccactcgatagtgccgccttcttcgacgagagcgcgctttgtgttgaggttgtacatattcttcgaccagttttcgatagtcgagtaacggagcttcgcgttcttcttgatgtaaagctcaacgcatccggcatggaggttggctacattgtatttcggagcggagcatccctcgatgaagtggagacttgcgccctcgtcaactatgataagcgtatgctcgaactgacctgcgccctttgcgttgagtctgaaataagactggagcgggattgagagatgaactcccttcggcacatagacgaacgagccgcccgaccataccgcaccgtggagagccgcgaacttgtgatcatgaggtgttacgagcttcatgaagtatttgtgtaccatgtcggcatactcgcccttgagcgcgctttccatgtcggtgtagacaacgccctcggcagctacttcttcgcgtacattgtggtaaaccagctcggagtcatactgcgcaccgacgcccgcgagtgattttctctccgcttcggggattccgagacgctcgaaggtttcctttatgtcctcgggtacgtccttccagtcgttcttcatgttggtcttcggacggacatacgttgcgatgtgcgccatgtcaagaccttcgatggacggaccccagttcgggatgggagtttcgttgtaaatctggagcgactggagacggaactgctgcatccatacggggtcgtccttctccttcgagagcttgtctattatatcgggagtaagtccctcttccatacggtaagcgtcgttttctacgtctgtgatatcgtatatgctgcggtcaatatctgctacctgacttttttctttcatgcgcgtcccccggttcagtcatttgtacggatgcttccgaatccgctttcgttgatttgttcgacaagctcttctccgccgttctttacgataactccgttttccattacgtgagccgcgtcgactgtgagagcttcaagaattcgtgtgctgtgcgtgattataagaagcgagccgtgtactctctctctgtagagctgaacaccctgagaaacagtgcggactgcgtcaacgtcaagaccggagtcggtttcgtcgagtatggcgagcttcggttcaagcatgagcatctggagaatctcagccttcttcttttcgccgccggagaagcctacgttgaggtcgcgctccgcgtaagactcgtccatctgaaggagcttcattgtctcggcgagcttcttcttgaattcccagagacggattctcttgcctgtcttctgctcgagagatgagcggatgaacgcgctgagtgtaacgccgggaacttcaagcggattctggaacgagaggaaaatgcccttctttgcgcgttcgtttacgggaaggtcgtttattctctctccgtcaaagatgatgtcgccggaggttacggtgtatgtgggattgccggttatagcgtagccgagagtggattttcccgtgccgttcggacccatgagcacatgagtttcgtcttctcctacgacaaggtccgctccgtgaagtatttccttttctcctacgctgacgtgcaggtcttttatctcaagtaaagttttgtttttcattaaaatcagttttcctatccgaatagctcggggaaagctcctttcgatttatttatgtgcgaattttcacgactccgccttcgggaagcgagccgcatttcagtgtgctgtccttttcgttgagcaggtcgcggagagtgtagctgtttacatacgcgtttatgtggtcctcaagtcctttccagaacgccatcgtgtagcagtagcagttgccgccgcacttgtttccgtccttggtgagacatgataccggcgcgatttctccctcagccgcctcaagaatttcgcctaccttgtattcctcgggagaacggacgagcttgtacccgcctgtcttgccgagcgcgctttccacaaggttgcttttgcagagcgcggtcattatgctctcaagatattttctcgagatatcctgacgagccgctatgtctccgagacggatgtaaccctccccatgctgttcagccatatcaagcatgacacgcagagcataccttccttttgacgatatcatcacggcgcgcgcacctccctttttaaatcctatacatttcataggtattatacccgtttattcctacaatgtcaatgggaattacacaaaattttctacagaaaaagacctctccgcaccaaatctctgtagtattgtgacatatgaaggaaaaaacagccgaagagacgcgaaaaaagctcccgaataccataaattggcacacgggagcttgtttttcaatatgtatttacagcgttacttcaatcttttcgcgctctgccgtctcgtatacccttgtcattccgtcgggagttgtaacggtcgtggagtagccgccgtcacttctcttcacggtaatgtcgcaggtgtgtccgcaggcgtggagctttttcagcttaacctccccaagctctcgcggaacggagggggtaagcgtgaacgaatcataacccgtcggaacaaagccgaacattccctcggtgacgatacgtgcgaaaagtgcgctctcggcagcaaggtgacgcttgtttccctcgggataagcttcgatggcatacggaacgtgttcggtgagcaagcggttgtttacgtagtattttatgaaatcccatacctcgtcgctgtgtcctgcgttgagaattccgcgcagtgcgtacagtgtggagcgatcccagtatgtggcgtttccttcctcgcagacaagaccgtccttgccgaacagcttatccgagagaagagcggcgatagtgccgtcccgtctttcaaatatgcccatagtcagcggaatgcatatccatgagcggagcttgtcgttttcctcgtagtagcggtaagcatcgtagccggagacattcgcgccgaagaaggtgtttatgttctcgtggagtgactttgcaaacgcgaggaattcttctctttcctcttcgtgtccaagctctcttgcaacgtcagccgcagagataagtccgccgtatgcgagagtcgacgtgcagaggttagccttgccggaggggaatcttccttcaagctcgtcggagtcggagaggataacgccgtgctcgtctatctgagttctgcaatacttcacgcaccactttatcgcgtcccagtatttttcggcgaggtcgcgtctgcccgttccgaggatgaagcgtgtcacgccgtagaggtacattgcagagtctccgcggtcgccggcaccgttccagtagtcaaagccctcgtcgattatggatgacggaatgcacttcatgtcctctcccatgaacggcaggaacaattcaaacgcgttgtccgtagcctcgacagctctgtcatatccgagataggcgaaaaacggcgcggcatattctatctggtcgttcgtccatattgccgcatagtaagctccgccgccgggtgaatgaagaggacctgacgcggtgtcgaaaatgctttccgcagtccttattttggagaagcggaacatcatgtcgagctttttgtctccgctttcgagaacgagagtgtcgtccgctacttcctttacgtattcgcggcgtctttcaatctcgtacagcgcgtcgggagtgggaagagcttccgtgcagattctcgatgagaacacaaggtctgtcgtgacgctctcgccggggagaagttttttctcaatcgcgcttccgtgaacctcggtcggatatctgccctttgtgccgctcttccattcgattttgtctacagacgggcaggagagggatatttcgcttccgcttacgtttgttattaccgcgtgctccatgtatgcctgagtctcacagcaggggaatatcgtgcggcgtatgctgacctttccgtcctcgtcgcgtgtgagtgcggtgagtgtgccgtcaagctcaaagcagtacggtatctccgcggcggcttttccgtcaatcacaaacgactgcatttcgtcatgtacggatgcgagagtggagtgagtgtcgcgcgggcgtattctcagcgtgggatatctcagctcgcggtggagaaggagcttaccctcgtcgttcacgccgtatgttacgattgcggagacgcggttgcccgacatttctattgtatccgtgtgaacgtcgttctccttaacgctccatacggttttgtttcctattattgaccatctgttttcctgcatggttatctcctcagttaattctgtatcctatggcgcggcgtattccggttttctcgccgtcgtttgcttcaagaacaagacgcatctcgtgctctcccgccttgtcaaatccgaacgatgcttcaagcgcgccgtttacgctctccttatccgcgatgagcttgccgtcgatgtacagccacaggtgctttgccatgacgtgacggaagataagggtgcaggtgttttcggcgtcgggattggtcgagggagagattttaaacttcgcgcggaagagcttgtatccgcttgtgaatgccggcttgatgttccagtcgtcgaaggatatcggctcaagggagttcatgtcgttgtcggcaaactcgcgcagagcgtcgggcatttcggcgtaggtttcgcttgatacggtgacgccctcgatatttctgtcggcgcattcgtaaatgtagttttccttcgcggggattatgtcgaacactacctcggcagttttggctccgtcagcggaagcacggaacacaagggattttgcgtcgggttttgtctgaactattgcctgacagtgaccggcatacagactgcggcgcggctcatggtcggattcaaggcagttcgggtcgccgtttcctacaccgagaagaactccgtctccgataagctcaaacgaaagcattctgttctcagtttcgcagacaataccttccttgtcgactatcgagaggtttattacagtcgcgtcctcgccgtttccgagaagtgtggttctgaacgcctcagctttaacgcgtttcgcttctccggcggtcttgttttcagattgatcggctttctttcctttaatatatcctacggcggagagagttccgggctcgaattttacattccattcggcgggagcacagcagtcggacggctttcttccgagagacttgccgtttaagaaaagctctacctcgtcgcagtttgaggctgtcatcacgcgcacctcttctccctctttccagttccagtgggggaggatgtggagcatgggctcgtcaacgaagcaggcgcggttctggtaaaagctgtccttcgggaatccgcaggtgtccattatgccgaactgtgagcctatcgaaggccattcgtagggcgtgggctctccgcggtagtcaaagcccgtccagatgaatatgccgccgaaccagtcgtgttctctcgtgaacttccatgtgtcctttatgagctgaccccacggtacctgttcctcgtcgtagcaggcgagagtgtgcgcgtttttatcggtcttgtagcatcctcttgtagtgacggcggagttgttttccgagccgtagactgcgttgtggggataacgtcttctgtattcaagcacgccgccgggtatgccgtagtttatgcctgtcgcgtccatgtatatcgctgcgccgttttcatcgttgtagccgccgttcatcgcaccggtgacaatacgcgagtcgtcgagcttcagcacagtctgcttcatgcggcggaacatctgaccaccctcttttgtaccctgcatgggttcctcgttgaagagcgaccacattacaacggacgggtgatttctgtcgcgctttaccatggcttcaacatgaccgagaacctcgggacgggactcaaagcggcggttttcatccattacgagaagtccgagcctgtcgcacgcgtcaagaatttccttcgccggcatattgtgggagcagcggtaagcgttcgtgccaagctccttcagtctctttatgcggtaatactggatggaatcgggaacggctacacctacacctgcgtggtcctgatggttgcacgtgcctttgagctttatctctctgccgtttaggaaaaatcccttgtcggggtcaaccgtgaacgttctgaagccgaaggtcgtttcttcctcgtcgcaaatgtcgcctgagacaagagagaagcgcgcggtgtaaagctcggggtcgtcaatgtcccatcttgcggggtctgtgactacgagagtatggcgtgcggtagcttttccgtcggcagggcaggtgaactcttcgctctctccgacagacacagcctcgcctttgtagagaagctctgtgcggatgcggaatttcttgtcctcgtaggagctgttttcggcagtcgcttcgcagataactctccagtcgttgccgctgtcctcgataagctctggctttgcgaatatgctgtcgtgagcgatgtggagaggttcttttactataagtctgacgtggcggtatatgcccgcgccctcgtaccaccagccttcggtagtcattccgtcgatgtaaactgcgataacgtttgtcctgtcgccgaagaatgcgcggtccgttacgtctatgtcaagcggagcgtaagccgagaacgagcgtcccacgagagagccgttgaaatatacgcgcgccgtgactgccattccctcgaacgagagcatgatgtgcttgccgtcgtattctctcgggagcttgaaggacttgcggtaccatgcgttgtgtctggtcttgtagccgtgggagatgaggttttcgggtttgaattccgtctctgtgaagtagtcgtgagggatgttcaccactctccaagagctgtcgtcaagtgcaagagatggaatgccgcgctcctgtcctgcctttgaggagttgtaggagtcggagtgggtcttctgcgcttcaacttcaccctcgccggggagaaaacgccattccttgtcgagaagaaaattttttctcataatgttatcctttcaaatttttctatatgcgatttttgtcatgaatccattatatcatacgccttgttttgtgtcaagctgacaaatattgtgtatgataatccgttttatttttcttaaaaccatgcttgaatcgggcgatatatttgtgctataatgaacttacaataatgaaacggagatatgctatgcctaactttacaaagacggcgataaaagcctcgttcatgaagctcattgcagagcagccgctttccaaaataaccgtgcgcagcatagttgacgactgcggtataaacagaaattccttttattaccattatcaggatatacccaccctcatggaggagatagtcaaggatgacgtggacgcgctcataaagaagtacccgactatttcttccgttgacgaatgcgttgacgtggcgttccatacggctctcgaaaacaagcgcgccgtcatgcatatatataactcggcgaaccgcgacatttacgagagatacatgatgaacctgtgcgaatacgttgtgtctgcgtatcttaatacagcgttcgaaaataatcccatgagtcccgccgaccgtgggcttgccgtgcgttttctaaagtgcgagctgtacggactgatattcgagtggcttgagagcggaatgaaggacgacgcgataaacgacgtgagacggatactggacgtgtgccgcggtctttcggatgagataatacgccgctcgactgagaagtaaaaaccttaaatcagaggcttcttaggcagacgagcatttttgtctgaatttcggacacattataaaccgtgtatgattttggtacacggtcttttttttgtccattttaaagtttccgcgtgggtggtataatctctaccgtaagaaaaagaataaatctaacggaggttaaaattatgcgttcggttgctccaatgaaaacagctaaaatcggttatatagttttgtccgtcgctctctgcgtactcggaataattctcatcgctttccccggattttccgcgtcgcttttcggaattctctgcggcgtcgtgctcatcatgttcggcggtgtaaagctcgtcggatatttttcaaaagacttgtaccgtcttgcgttccagtatgatttggtgttcggtatattaatgatagctctcggcgtgggtatgctcactcatcccgaaggacttatgcatttcgtctgcgtggctctcggaatcacgatacttgccgacggacttacgaagatacaaatatcccgtgaatcaagaagcttcggtatcggaagatggcaggtaatgctcgtgcttgcgattctgacaggcgtctgcggacttgcgcttgtggtatgccccggctacggcggaagagtgctcatggcgcttctcggtataacgcttctccttgagggaatacttaacctcatcaccgtcattatggctgtgaagattataaaggaccagaagcccgactcatacgagactgacttcagagagatttaacaaaataaaaaagggatgtgctcgaacccaaaagtcagacagaaaagctgacggttgggcggtcggctcacatccctttttttgttatctctttacccgcgcgccggagcctgccatgacagcttctacttccttgcggcttgccatcgtggtgtctccgggcgtcgtcattgcaagagcaccgtgcgcggctccgtagtttaccgctgtctgtgcgtcccctgtctccataagtccgaagataagtcccgacgcgaaagaatctcctccgcccacacggtccattatctcaagtcccttgtactcgtttgacgcgtagatttttccgtccgcccagcatatcgcgctccagtcgttcaccgtggcggttttcacctcgcgaagagttgtagcgactgccttgaagttcggatatacctccgcggcatggtttatcatctttttgtagccgtcgaggttcagctccttcaggctcttgtcgtttccctcaatctcaaatccgaggcaggcggtgaagtcctcctcgtttcctatcattacgtcaacatatttcgcaatctcacggttgacctcctgcgcttttgcaagtcctccgattccgctccacattgacgggcgatagttcaagtcgtatgataccacagttccgtactttttcgcggtctttatcgccgagactactgtttcacatgactcctcggagagggcagcgtagataccgcccgtgtgcagccagcgaactccaagctccccgaagatatgctcgaagtcaaagtccgcgggagtcattttcgatatcgcagtgttcgcacggtccgagcatccgacagcgccccttatgccaaatcccctctcggtgaagttcagtccgttgcggcagctgcgtcctattccgtcggtcttcacccattttatgagggaggtgtccactccgccttgaagaatgaggtcttccatgagcattcccacctcgttgtcggcaaaggcggtgataactgcggttttcagcccaaagcagcggcgcagtccacgcactacattgtactctccgccgccttcccagactcggaagcttcttgccgtgcgtattctgccctcaccggggtcaagcctgagcattacctcgccaagggaaaccgcgtcgaatgcgcagtcttttttttgctttaagttaaggttcatttgtccctccccgcgctatgaacgaatggatcttgccagagcggtcgcttcttttgtcatgtccgttatcttgtcaaacgagccgctctttatgaggtcttccttcaccatccagcttccgccgcagcaaagtatcttgtcgcatgagaggtagtccgccagattctttgtgcttatcccgcccgtcggcataaattttaccatgctgtacggcgccgccattgcctttatcatcgccacacctccggactgctcagcggggaagaacttgacgactttaagtccgcgttttacggcctgcgctatctcggagggggttatgcatccgggaagcaccggtaagcctatggaaatgcagcagtctattatctcggggtcgaatcagggacttactataaactttgctccggctttgtgcgcccgctcaacctgctcggttgtgagaacagttcccgcgcctacaagcatatcggggaagctctcgcaaatgcggcgtatggattcctcggcagcatccgtcctgaacgttacctcagcacacggcagccctcccttaatcagagcatccgcaaggggaacggcgtcgtctgcgttattcagcacaacaaccggcactacggcatagtcataaaaccgctcttcaagagttttcatcatgctctctcctttccggcgtccgagagacattccttcatcacctcgtaagtgccttttctgcgtatctcaccaaggtaatcggcgactttgtcttcaaatcccgcgataagtgaaagatcctcaccccagaaggcgacgtttgagcataccgcgtgagccaaatcacggacactgtcattcttgtgctcgtcgtagaagcggagtacgtcgccgtcgtcctttatggtgtactctccgccgtctcgctttccgataagtccgtcgtcggtgagcttatgaccgctgtagaatgcgatatagaacgcaaacgacgctgttatgcactcgggaagcactccgaacctctcgatgtatccctttaagctcgggagaactcttgctttccattttgacgtggagttgagcgatatcgagagaagcgcgtggtcgacgaacgggttgttgaagcggtcggtgacggaagcggcaaactccttcagctcgtcctcgggcagagtaagcgtcgggattatctccttgtatatcgtcttgttcatgaagccgtttatcacctcgtcgttcatgcagtcgcggacaatgtcatatcccgcaagatacgctccgagaaccatggaggtgtgcgcgccgtttaatattctcaccttgcgctgcttgtacggcttgtggttttcacagattataacgggaagaccggctttgtcgaaaggcagctcgtctttcagccactccggcccctcaatcacccacagaccgaacacctcgcccacgtcaagaagcctgtcgttatagccaagctcttcgcaaattttctcggcgtcggctttcggatatcccggtacaatgcggtcgaccagtgtagagcagaacacgcactcgtttttcagccagtttgtgaaaccttctccgagctgccactgctctgcgtaaagcttcacgcacttttcaagctctttcccgttgtcgtcgataagctcgcaggagagtattactatccccttacccttttcgccgccgaactttttgtatctcctgtacagccactgggttagctttcccggatagcttgaagcgggagcgtcgtcgaaggagcatgacgggtcgtactgtattccggcttcggtagtgttgcagaccacatagcgcatatcctcgctttccgcataggacagcaccgcttcgtagtcttcgtacggacttaagcacttgcttacgcaggagataactcttcgttcgtcaacctttcttccgttttcgtttccgcggagtatcagagtgtaaagtccctcctgctcgtttattatatcggaaagacccttcgctatcggctgacaaatgacgacctttgagttgaaacctgccgtctcgttcattttgtctatccagcattcgacaaatgcgcggagaaagtttccttcaccgaactggaatatcctctccggcgcgtcctttaatatgtagcctttatagccgatgtccttcagcgtttcatagcataaatttttcattataataccttcttcgtcagtcaaagcgttacgccgtctttaaatatagccatgtcgtgatagcctttttcctcggacttcacctttttgccggacgcgacctcaagcacgaactcgaatagctccgcacctgtctcagcgagggttttgtcgttcaccatagctccgcagtcaaagtctatccagtcatgctttttctcggagagagcggtgtttgtggatattttcaccgtcggaacgggagaggaaaaaggtgttcccctgcctgtcgtgaacagtacgatgtgtactccgcttgcagccagtgcggttgaggcaacaaggtcgtttccgggcgcgctcaatagatttaatccatttgacgatactctctcgccgtatttcagcacgcctctcaccgcggagcttcccgacttctgcgtgcatccgagggatttttcctcaagcgtgctgattccgccctttttgttgccgggagatggattttcgtatatggtttgtccgtgcgaggtgaagtagtttttgaaatcgtttatcagactgaccgtttgcagaaaaatctcttcgttttcacagcgattcatcagcagagtctccgcgccgaacatctcgggaacctccgtgagtacagtcgtgccgccctttgatacaaggatgtcggaaaagcgtcctacggcaggatttgcggtgattcccgacagtccgtccgagccgccgcatttcagtcccacgataagctcgctcgcgggaatgtcttctctgtgaaaacttccgacgtaatccgcgaggtcttttattatctcaaccgcgtcgcttatctcatcctcgcattcctgagccacaaggaatttcacgcgcctctcgtcatagtctccgatgaacttttttatctcgtctatgccgctgttttcgcatcctaagccgagcacaagaactcctccggcattggggtgcttcacaaggtcagcgaggatttttcgcgtgttctcctggtcgccgccgagctgtgagcatccgtaggggtgtgtgaaagagaaaatcccctcgacgcttccgtgtacaaaatcctgtgaacgcttctctatctcgcgcacgacgctgtttacgcatcctacagtcgggattatccatatctcgttgcgaaccccgacgcttccgtccgctctcctgtagcctttaaaatacgacatatcggagtgcggcagtgaagtctcttgcctgttgtacgaatacgagaggatgtcgccgagccctgttttcaggttgtgcgtgtgtacccatgctccttcgggaatgtctgcgcttgcatgtcctatgctgcatccgtactttatgacggagtctcctgctttcatagaagttgcagcgaacttgtgtccctgcgggatgtcctccgtcagcgtgacgacacgtccgtcaatgtcaagcttctctccctttttcagaggaacaagcgcaaccgctgcggtatcgttttcgtgaatttttatgtattccttcattgagccgtctcctcagagcatgttcgggatgtcggcgcattcgcacagcttgtcaaaaccgtagaattcctttgcgttcccgccgagaaatgcggtcttttcgctgtcgttaatctcgccgcttttcaggatgaagtcgtagctcatcttgtaggttatctctaccattgtcctcgggtaatcgcttccccacatcagcttttcaaatccgcatatgtcggcagcttcacggattgcacggacagcgctcgggtatggatagaactccgcgttaaaaacccaggttatgccgccgctctcgatgtatacgttcttgtatctcgccagacgtatctgctcatgccacctcggacgcgtaaccattccgaaatgccctatggctattctcagctgcgggtactgctgtatcatctccttgagagaacccgtctgtgcgtcgccgtcagccatgtctatggagatgaattttcctttttccgccgcttccctgaatacctccgcgtggcaggtcaggtcagttgtgggaagacggccgccgcacagctttatcccgtcaaacgagtccacacggaacggcttgttttcctcgtaaagactgcatacgcggaatctgtcggggtatctctgccttaccgcagcgagatagttgtcctggtttccgtcgatttcctcctgagtgatgacagccgccgagacctttgcgtagtccatgttcgcgaggaatcgttctgcggtgttcgcgtcgtccgtcatgtacgggggcatcatctgacgtatctccccgccgaagctgcttttgcctccgcctacgggaaatacgtctctgccctcgaccctgccgcactggcatttccagagatgcgcgtgtgagtcgactattttcatcttatccaccgattcttatcaggagctttgcgaggtcgcccttgttgtgtgctaaagcgtcgaatgcctcggcagccttgtccatttcgtaaactccgctgaccatcttcattaagtcgaccttaccggaggcggcaagctcaatgttgtcgagaaaatcctgcttcatcgcgttgcggcttccgaagatgttcagctcctttttgagtattatcgagtgcaggaacgtggtttcgcgctttccgttgcctatgaggataatgttcgcggcatacgcagcctcgtctatgcacataaggaaggtttcgggtcgaccgcacgcctctatgcaaacgtcaaatccgcgtccgcctgtgaattcttccgtgaatttcgcgatgtcttctgtggcggtgttcactactccgtccgctccgtatgacatggcgaggtcgagacgattgttcagcacgtcagctacggcgatttttccggcgaactgctttgcggcaagaagcgcgaacaaacctatcggtccggctcccactattagaacgctgtcggtcgggcgtattgccgctcttgatattgcatggcgggagatggagaacggctctatcagcgcaagctcttgtgcggtcagtcccattccgggatatattcgctcgacgggcatactgatgtattcgcagaacgcgccgtcacgctgaactcccatggtccggttgtctgtgcagcagttgacgtgtcctctctcgcaggagtagcatttgccgcagttgaagtatgggttgcaggtaacaatgtcgccttttttcagtcccttgtcgttctcgggtatctcgataatctcagcagagaactcgtgtcccggtatgcgcggatatgtggtgaagggctggtttccggtgtatgacgcgacgtccgctccgcatattccgacgtacagcaccctcagcagcgcttctccctcaccgactgtcggcatgggaacgtcccgtatttctacctcgtaaggcttatctataactatggctttcattttacagtgactcctctatgtattctttgttccagatgacggcggttttgagcggcgcgcccttgcagtatattttgttttcgtatgcgtcgtatgggtcgcggatgaattcgtccttgtcgataagctccactacctcgtcgtatctgctgtcggcaagaatctcgatagccttttccatgtgctccttgcggaagttgatggaggcgaatatcaggtgattctcaaaaccgaacggcatagtgtcaaatccgactactggaccgagcgagaagctgttgtagataccgttgcagccgagagccttatgctcaaacgccacacggtgctcgacctgacttccactgcatcctatgaacatggtagcgcgtccgccgagtttttccgttatggcagaagaagtttcactctcgctcattccgtcggtgcagaggtagtccgcgtcggttatttcctttgaaaatactaccttgcggcttgtttccggtcctctgcctatgagaagtatctttgccgagggatgtgtacggtgtatctgatccgccatgaacagtcccgtcattccgagaccgaagattacggttctgtcgaatatgctgtccttagcgcgtcgtctgccctcttcctcatcacaggaatgtcgagccatttcaacgcggaagttctgcgcagagccgagatcctccattctctcaagctggaagacggcgcaggcatacgggtcggcaaaggaaaggcgtttcgcggcagacagcgggagcttttttattccgttgtacttctccggcagtctcaggagcatatcggggttaaaatatcccatgtcgcagaaaataccgtcggcgccgtcgcagccgtattcaaaatatgtctcgtcctcggtgtatcttgtggggtcatagctgtcgccgccgcgtatcagaactatcgcaaagcggttttcgctcggaacccacactacaccctcgtgaccgtttatgagcctgttctctccctctggaaacttcatcttgagctttccgtcgcgtcccatgcgcatcagctcgtggtctgtaccgcagaagccgcagaatacgggataagcttcaatgccttccttcgcttcttctcccctgagacggcggcgcggcgggtttatcagattgacctccccgtagcaaatgggacgctcggagtcgttttggaaatatgtgccgtatgttttcattcttttccccttacgcgagagttattttaaggcagtttgtgtatgcagtcgggagcttttcgggaaggggcgcggtgagaattccgtagttgaagctgaacggtatttctccgtgtccgagaagctcgaccttttcgattttttcgttctcgtcaaaggattttactattgcgcggcggttttcgggtgcgtgcatcatgaaggcgtaaacactattgtccttcgctgtgaaacggtagtcggaagaaccccacgcaacctcagattcacggaagccgtcgattattactctcgcttcaccttcgccgaacacacgccacggtcttgttccgtaaacaccctcggagcaaacgtcaaaccatgtgcctatctcttccagcgtccatctttcccattcgtctatggttccgtcgggacgctgaagaatgtttaaaagcattgttccgttctttgaaatgatgtccacaagcatctcgatgatgtgaccgggctttttgtaaacaccgcggacatcgtagaaccagtttcctatgcaggtgtcggtttcccacggagcttcctgtatgccggggagctggctcttttctatatcgagcactccgaccttgtatacagcggcgtctctgtccttttgggtgtaaaccgcgttgttgaagccgtacttttctatcgacttgttgtagaggtaggagacagcctcaagaccgtgagcgtgaccgtcgctgtcaaacggaagtccgctgtcggaatagagaagctcaggctcaaggcagtctatcatttctttcaccgcacgaagccaatagtcttggaagcgagtgttctctgtaagccacggagcgtttttgtcgttgtgctcgtagttgtcgtggtagaagtcacggtattcggggtcgtttccgtcatagggtacgcctgcgtaaggacctgtcttgtcgcagcccttgttgacgtgccaccatgagaacgacgcggcaaggtgctctgtgataccgaagggcataccgtatttctttgcggctttcttccatgcggcgcagatgtctctcttcggtccgatgtttacggaattgaagcggttcaccttggagtcgtagttgaagaagtggtcgtggtgcgtggtctgtgcaacgaagaatctcgcgccggcacggtaatagagagccatcagctcatcgggatcgaacttttcggctttccataatgcgcagagatccttgtagccgaacttggacggatgaccgtagtgacgaacgtgataacggtactgatccgagccttcgatgtacatatttcgtgcgtaccagtcgccgtacatgggaacagactgcggtccccagtggctccagataccgaatttcgtgtcgcggaaccaatcgggagctttgtaggttctgagagattcaaaggtaggttcaaatttttctgacatggttttttcctccgttatgtgaaaaatacagtttttatgcctgtctgacatatgatgttgtcttaattatatcagacgaaaaaacgaaatactttataaattcgacagaatagtttagaaatcataccatagcattcgtttttgcgcttcactgcctctataaaatattgacaaataatcaaaacatatttataattacaataaacataatgctgtgtcaaatcatgcggtacataataggtgaaagctatgaagtcaacagaaaaaggggtgctggaaacgtcggagctgtatttcttctccccctcccaaaccgcgaaacgactgtatttttatcccataagcacggggcatttctttgccgtgaacggataccaccttgtccgaaacgactacgacagccttctcataacgcatatcatccgcggctcgttcacttatgtaaaggacggaaagcacagcaccgctcactcgggagaaaccgttattctcgactgcttcaaggagcacgaatactacacgagagattcctttgagtcgatatgggtgcatcttaacggcagcaactgcgtgaacctctaccacgagatagaaaacatggcgggtaatactgtctgctgcaaaagccctcagctcgtggaggagatactttttaacgtccacaatgtgctcggcggagagaaaaccatgccggaatcccgcctgtcgatggagctgtaccaccttatgacggagcttttgcttgctcaaagtccatcggacagccagacaatgcggtacgactcacttgtgcgcgacataaaatattacgtctcgacgcaccttaacgaaaacctcagcgtgaaagctcttgccgagaggggatatatgagcgtgaccaacttctcgcgtgtgttcaagcagcagacgggtatttccccatacgaatacgtgcttatctcaaggctgaacaaggcaaaggagctgctcagacagaccgacatgagcataagccagatagcggcggcagtaggcttcaacagcgactctaacttcatccatttcttctcacagaacaccggaatatcgccgaagagcttcagaaagctggagttctgacacaaactatcgcctatccgttttgtcctcgggtgggcttttgtgctgtccggggactttgctcttgacatttaatgtaaaaaacgttacaatactattgtagtaattttgcatttatatacgcagcaaattactgcacaggaggtgggcgcgtgactgacgaagagctttatcttgtctatatgagcggaaaagaagaggcggcggcagaacttgttgagagatacggcgaccgtcttgtactgttcatccgcggctacatccacgacgagcaggaagccgaggatctcatgatagactcctttgccagaatattcgcgaaatcccgcccgatatccgtgaaaaacgaaggctcgttcaaggcgtatctctttaaaataggaagaaacctcgcgctcagatatatcggacgccgccgcctaagccttatcggatttgacgacattgcattcgagccgcagagccttgaatcagccgaggaagacttgctgcgaaacgagaaaaactccgcgctgtattcttctctcgcgaagctgaaaaaggagtaccgcgaagccctgtaccttgtctacatagacggatgcaattacacgggtgcggcgaagatactcggaaaaagcgaaaaacagataacgaatctcgtctacagagggaagcagagccttaaaacgatacttgaaaaggagggattttgctttgaggacaactgaagaacgtcttatgctgatcgaaagccggaaaaagagcattgtcgagcagaagaaaaaagcgcgccgtgctgcggtcaatgtgttgtcttctgccgcctgcctgcttctcgcggtgttcatcggagtgtacgtctcatccctcggagtttcttccatgccggattacacagtaaatcaaactgcaagcttcatcggaggcggggacagcgcgggatatgtcgtggtcggagtgctgtgcttcatgctcggcgtgtgcctgacgatgctgttgtacaagctccgcgacaagggcaagaacggtggggacaaatgaacttcgaggtcgttgacaacgtatttcaaacggtgacgcttcttctctcggctgcggctgcgtttgtgctctccgtgatgaagcgcagccgcgtgctcatgatgctgtccttcggctacatcagctttatgatggggacgctgttctacgtcctgcatattgtgatactcggctacaacccgaagattttctatgtttccgaggtgtcgtggcttgcggcatatctctttttcttctcgatagcactgctcatctcggaaaagacgaagttttatctccccggagcagtaaccgcactactcgtctatgccgtgtcctttaccgttaagatattcggaccgtcctatatcacctccactgcgtttgcacttctcgtagccggtataacatatctctccgtctgcggaataaaaaaacacggtgcgaaaaacagtgctgcggagataatgatgctcgcgtgcgtcctgctccagatagccctgtacatcgtctccgtgttcatgaccgactacacgagcttcaacctatactttgccgttgatattgcatttactctatccatgacggctcttcttccgatattctgccgaagggagagcgcacaatgacgtatatcgaaaacatttacatatgcatagtcctgccgcttctcttgtccctcttcttcactgacggaaaagcgcgcaccaatacggtattcatactcatcggaatgacggtgtgctacctcagcgcgtatgtcaacagcttcttctcagcgttctatacgacggatgcggtcacggcggcggttgagatttctcccgtgtgcgaggaaataattaagcttattcccctcatcatgtacgtcgttatcttcgagccgataaggagagacatacccgccgcggcaattgcgatatccgttggctttgcaaccttcgagaacgtgtgcttcctcactgaaaacggcgcggaggatttcttcttcctgctcgcgaggggaatgtctgcgggcgcgctccacatcctctgcggaatagttttcggcgggggaattgcgtatgtgttcggtcacgactggctcatgctcacgggaagcgtcggaatactcggcatgtctatagtgttccacgcgctgtacaacctcatgataacctcggacggcgtgttcaggcagataggatatgtgttcccgtcagtgctcatcatgcttttgttcatattaaagtgcgtcgcggagaaaagcggattcaaaatcaaaaccgaataacaagacagctttcgtaagcgtgtaaatttcgcggcgagggctgttttttatttttcggaaaaaatttctgattttggtgagagtttttgcgagatttggtattttatattacagatacgttaaaaacggaaaagcgtgacattttaaacaggaggcgtgcaatttgagtataaagcaaacaacatcatcacgggtagacgagatacgcaaaagaacgtgcgcataccgcggaaagctgtacaaacggacggtgagcattctcacaatgtcctgcgttctgctgctctgcacacttgtcggaatgtttttctcctcggagagcctttcatgcgtggtcgtacttgacggatgcagctcggttctgctgaacggttccgccggaatttacgttgttataggagtagcggcgtttcttctgggagctgtcacggtaattctatcggtaaaacttcgtaataataaactttcatcacgggaggataaaaatgagctttaagacaaaacaaggagctttcagcagatttatttctgttctgctcactctttgcatggttttctcggcgttccccttatcggcgcttgctgcggatgtggcagatgtggcggcggataacgcgtggaagagaatgcttgagataggaatcgtggacgaggacggcgagcttatcgaggacacagccttcacgcttgccgacggaagagaagcatattccataactgaattcctcaatatgatagacgcggaggaaaccgaccccgatatggcagtgacagtatggggtaacggaagcgtcgctacggttcaggaaatagtgtacgctctctcgatagagtatcagatgaaggatatagcctcgtccgtgcgctatctctcggagaacggtgcagctgctaacgaaaacgacaccgcagacacaaacgccgcacctcaggcagaatcactcccgcgccttacgtatgagatggagctttacggaaacatgtttaatgtctatttcaggcttgaggacgcggacggaaacagcatcatagcaagcgaagacatcacatttgacgtgggacttttcggcgacgttgacggcatatttgagccggagcttgagataaacacggcgtacaagttcaaggacctcaccggagtgaacacctatctcagccgtactcttgaagtcggaaaaagctcgatttatgtttcgtataatgttccgatgctgaagcagtatgtcgagactatttacgactactacaacaaggacgcatactcaaaaagaccggattttcttgacggcgcgcttccttttgtcgtgcaggtgaacaatctccgcggagctgtcatagagtatgacggaaaatggacggactgcgctacaattcctcttgcgtatgagagaagcgaggcggtttcggttgacttcgagtgtaccggcactaccgtatcgggcagtgacataaccactctcgcgggagacgacttgaaccagatcaacaaaatcctcgacgagggcaaaactatcgtgcttggctatgtggtggacctgtcaacgaatctgctcggactgggagagagcgaaattgagaaaatgcgcctttcgtccgatacctatatggagaagtacctcgacattttggcgacgttcgagggtacgggacactttgatatgtcacaggacggtaataccgttggcctgttcgtgaaatactctgacggcaagtggtatcatgactacattgaaagcggtgcgtcgataattccgtcaagttcagacggtacacttaatcttgacacacttaacacagagatcatggcgctcatcccatattcggtaagctacacccccggaagatgggataccgaagccggaacgacaaaagtaacgcttcccgagcagatagcgtatgtattctatgaatcaaaaacctacagacgcgacatcaagggagtaaacaaaattggcgtatccagagttcagctgaacaaaggcacaggctcgagaattgacgaaaatcatccctacaccgcgccgaatgtcaagagcgtgagcgtagtcggagaccggacggaattctacgtaggacagagcgtgccgatacttgtagagttctccgagccggttaagggttcgtattacctgaacctgtccgacggaacaaaactccgcgacatcgacacaagctacagtggatttgagcttgttaatcctgacgtaactgctgatggggagatactctcggcaagccgcctgttcttatatgaagtaaaagcggtcgacaacacggagataacggtaaacggcgtgtccggtgtaaactccgattgcaagaactacgtcggcgttgagtatgaagacgagacgtttgagaatgctgtaactctcggcgcgcacctgaactccaccctgcccgagcattcaatcggcagtctcacggtagtatcgggtactcccgcagagcataacggagacgaatatatcacctacaccttctcggcggacaccgttcagaacgtgcaggcataccgtcagctgtgggcaagctacaatcccgacacaagcggattcaaagcagtcgcggttatcgacggggactttgacagccatgttgtccttaccatagacggagacgacggcgtactcgagggcagtgtgaacctcccgaagatatacgacaaaagcgacgttgagcattcggtcggactgtacatactccgcggcggggaatacattccggtaaactcctacgcttccttcacggaaaagagcataacaacagctcccgacgacgcatatgagctgacagtggaaaaggatacgctctacataacggacgcggcggcatattctctcaccgtgacgaaaaatcagtcgaagacgtggacatacgacagcgagaacgactatgagcttgtccttgacaaagataacgtgttgtcgctcaattataataaggatacgaaaaagtattccatgataacgctcggcgtgggagaggtcaagattcacgcggctacgagaaacggaaaatcagccaaggcaaagcttgaacagtgctcgaacgaaatcacggtaaaggttctcgcaggctctactccgacaatcagcttcccgacaaacgcgaacacataccttacacgcgcaggagacgactgtactctcatgttcgcgagcaacctcagggctatggacggtgagggagactacagcgataaaaagatagcagtacagctcatagaaaagtcaagcggaagcatcgtatgggaaacgaaaatcgagcgttattcaaacaagataaccgttcccggcgaatacctcacaaaagtttccactgatggagagtacgcatacacagtaaaactcaccgcagaagccgcaggaaagacgatcacagcaagcggatatatagtggttcttcctcagccggcggcggtagagatagatatagacggcacaacgtttgtttccggcaagagcgttcaaataggcttcaaagttgagaagctgaaagacggcgtcgcggagctttgggtcgaaaaggacggggcggttcttgataaggtcgagtacagcggtgctcctgagggggaggcatacgaaggcgggcttgactttacgtttgagatgacggacaacgccgcgctcaaggagaacttcctcgttatggctcgcgcgagaaacaacggagacgacgcatggagcacggactcacgaatagtcaccgtatacagaagcggagcgcttgacattgagataggcggagaaaagaaggactcgttcacgcttaaaaacagggtcgaatctgcgggaactaccacttctccgacaatcacaaacacctccggcgagactatatcgggtcttaacagcgcggagaagatagcggggcttcgcagtgagctgggacttctcgaatccatcagtataaacaagtccgatttcgcatggggaagccgctccgacatgataaagtggtcggctgacgcggatatcgacaagcttagacaggttctgacgctcaactacagacagggcagcgtatacgagcctctctcgaacttctcataccttgcgtacatccccgacgctcttctcatgctgtgcggactgaacgagggtactgcaacggttacagctcaacacaactccgtagaagagcttagcgacacggtagaggtaaaggtagaaaagctgaaggacaagctgtatctgttcggcttcactcctgcggtcgagacaaagctcacctacaccgacggtaagggagaggtacacaacgtcaagacaaacacggacggttctctcgcactgtatgaaccgaacggtattgcatccgacgtgaactgctactccgaatacgcgggagaaaaatacctcggaaccgtaacaaacgagtcgctgaagagcggagagggcaacggaacaaagggcgagctttacccgatgaatgccgcatccctcagaaaagccgcagtcgccgagatagtgctgacaaaaccggacggaacaccgtatgtaggaaacgtcactgttcgcggaggagtttaccgtaatcttccttatgccgaaaaccgtgacgacgcttactgcacggacgcaaagttctcggcagagcaggatgagccggcttcaatggacggtaagcgcgacatgagttttactaccgacgcaaacggaaagctgacagtctacatggacatgacgcagttcgcaacgaagaacgacgcttctccgatagacctccacgaggatattcagtatatattcgagctgcgcattgacggatattacccctcgctcgtgacaatagactcaaacctcaccgtgaaggacgtcatgagaaagggtgagaaccgtgtgtcgcttgcatatgccgagaatcccgagatatttgtggcttctcagacagtggactacggcacgggcagaaagattaaaataactcagaacacctcacgtatcggtcctaacgctacatatcccacggcggagtttgacacgaccgtaatgctctggagagtgaactctgccggctgcgactacgacataaccctcagacagcagaacgtacataaggctttctccacacagaacgtcacgggagtggaagaggcaacctaccccttctcgtcgattaagctcatcaggaacaccgtaattcttgacgagagcgcgttcgagggatttgacagcgacataatcaaagccgagtacaggatttacgacaaaaacaaggtcggcgcgggatgcgtgatatccgtccgtccgaagattgtaaacctcataaacaacgagaggattcaggacagcgacaacctccttgacctcatgacaagcattgcactgttcagctcggtcgacggcgcggaaagctcggacggtatcctcaaaaaagccggagacaaggtaattgacgcaagtttaaagttcattacaagcatgggttcgggcgcgggacttgtcaaatgcgttctcacacctacggaagacccggcgagattcacgggctacttctggacgggcatgaacacgctcaaaatggacgacctcgaatacgaaaacggaatctgcgtcgagcctacactgcttgatttgcagctcaacgacacgttctccgtgagcgacttcaagagcatggctgacggctcgtatttcgacgacaaatcaagcctttggggagcggtttccaacggcgttatcggacttcccgtaagcatagctctcgaaggatggttctccaccgatataagatacaacctcgacaagggcgaatgggaagttctcatgacgggcggaggcttcaccgcaggcgctgagcttcagtacgagacggcgcgagacattttggttggacctgcaatcccggtaacatactcgataaagctccgcggcggcgttgtggttgacttcaagaccgctataagatacgcggaggagcttggcgagggctgggacgacgaaaaggctaaaacagtaaacgactacctcaccgcactcagaatcaacgcgtatgtcgagctgttcggaggtctcggcaagggcaagaacatcacctgcaagataggagcgttcggtacgcttgagatagacaacgaaaacagattcctcacgaagaactacctgcaagccgaaagcctcagaggtcagtacctcaaattaaacggcacggtcggcattaaggtagctatcggaatgggacccgtcgagcttgaagttaccgtagcttcaataggtctcggctatggctggaatttcaacgactgggacgagattaacgactactggtacggcagtgatgaggacggcacaaactcaatggccctcatgatggctgtaagcagtgaccccggatttgtggttctcgacagcactgtaagacttcagagcatggaatacctgaaatacgacagagaaacatacttcggcgaagactttgctgatgccgtgacatatggcgcgagaagatccccgaaagctcccggcggaataaatcagttcatgtgtctctacagaagcgcatacccgtatattgcacctcttctgaccgacgacgctgagatgatagtgttccttgacgacttctcaagcatagaattaagagatgtttctccctcttattcgctttataaaaacggagcttaccaaaagcctataaaggtgcaggacaagaaaaacagcgacttccccggctacggagactacaccttcgaccttgacggaacgtattccttcgcggcactcacatggcttagacagtcggcgacactcggacttaaagaaggtaccgagctaactcgcgaacagcagtatgcacttttaagcggcagcgaggtcatggcttcgatatggaacggtgcggaatggacaacagtacgtctcaccgacaacgctatcagagaggacagccccacggttgcagcatcggacgacagcgcgattgttgtgtggaagcagattcagaccggtgaagagataggcgagaccgtaaacgacgcgcttctctataagctttacaagggcggcaaatggggcgataccttcatgctctacagcggagacgtaggagaggtgcttgacattgacgcgaagatgctctctgacggcacagcggcggttgcgtattccgtgtctgaaaaaggctcaacgtcggacggcgagatttactattccctcatcgacaccgaaagcagctctcccgcagacaccgtaaagaccgtccgtgtcaccgaaaacgacagctccgacatatcccccgttatcacaaagacagtgcttgacgaggaagaagtgttcgttctcgcatggcacaagctcagtgaagactcaggagtggagctgaacgacataggctttgttgtgttcggcagggacggcactcccgagagcaatattcccgattctcttgcggcatccgtcaacatatcgaatttcgacggcttgttcaccctcacaaacggagcggagagcctgactgatatctctgtagtatggcgcgacaagaaggcgggagagagcaacaacgacattataaagtcggctaagctcggactgtacgacggagtttacgcattctccgcaccgacggacgctgttgttaccgaagaaggcaatgacgttcagaccctcagcgcat

SEQ ID NO: 2168 - DNA, 29128 bp, Unknown
  16S sequences of unknown bacteria
aaaacaaggaaaataatcgtatgagcatatatgaaaagttttgcagtgaaattctgggagatgatggaagacctctaaatttcacgcttaattataatgaaaatttcaattttggatatgatgtcgtggacgcgattgcggaaaaaagtccggataaacgtgcgcttgtatggtgtaatacagaaaatgaggagcacacttttacatttgacgatatgagaaggctttctaacaaagctgcaaatgtatttactgcaagcggtataaagaagggtgacagggtgcttgtggtgctcaagaggcattacgaatactggatagtgacggtggctcttcataaaataggcgcgattctgataccggcgacgcacatgcttacagttgatgatatagtataccgtatagaaaaagccggaataagcggaattgtctgtactacgcaggacgatacggcaaagaagatgaaagaagccgttgaaaggactggaggagatataaagctttggaccgtgcagagagaatttgacggattttccaatctaacagaaatgcttgaaactgcaagcgatgagtttgaaagagtaaagacatgcgttaccgatccaatggttacctattttacatcgggaacaacgggatatccgaaagctgtaatacatgatttttcttatccgcttgcgcatatagtgacggcgaaatattggcatagagcagaagacggggggcttcattttaccgttgccgaaactggctgggcaaaagcatcgtggggcaaaatctacggacaatggcttcttgaaagcgctgtaatggtgtatgattttgataattttgacccgcggcagcttactacagtgataaacaagtacggtgtcacgactttctgtgcgccgccgacggtatacaggtatcttgtaagaaaaggtgtgccggaaatgccgcatcttagatatgcaacgacagcaggcgagcttctcaaccctgagatttcccgtatttttatggaaaagacaggtatagagcttgcggaaggatacggacagactgagacgacgctgcttacaggcaattttaaaggaaaagcgccggttgaaggttcgatcggcgtggcttcgcctatgtacaatatagagctccataataaagatggaagcaagacggatataggaaaaataggagagattgtaattgtgccgcctgaaaacggaaagcagccggggctgtttacagggtatctcggaaatgaagaacagtacaaacaggtatggcgcggcggagtttatcatacaggagatgctgcttggcaggacgaggatggatatttctggttttacggcaggtttgatgatgttataaaaaccggcggctttagagtgggaccgtttgaagtggaaaatgtgcttatggagcatcccgctgtgctcgaatgcggtgttataggtgtgcccgatgcgctgcgcggacagtcaataaaggctgtgatagtgctgtcgcctggatatgagccgactaaggagctggaaaaggatataaaggatttctgcaattccaagctcgccgaatataagtgggtgagaatagtagagtttatagatgtgatgccaaagacgataagcggcaaaataagaaagatagagcttcgcaaaaattaaattttctgtgaactgaattattgcttatttcaaggttgcatatcataaataaatatgctatacttttatcgttgcatataaatatgcaaaaaatatataacttgtcagagtaggaacagcgcgttaagtgcggtgagacgggatgtggtcaccgacgaaataccggaaaggtatgcgatgctgtatccgcatccgctgccacagaaggaattgccgactcttttcgtggcaacaatgctgcgaaaggagtcttttattatggatcaaaacaaaatacgtaaaatgaccgttaactcaatgatggccgctatgtgcgccgtacttgggtatgtttctcttgatatgggcaatatcaaggtgacttttgagagttttccgattatgctcggagcactgctctttgggcctgcgtcgggcgcgcttattgcaggcgtcggcgattttatttatcagataattcgttacggattttcggcaaccacgctgctttggattgttccttatgtagcttcggggcttgtgatagggtggtatgcgaagaaaaatagctttgagcttacaagaattaagacacttgcaatcgtgcttatcggcgaaataattattaccgctctgaatacgggcgtaatgtatattgatgccaaaatttatgggtactattcgtttgcttatattttcggcgctactgtcgcgcgtattttgctttgcataggcaagggggctgtatttggcatcgcaatgccgccgattttgtcttcgcttaaaaaagcgcttaaaatgtaaaagaatgtagacataataaagtcccccgaaattcggctatcgggggtgcttttatttatctatgatatgatttgccgatgaaaaagtaataaattaaaatcggtattattctgatttttcaaggataaaagaaaacaataaactggaaattgaaggagttaattatgttgcagattagaactgctgacaatagtgattacagcgatgtcagaaatttttactattcattgattgatgcgatggcagatgcagaatataagccgggctggcaaaaagatatatatccagcgcaagagtttttgattagttctatcaaaagcaaggaattatatattggagagatggacaggcagatagtttcctgtatggttgtgaatcataaatacaatgatggttacaaagatattcagtggtctgttgaagtaagtgattcagaactctttgtaattcacgcgctgggtgttaatcctatgttttcgggtaaaggaatagcaaaacaaatggttcagcaggttattaaaatagctcatgagaataatattaagacaattaggttagatgttctcgagggcaacactccggcagaaagggcgtatactaaaattggttttatgtatctcgatacaattcaaatgttttacgaggatacaggttggacgaattacaagctgtttgaatttattctttaagttacagaatatcctgtagttatgatgtaaatcggcgttttaacagggtgcctaagtaaattataagctgactgttttttctgttttaaggctaaaataaaaacgggaaattgccggaaattgagcagtttgctgttttataaggaaacgtaaaaatccgttcaaatgaacggatttttacgttggcggagttggtgggattcgaacccacgagccccggaggactaccgcatttcgagtgcggctcgttatgaccacttcgatacaactccatgataatttttaatgtgttttaagcaagacgctttagacagtatagcatatattttgatttttggcaacttttatgttaaaataaaagaaaaaaatatttttgtgaaaagaggggaaataaatgtacgaacttgagtataatgtgggatgcagctgtatgggacttgacggccgcgttaagataccggcaattctcaattttatacaggattgtaatttcaggcatttggagagcattcctaagcttatgggatattttcatgagacgaattcgggaatgtatgtttcattcagagagatagttataaacaggaggcctatgctcaatgaagacatagttatgcgtacctggggatgcggcatgcgcagcatgtatggcaacagaaataccgtaatttatgataaagatgataatattcttgtgctttcgagcgaagtaggcgtatttgtggatttatctacaggaagaccgtttagagctcctgaagatgtggctgatgctattcctattgaagagccgcttactacagcttatttacagcgcaaagtaactctgccgaaagtaaatcctgtgttcagagacgaggtgcttgtcagaaaatatcactgtgaccattatgggcatatgaataatgcgaaatatgaagaaattgcggaagaatatctttctgatagctttgatattgcgagggtgcgtatggaatataaaaaacctgccaaaagaggtgatataatatatgttgagacgttcgaagatgacgagatttttatggtaaatttggcggacaagggtggaaacagctacgcggtcatagagtttctcggccaaagaaaagaaatagaagaataaaataaaaacagttcgtaaacgagctgtttttttgtgaaaaataataaaattattataagaaaatgtggaaattcaccaaattctatgctacaataatatgcgaaataatattttaggaggaagaacatgagcaatcacattggcgcacttgaagcagcaaaaggatcagttgcagaaagcgtgctgcttccgggtgacccgctgcgcgctaaatatatagcggaaaattttcttgaagaaccaaagctatataatgaggtaagggggatgctcggatatacgggaaggtacaaaggcgtgccggtgtctgttcagggtactggtatgggaatgccgtcgatgggtatatactcatgggaacttatggaaagctacggcgtacaaaagcttgtcagggtaggcacggctggctcgtttcacgaagatgtaaaggtgcgtgatattgtaatcggcgtatcggcgtcaacagattcgaactatgcgcacacctttgatattccggggacatttgctcctgccgcaagttttgacctgctgcttgctgccgataaagcggcttctaagctcggactttcgtacagagccggaaatattctttcgggagatgtattttacgagcttacagatgattggtggaaaaagtggaagagaatgggaacgctcgcagtagaaatggaggcagcggcactctatatgaatgccgcgtacttaaaacgcgacgcactcacaatacttacaatatcaaaccactttgtgacaggtgaagagactacaaatcaggaaagagagacgacattcacgaatatgatgaaactcgcgctcgaaacggtaattgcgtagactctgagaatacctgaaaccgatttataaggagatgcgaaaatgagaacgattttaaagaatggcagatgtcatacattaaatgaaaacaatgatatagttgaggcgattttagctgaaaacggcaaaatcgctgcggtaggtacaaatgaagagattatgaagctggcaaaagacggagatgcgataatcgacgccggcggcaagactgttatgccgggattttacgatagccatatgcaccttttaagctatggatatagtcttactatggcataccttgatgactgcaacagcattgaggatgtaataactacactaaaaaaatatatagaagacaacaatattccgccgggcacatgggtagagggaagaggctggaacgagacgaattatcccgaaggacgtatgccgaatagatttgatcttgacagagtttcaacagagcatatgatttccatcggaagatcgtgcagctttatctgcattacaaacacaaaagcgctcagcgagctcggctttatggaaaagctgcctgatgtttcgtcgggaatggtggaggttgatgaaaacggagtgccgaccggaatattcagaggagaagccaaggaagccgtatattcgagacttcctaaactcggtgtcgagagaataaagcaatcaattgtcgccgcctgcgagaaatacaaggaagccggaatcacatcggcggaaacagacgattttgagctcacacgtgcgggagatttcaatgatatattaaaagcatataaggagctcgacgaagcgggagagctgccgataagggtaaatcttatgctttatctgccggaggacgagcagcagcaggaattttacaagtacggatttaagacaggcgacggctcggattttttccgcattggaaagttcaagctccttacggacggttcactcggcgtaagagaagcggctcttctcgagccttatgcagatgatccgaccaattacggcggaccgcttgtgacgcaggaagctatctgccgcaaggtaaaggatgcttatgagcacggactgattactgtatgcgacggtatgggcgacttcggtatttatcttgcgcttaaggcgtacgagcctattgttgccgcgcatccggatgaagatttgagatttggaatagaccactgtcagatcactacagaaggccttattgaagagtatgcaagactcggtgtagttgcaggctgcgaactcgtatttgtaaaatcagatattgaaattgcagaggacagagtcggaaagcatagagcgtcgctctcatacaactggaagagattttttgataacggttgcgtagtcgcggcaggctcggacagtcctgttgaggactataacccgatgctcggaatagaaggcgctgtaaacaggcgtgactgggataatcagccgcctgagggctggttcagcgagcagtgcataaccgttgagcaggcagtgcaggcgtttacaaccggcgcggcttatgccaattacgaagaaaacgaaaagggaactatcgaggttggaaaatttgcagacctcatagtactttcggacgatatattcagtatgaacaaggatgaccttgcaaaagcaaaggttgaaaaaacgattataggcggagagctcgtatattcggcttgatcgtttaataaaattgtttaatagtgattaattacggtaaaatcggaggcagcaataataatctgcatccgattttctttatattcttctagcactatctttatattcgttttttcaaaattaaagatcattcctatcattacatttttgcggtttagtggcaaaaaagatatttcagatgatttcgatagtctttctatcggtattcattattatcttacagccgagtggcagcgtcagctgcggataggagtgtccgcaggcaagtcctgcaagcacgggaataccgagcggcgaaagaacttctttaaatgtatttaaaagtgatgaggtgcttgcattatgtgctgaggagcagctcttagtgtcaggaagatatataccttggcagccttcaaaacttccgagaagaatgccctgggcgtgcgaaaaaacaccggcgagcataagcgatgtcagcatgcggtcaattttgtacggtggttcgtttatttcctctataaatatgatctttccgtcaccgttaaaagcgtaagggctgccgagagtcgacactaaaagtgacagattgcctccggcaagagtaccgcaggcaatgccgccgcagatagagttaagctcaaaatcattcgcagcgctactgtattgcggatttctgattttcatatcgcaagtatcgccgaacattgcaaaataaagcgatgagagagtaaaatcgtcgagagtgctatagtctatactcggcataggtgcgtgaaaggtaacaaagccgcattcttggttaaaaaccgtatgcagcgccgtaatatcactgtagccgaaaaatcttttgggattgtttcgtattatatcatagtttaggagatttaaaagcctgggagtgccgtaacctccgcgcaggcatatgacgccgcttaggttttggtctgcaaaagcgttttcgatatcgcgggcacggagcttatcgtttccggccagatagccgtagttttccacacacgatggaaacagtctgggctcaagtcccagcgcctttattgacataaccgcgcggcgcaggatgccgggtgcgggaggcgaagaaggcgcgatgagcgcgacactatcaccttttttcagaggtcgtgggatcagaagagtatccataattttactttgcattgtggacacatcctttcgtatatgataaaataaagtcattgaaatacaaagaaagaaggcttacgcatggaaacgtataataatgtatgcgaagacggtaatagtttatacctaggtaaatatcacaaagtgcggcaaataaaaacgctcaaggaatttatcgcaggcagccataaactttataaggaaaacacggcgtttctcacaaaggataaaaagggaggagattatagagaaataacatacgacagctttaaaggagatgtcgatgcgctcggtacaaagcttatagatatggggctcaaaggcagaaaaatagctgtcataggtgaaaactgctatgattgggtgactgcgtattttgctgttacagcaggtaccggagtcatagtgcctctcgataaggaattatcgaaggaagaaataaagcgtctcattgataccgccgaatgcagagctgtattttatacgaatacatacagtaaaatttttgaaaatatagatatagaattcaagtttgaaatgtctgtatatgaagatatgcgcagcaatcaaaatgaagcggaaatacgaaatctcattgaaagcggaaaagagctcatcgaaagcggagacagacgttttatcgatgcggaagttgcaccagagcagctgtgcagtctgatatttacatcaggaacgacgggaacgccaaaggcggtaatgctcagccataataatatcgcttcaaatattatgaatacggctaagatatttgaaataaaggaaacagacaggtctctttcaatattgcctattcatcatacatttgaatcgactatcggaattatgggacttttgttcaagggtggttcggtagctttctttgaaggcttaagataccttaataaaaatctgactgaggcacagtgcacggtgcttatcggagtaccgctcatatttgaaaatctctatgcgaagatctggaaaacagctaaaaaagagaaaaaagacaagcttcttaaaaatgcggtcaaaatgggaagaactcttaaagctgtagggatagatgcacataagctgctctttaagtcagtttataaaccgcttggcggcaaactgcgcataatcctttcgggagcggcggctcttgatcctaaggtagcgagaggttttcacgatcttggttttgtattttcacaaggatatgggcttactgaaactgcgcctcttgttgcaggaattccggattttgaaacagatataaacggatataaaaaggcaggctcatgcggtcctgcgcttcctcagggtgagctcagaatagacagacctaatgatgatggcataggcgagattatgtacaaaggcccaaatgtgatgatgggatattacaatatgcccgaggagacttctgaagtgctgaaggacggctggtttgcaacgggcgatctcggttttctcgatgaaaatggttggctttatataacgggcaggaaaaagaatgtcatcgtaacaaagacgggcaagaatatatatcctgaagaaatagaaaaatatcttgcagatattgactatatttccgaatgtatggtatacggtactgatagtgaagacggcaacgacactatcgtaagcgtgcaggtgcgcataaatgaggaggctgtggaggaagcaataggcaaaaatcattccgatgaggaagtttacaagctgataagggcagaaatagctgatattaatatgaaactgccgaattggaagcgcataagacacatagtaatacgcaagactgattttataaaaacaacgactaagaaaataaaaaggcaggataatatcgaactgctcgatgaagatatgtttacattaaaataaagcgaataaagtatcatttgtacctcgcagtcataaaatttaatgattgcgaggtgtttttatgtcagatatatatcttaaaaatgaaatcgaagaagcaaataagtgggctgtagacatatatagaaaaatacatatgtatcccgaaacaggaaacgaggaatacaggacagcgtcacttgttgaggcgcagctcgctgaaatcggccttgtttgccaaagaccgcttctgacatctgtaacagcggagcagcatgcggctgagaataccaaagcagagaaaatggtaagcgcaggtaaaaacaaaaatcgcttagttatgcgctgtgagctcgatgctatagatataaaggaggaaacaggacttcatcatgcgtcttgcagagagggatttatgcacgcttgcggacatgatgtgcatatcgctgtaatacttggaacagcaagggttttatcgaaaattaaagataaacttagtatagatattaagtatatatttcagcaggatgaggaaggaaacggtaagggtaaagatattgtagctctcggagaaatatgtgaaaacgatatcgtgcttggacttcatgtaaggccgtctcttgcaagcggcagcatagggataaaaaaaggaattatgaatggtgcgtctttgatgtttgatataaagatagatggtaaaacaagccacggcgctatgccgcatctcggccgtgatgctgttgcagcagcttctgcaattgtttatacggtgtacgcttccgtatgccgccgtatagatccggtgcgcgcacatcttgtgtcttttggcagtataaaaggcggcattcgccgcaatgtgataggaggaagcgccgagctttcaggaattatccgtgcagaaaacacagaaatgtgcaagtttattggtgtagaaattgaaaaagcagcaaaaaacatagcagaaatatacgggtgcagcgcgcaggcgatttttacggaaggctatccgccgctgataaacgatgcaggcgttacggaaatgctgagagatgctgtaaatgattataataagaagagcataatggatgagattaaaattacggaagtggaggatttttcccttactgtagacgactttgcatattatctcgaaaaagcaaggggcacatacttttaccttggaagcggctttccgggaaaggaaaacagcgatatacatacgagtactttttgtgcggacgaaagctgtatcaaagtcggaataacggcgctgactgcggctgtacttaagatgaataaagataaaagtattttttcaaaaatataaaaaacgaagggagacacatccttcgtttttttttactcacaagtaaatgcgcatttaacttatgcgccggtggggacgggtgagttttatttcgcgttgttgaactgctttgtaagtctgctgacctttctcgaagcagtatttttatggatggttccctttgatgctgcctgcataagctttttctcggcaagcttaagcttttcgccggcagtttccatattgccttcggcaagagctgcttcaaaatcctttaaaacagtcttaagatgattcttaattcttctgtttcttgcagtcttcttatcaataacacggattcttttttttgcggatttaatatttgccattttttaattcaccccacttttcattaaattttttaagcaaatttcgcaacaataagtatatatgaataaaagcaaaaaatcaaggggaaaatccaaatatatattttgtgggaggaaaaaatgaaatacagaaccgatctggcgcttgaatgcgtgcaaatgtacgatgaggacagaaaaaagaagacgaatgcggaagcgggaactgatagtgaggataaaacgtcaagcgaaaagtccaaaggaagtttgagtgatataccgggtgtaaagtgtatagaagaggagattgacggcgacataaaggttacgagaatagagataacagacgagacgggggaagcgctgcttggcaaaaaacgcggcagctatattactctcgaaatcgacggcatcatcgacggaaaagaaggaataaaagaacgggctgcgcgggcacttgcagacgagcttaaaaatttcataaaatttcattatcatttgaaggtgctggtcatcggccttggaaatgaaaaggtaactcccgatgcgcttggaccttatgcggtgtccaagatgaaaattacgaggcatctttttctcatgtatgagtgcgacggagatccggaaatggccaacgtcagcagttttattcccggcgttatgggcacaacaggtatagaaacggcagacctgataaaaaaagcggttgaagtagtagatccagaggttgttatcatagtagattcacttgcggcacgcgacataagccgcgtcaataccacagtgcagataaacgatacgggcataaatcccggaagcggtatgggaaacagcagaagagaaataagcgaggctactgtgggaaagagagtaatttcaatcggtgtacctaccgtaatcgacgccaatacactcgtgctcgatgcgctttcaggatttaatgaagccgaggataaaattgaagattatatagcgcagaatccgcaggagctcgtggtgacatcgactgatatagaccttgtgataaaagatttctcggatattatagcaaacggtgttaatataacactgcaccccggcatatatatttaagagtatatctccgaaacggggatgaagggggaaaaagatgagaaataaacgagttgctaagattgctgcttttgcgtacttgcttgctgtgttttttagtaccgtcgctatggcggacggagaaaatcttcagatttcggaaggtgaacttggcatgatgtgcgtggctacggcatatccggcagtgagcagaggaaacagagatatgacaaatgcaggcgatgaagcgcagaatgatgaaaatgcaggtatcaacggtattactgatccgaatgccgtgaacatagtattaggacaggcaggagcaaagggagatgacgctgcacagacggaaagtgatacaaatgacgacggcagtatgggaacggtagtatcgcctccggctcttcccgcggcaggaaacgggcagccgctggtaataatatatcatacgcatgcgacggaagcatatcagccgatatcgacagggaattttagaacgacggaagttgagggctcagtgcgggatgttggaaatgtgctggcagaagaactcgaaaagctcggaattggtgtggtgcacgatacgacgcttcatgacgcagaatcgtacaacaaatcttacagccgttcgctggaaacggcgaattatctcatatcacagtatccgtcggcaatatttgtgatagacctgcacagggatgctgcggcatatacaggcggtgcagccaagaccgttacgatagatggaaaaactgtggcgtcatacgcgcttgttgtgggtgagggaaatccgaatgcgagcgcgctcaaagcctttgctaatgccgtaaacgataaagcggaagagatgtatccgggatttggtggtcgtataataagcaagtcttacaaatataatcagtatgtgtccgattatcatctcctgcttgaaatcggcaacaatgagaacaatataaaagaaacaaggctcacagccaaatattttgcgcatgtgctcgcaagcgttatcgaagatactttataaatgatgataaggataaagctatgcataggcgggcagtgcggatgttatataaatctataagatatatacatagctgttaaaggagaattacaaatgataagaaaacagatagccgtattttttgtgacactgatgcttgtgctcggcttagtgcaggtggacagagtgtgctcacgcatatatgcgcaggaaagcatgagtgatgaggtgacagcgtacattactgatataattaagcgcgaaattgtgcagtatttacgctcttgaacggattttcattctgtgatattataatagtacacgcacagcaagctgtgctgttttataatgttattattgagaggaaaatatgaactcatatcaggataaaatcaggaatttcagcatcatagcgcatatagatcacggcaagtcgacgcttgcggacaggataatagaaaagacaggtcttgtggcggaaagaaatatgaaggagcagtttcttgacaatatggatctcgagcgcgagaggggcatcacgataaagctgcagacaacgagactcgtatataaagcgaaagatggggaggaatatatcttcaatctcatagatactccgggacatgttgattttacatacgaggtatcgcgaagtcttgctgcgtgcgaaggagcggttttgatagtggatgcgacgcagggagttgaggcgcagacgcttgccaatgtataccttgcactcgatgaaaatctcgagatacttcctgtattaaacaagatagaccttgcgagtgcaagaccggatgaagttaagcttgaaattgaggatattatcggcatagatgcgagtcaagcgcctcttatatcggcgaaggaaggaataggcatcgaagatgtgctcgaggacatagtgaaaaatgtgcctgcgccaaagggtgatgctgacggaaagcttaaagcgctcattttcgattcttattacgacagctataaaggcgtagtaatctacggccgtatcttcgacggtaaggttaaaaagggtgacatcatacgcctcatgaatgcaggaaaaaaatatgaagtgacagaagtgggctattatgctcccggacctgtgccgacgggtgaattaaaggctggtgaggtaggttatatctgtgcgtcaatcaaacaggtgcgggacgcaaaagtaggcgatacgattacacttgacagcgatcctgccgatgcgccgtgcgctggttataaaaatccgcagtcaatggtatactgtggtatctatccggcggagggcgagaagtatgaaacagtaaaagatgcgcttgaaaagctgcaggtaaacgacgcggcatttcatttcgagcctgagacgtcgacagcgcttggcttcggctttcgctgcggttttctcggtctgcttcatatggaaattatagtagaaagacttgaacgcgaatttgacctcggtgtagtcacgacatcaccaagcgtaatatataaagtagtgatgaacgatgggactgtgaggatgattcaaaatcctacaaacctgccgaatataatggagatagatcacatcgaagagcctatcgtcaaggctgatattatgataccgaaagagtatgtcggcagcataatggagctgtgccaggacaggcgaggcaagatgattcatatggaatatattacggagacgcgcgtacagcttcactatgaaatacctttaaacgaagtaatttacgacttttttgacgcgcttaaatcaaagacgcgcggctacggttcgctcgattacgagtttataagatacgaaaaatcaaatgttgtaaaactcgatgtgctccttaacaaagagcttgtagatgcgttttctatgatagtacacgaatccaaagctgttgcaagaggacgcttcgtatgcgaaaagcttaaggaaataataccgatgcaccagtttgaggtgccgattcaggcggctattggtcagaaagtcatcgcacgcgagacggtaaaggcatacagaaaagatgtaatagccaagtgctacggcggtgatatttcgaggaagaagaagctgctcgaaaagcagaaagagggcaaaaaacgtatgcgccagtttggtacagtggaagtgccgcaggaggcgtttacagccgtgcttaaatacgacgataacaaatagataacggggagatgctgttaacacgtaaattacttaagcgaaaaaatgtgaggtaaaaaacttgaagaaactcggaatttacattcatataccgttttgtgtgcgcaaatgcaaatattgtgattttttgtcgtttgacagcttaaaagaagacgtaaaagggcgttatataaacgcccttttttcggagataaaaatgcaagggaaacgttttcaaggctacgaggcggataccatctttattggcggaggtacgccgactgtggtacaggctgagtatatcgcggaaatcgtaaaatgtgtaaaagagaatttccgcttagcggatgctgtcgaaattacaatcgagtctaatccaggaactgtgacatcggaaatgcttggaatttatagaaaatctggcataaacaggctgagcataggtgttcagtctctcgacgataaagtgctgtctgcacttggacgtattcacacagcggaagagttcagaaatacatattttgcggccaggcacgctggatttaataacataaacatagacctgatgtttgctgtgcctcttcagaccgaggaaatatgggaaaaaacactgaaagaggcaattcagcttaagcctgagcatatatctttttacagcctgcagcttgaggagggtacggaattttacagaatgtataaagaaggaaggcttactctcgcagacgacgataccgacaggcgtatgtatcatactgctgttaaaatgctgaaagaggcgggatatcatcactacgagatatcaaacgcggcaaaaccgggctttgaaagccgtcacaatatgaaatactggcagtttgacgagtatatcggcctcggtcttggcgcctcatcgtttaccggcggcaagcgtttcgcaaacacgagcattatggacgagtatcttgcattttacgagggtatgggaacgggagtttgcccaaattttgatgctttatgtaaaaacgccgaccctgtatcagggcagataattttgccgcaggatacggcagaaaaaaataccgaggccgatagcatatttgaatacatatttacaggactgaggctgacatccggtatagatcttgcgcgtttcaaaagcatttttggcaaaaatcttcaagattattatcccgataaggcggcgtatataaagcagatgattgcaagcggatttatgttctgcgaaagcggctttcttgggcttactctttccggcatagacatctcaaacggaattatgtcggagttttctgagccttatattactgactgaaagattattatttcttcgcctattttaagaatgttctgccacggcagttttatatagtcgctgtttttcctaaagcgtgaaggcgcgccttcaaaatcggggacaagcagcgcttttatttctcctgtgttctcatcgaagagcatttcggcatcccaaagctgtccgtgcttgctgccatcctttatatctattatttctttgtctcctatctcactgagtctcattttcaatctcctttattcgcaaaatttttcttattatttaataaataatgctaaaaatgcagataatatgacggaaaaacagagaaaggcggacaaatatatgaatatgccggtaaaaaatcaaaacgaaaacggaaatcaaaatcaaaacgaagactttacgtcgagtctgataaaagaactgggtttgctttcgctcggcaacgagtttaaaagcgatctgcaatatataagtataataggcagcatagagggtcacaatgtgcttccggcagagaataagacgacaaaatacgagcatctaataccacagcttattgcggttgaggaaaatgcggagataaaggggctgcttactgtactcaatactgtgggcggcgatgtagaagccgggcttgcgcttgctgagctcatagcaacgatttcaaaaccgacggtttcacttgttcttggcggaggacacagtatagggattccgctctcagcggcgagtgattattcttttataagtgaaacggcgacgatgacacttcatccgatcaggactaatggattgataattacggcagagccaacttttgaatatttgagaaagacgcaggatcgaattgttgatttcatagtttcgcattcaaaagcgaagcgcgaagagatcgtgaagagaatgaactgcaccgataatatggcaaatgatgttggcacagttcttttcggacgcgaagctgtagaacttggaataatagatgaagtaggaggtctttcaaatgctcttaaaaaattgagggaaatgattgctttacaaaatatggaaaataatatacaataatactaatataaatattagtattggaggatgaatatggaaattatttctctcggtattttgttgaaagacagagaatatgctgaagctttagcgagagcaatcgccgcgagtgaaaggtattttttacctatggtcctcgacagggaccaattacataattttgacgaaaaagaaaaagtaataataattactgactataatgacttggaaatggaaaatgctgtttatatctgcagctttatgcttccgagaactatagtaaacgcagcagcagaaaaatgcagcagtatttacggcataagacctcatagtttttcattgccgcgcctttctgatgaaaagtacgcaaaactgatagcggtgacgagtgcagccggcggcgtgggcataacatcgacagcggatgcactcgcagcagaatttacagtatactacgacaaatcggtttgccgcctgtcgctttccgcatttcccgagggcaattcttacagtgcgcgggagctaaggcggtttctttttatgctgtgcaatagcgaggaggcggacataggagaatattttgaaaaagacgcaggcggtgtttatagagcctgcacaggaaacggcataaacccgcttttagcagcggaaggcgaggaaatttacaaacttaccgctgcggttgcagagcagggcggttttgatgttattatatttgatattcctcctgaggccttaaaaaaagcggagaaaattatcattgcatcggaaagtgtaattgcggtggaaagagagcatactctggcggtaagaggcgaaaggcttcaaagctatcttgagcttctccttggaaaagatgccgaaaagcgggtgattcgatttgtgaatttcgcttctgcggaatatgcgggagattttgctgctgcggaatatgattccgaatccttttgtaaagatggtgttaaaattgacggagagttcggtcttgcggttaaaaatattgcgcacagtcttatattctgctaaaatataaatgtaaatattttagaatatttaataaaatgcgtatcacaatcagcaatatgtatgcaacaaaaggagaaaacatatgaattcgggaatcgtacagatgattgtaactctgctcggtgggcttgtcatatttatttacggtatgaatcttatgagcgacggtctgcagaaggccgcaggggaaaagatgaagaatattttggcattgcttactaaaaacccagttgtaggagtgcttgccggagggcttacaacggctgtactgcagtcaagttcggctacaaccgtaatggcgataggctttgtaagcgcaggtctaatgacacttcctcaggctataagcattatacttggagctaacataggtactacgattaccgctcagctcattgcttttcaaatcggagattatgcctggacattcgtagtgataggatttataatgtatttctttataaaaaaagagaatatagtaaatataggacagacaattttcggctttggaatgctgtttatcggtataaatataatgggtaatacgatggaaccgctcgcggcagctccggaatttgcgaatataatgatgagcgtaaaagacatcccggtgctcggagtagtcataggagccgtgagtacggcggtagtgcagagcagttcggcagtaatcgcagtaatacaaaatcttgcttctaaggcgggcccggacggtgttacgagtgtaatagggctttcaggggcgctgcctattctttacggaagcaacataggtactactattacggcgatttttgcttcgataggcggcacggtaaacgctaagcgggcggcagctgcacacacgatattcaatattgtcggttctgttatctttatgttctttataacacctttttcaaagtttattcagtatatatcaccttcaggcgcggagcttgctgtaatatcaagacagatagcaaacgctcatatgttttttaatataatcaatacagttatatggctgccgtttatatggctcttagtaaaaattgttactaaaatgattcctgaaaaagaatcggagaaacttccgtctgagcctgtatatctcgattacaatatgataggacagcctgtatttgcgatgcatcttgcgtgcaatgagcttacgcgggttgcgaattatacgctggaaatggtagcggacgcgaaaaaggcatttatagacggaagcgaagatgcgattgcaaggcttatgcagtcggaggaaattgtaaacgagcttcagggtgcgaccgtacagtatctttcttcgatgtttgcagatgaagcgcttacggaaagacagtctaaggagcttgcggggctgttacatatagcggccgacatagagcatataggagatcattgtgtaaatatagctgaatttgctgatgataagctgaaaaaaggctatgaattctcggattcggcatatgcggagctgtttgaaagcttcgatcaggtgacaatgatgcttaaggatacgataaaaacatttgaaacgcgagatacaaatctggcagaagatgtgctcgctcaggaggatgctgtaaatgaaaacgaggaacgtctcagaatgacgcatatgaagcgtttggaaacaggcaagtgttcacctgaatttacggtaatatatacagatattatccataatatagaaaagataggagatagctgtactaatatagcccgcattatcgtttcggattttgagcataagggcgaaaaggcaagttaaacaagtagatatttctttgaaaataaggcaggaggttattatttggcacatattgatccttttattttagatctggcgctggtgcttgtaacagcgggcatagcaactataatttttagaaagataaaacaacccgtagtactcgggtatattgttgcgggcttccttgtaagccccaattttttacttcttccgacggtgagcgatatagcaaatatagaagtgtgggcgagtattggtataatatttctaatgtttgcgcttggcctcgagtttagttttcataatatagcaaaagtgggcggaggagcaataataacggcgctcgttgtaatgggctcgatgacagtagtaggctatggtcttggctcgcttttgggctggggtaagatggacagcatttttctcggatgtatgcttgctatctcatcgacaatgataatattgaaagcctatgaagagctcggcatcaaatcagagcctttcgcgcagcttacgctcggcgcgctcgtaatagaagatatagtgggcatttttatgctgataatacttactgcgatttcggcaagtaaagaggtatcaggtatcgagcttgtcggtgaaataggaatgatgcttcttgtgcttataataattctctgtgtcggcatatacatagtgccgactctgctcaacaaagttaaagatacggtaaacgatgagatactcatgatagcttcaataggattttgtcttttgatggttgtaataagtataaaggcgggcttttcggaagctctgggagcgtttcttgcggggtcaattcttgccggcacatcgtttggtgaaagaatagagcatcttgtaaagccgctgaaagacctttttggcgcgatattcttcgtatctgtaggaatgctgatagagccgactatgcttgtaaaatacgcattccctatacttataattacgattgtgacaattgtcggtcaaatgacattttcgttcattggagcgcttgcttccggccagccttttgaaagagcggtgagaataggattttcgatggtacaggtcggagaattttcgtttattatagcttcgcttggcacctcgcttggcgtaacgggagattttctctatccgataatcgtatgcgtatccgttatcactacgttcacgacgcctatatttataaaaaacggggaaaaagcagccaagaaactgtatctcaaacttcctaacaagctcagagtattccttttgaactatacttctgataaacaggacgaggtggaaaaggataacgattgggcaaagtatatgaagaagtattttataaagctgctgctcggtacggcaatacttctcggaatttatcttttaagcgtcaactatgtgcatccatatcttacggatttgatggtgagcggaacggctgctaatgtactgacgctcgtagtaggtctcataatgatgacgcctgtaataaatatgatatgcacgaagaaaagtatgctgttcaataaaatatggcttaagagcaaggcaaatatactgccgctgctcacattgcgcgcaatttcggtgagcgtttcctcactgttcataataatgatgatggaaaaattgcttctgataccactcatatttgaagttatcgtggcgattgcagtggtgctgttttcagtaaaatcaggacttgtacgcggacgctcggcgcagctgcagacaacattccttgctaatttcaatcagaaaatactcaataatgctaaagcggcgagcggcggcgatagtgcgatttgggtagacgaaatactttatgtatgcagattcaggctcacaaagatatataagcgcaagaagattaaagattttgtagctagtcgcgtgtttggtgttatgcttatacagatagtgcataaagacggcaggcttgtactcataccgagagcgaacgataagacagaagagggcgatatcatatatgcaatgggtacgcgagagcagatagacgcatatatgatgtttctcgagaagacagactatgcggaaatcgagaacaatagagtaacgacgctgaaagaatttcttgctattcagaaatcgcagggaatacttcctgataatatgcttctctgtgcagcgataccgattgacagggacagtgaatttgcgagaaagtctatcgaggacagcggttttacggaaaattacgaaggaataatactcggtgtggagcgaaatctgctgcctgttgtaagtccgaataaggattttgtgattcttgaaaacgatattatgtggacacttggagcgcagaatatgcttgatgcaatggtaagagcgggacttctcgaagagtaaaaataaagaagattatccaaattaaaaaataacctacataaaattacaaaaaacagttgcattttaaatgcagctgttttattatatagataaatggaaaataaaggaataaaataaaatgaatacaattatatcaataaataaacaaaaagagctgagacgcagcataacgagcgcggtgcgaaaggccataaacgaatatgaaggtgctgtaagcgatgaaaaagcgagagggattatcaccaatattcttcttgcagatgtaagagcgggtgtgctatcgctgcgagagctgaggcagatagctgacagcattttttatactgtaaggtgtgaacttggtgtgcttactccgttgatggaggataatgaaattacggaaatcatggtaaacggcgccggcagtatatatgtcgaacgaggaggccatatggaaaatagttctcttacatttgactctgctgaagagcttgaagaagtgatacggagaatagctgcgggtgtgcatagagaaataaatgaaatgataccgatactcgatgcaaggctggaaaacggagacagggtgaacgctgtatataaaaatgtggcgctcggcgggccatcgctttcgataagaaagtttccgaaaacggcgcttactatggaaagactgatagaattcggcagcattacgcaggaagcggcagaatttctcaaaaaagtggtggcggcgggctataattgttttataagcggcggcacatcgtctggaaaaacgacatttctcaacatactttctgaatatatacctaaggaagaaaggattgtagttatcgaggattcggcagagctcaagcttatcggtgcggagaatatagtgcggctcgaatgccgcagcgctaacgtccacggcaaaggtgaggtgaatatggaatcgctcataagaacaagccttagaatgagaccggatcgcatcatcattggtgaagttagaggaggtgaatgcgcagagatgcttcaggctatgaataccgggcactcgggaatgtcaacaggacacgccaattctatagaaggaatgctgaggcggctggaagctatgtatttgcaaaaggcagcttttccgatagaagctataagggagcagattgcccagggaatagatataatcgtacaccttgggcgaattgcccaaaaaggaagaaaagtacttgaaatagctgaaatacaggggttaaataataataaatttatcattaatagcatatttaactataaatttgatcaaggtctgatagctacaggcaataaaatagtaaacacagataaacttaaatttgcgggaattgaaatatgaaaacgattgattatgacatttataaattatcaaagaaagagaaaacggaatatttgatttcagtaacaatactgtcatcggtacttctttatcttttttacaatactacgcttgtggtactgccggctatactttgtgcctgccttacagaggaatattatgcggcatacaaggcaaaaaaacggcgcgatgttcttatagagcagttcagagacctgctctattcgctttcagatgcggttgctgcgggcaggcatatgacggaagcgcttaaagatgcgcgcagtgatcttctgctcatatatgatgaaaacacgccgatgacaaaagaattagaaataatgaaaaagagaattgaagatgcaaatgaaagcgcggaagaactgcttctcgatctcggcagcagaagcagggtgcgcgatataacagcgtttgctgaagtttgccgtatttgcagcaatacgggcggtgatatcgtcagggttataggtataacgagccaaatgatgcttgataagcttacgattgtgagagatatagagagctatacggcgcagaaaaagtttgaaggaaagatcatagcacttttgccgcctctgataatactgtttctgaaattaacagccccggactacctgcttcctatgtatgaaagtatggcgggcagaattataatgacagcggcgcttttattgatgatatgcggatacatagcagcacagaagataacagatatagggatgtggaacgatgaaaatgataaaggaatatttaagaaaaaccaaattaaaaaaggaaaaagagattgaaaggcgaaacgtagcagatgaactacccgattttacgaacagacttgtacttcttttaaacgcgggactcgtgctgacatctgcagcggctaaaatcacggaagaggaagaaagagactgctatttttataaagaactaagaaatataaacgaaagagttaggaatgtaaacagctcgtttattacagaatttcgtgaattcgccaaacggagcggagtgcgagagcttctgcgcctttcaaatattatggcagataatataaataaaggctctgaacttgtaaacaagctcgagcaagaggcaaattttatgtggcatatgaataaaaaacaggtggaggagcgcggcagaattgcggaaagcaagcttacttttccaatggcgcttatgctcatagcactgctcgtgattacagcggcaccggcatttatgtcgtttaaatagataaaatagagagcagaaaacgaaaggggaaaattatgaaaaagagattaattaatgtcagaagtaaaaaaggaatggagctcgtgcaggtggctatactcataggtattgcagttgcggttggactcatattcagaatgcagattactgattttgtaaacgccgtgtttacaacgcttgcggatggtaaattcacttcttagatcgcttatggatacgctttgcaaatcagaaattagtgcgggtcgtataaaaagccgccgcggcagcacgatgatagaagcagcagtcgtgtttccgataatagttttatccgtgcttacagtaatatatatactgcttacaatgtatagtcaggcagtgtcttccgcaaaactgcatctggcactctgcgaggctgcggcagatgaaagtgaatgtacactatacggggagaattacggcgagcttataagcatcggaacaggaaataaaactgtttcggatatgttttcaaagacaattataaatattggagaaaaaagcggccttatagaaaagaaaatcacagcagaagctaaatacacggcacgggcaaaaggacttatcgaaaaagcagtggcaaaaaatttgcaggatgaaatatatataattgatgaggaagaatacataagatgggcagatactttagaaaaaacaataaaaaaggcagttcaatgatatttttgtcgatgatacttgcgggacttattggacttgctgtgcttcttgctgtgtcggcgagagaaaaagcaggtctcagctacaggcgtaccgtcaccgatattgcgtgccgctcggtgctttcagaatacgattttaggctcaaagatgagtacggaattttcgcgtttagaggaggaaataaatatgtcgaagataaaatagcgtattatctcgaatatgcagacgataaaagtgatattatgttttccgcactcccagaaaagcttgaatgcgacgtcaaaggatttgaaataacggatacggataattttgagaaacagataattgccgcggctaagcacgatgctttaagacttgataaagtaggttttaatgcggaaatgatagcagatattgcgaaacgtgagaaagcagaacttgacagcgctgctgtgatatgcggtttgccgtcttacgggtttacaggaaagtcgcttgacctcgattttcctgatttgactgaagatggactcaaaggtcttatcgtgcagacgggggatacgtttatgacaaataaatatgcgttttccgtatttaactgcaggacaaaacatattgaaaatcacgattcttattttaattttgaaatagaatacctgatatgcggttatttctcagatgcagagaatctcgataaaataaaagactatcttgtaattcttcgaactcctataaatattgctaagatatatgcagacagcgaacgctccgcgctcgcgcttgctgaagcagaagcgattgccccgggacccggagcaatcgcaatgcagcttgtgataataacggagtgggcagtcgaggattcaaagaaagatgccaataaacttatgaatggagaaaaagttgacggattagcttacgaagattaccttgctatatttctttcacttcaggacagagaaacgaagctgctgcggatgatggatcttgtgcagataaatatgagaaaaaactattataacggatttttgctgagtgagcattcgtgcggtttttatctttttactgagcatcatggaaaggagcttacatatgtacacacatattaaaaaaggctttgtgacggttgaagcgtcaattgtgataccgcttgttataatagcagtgctgacagtaggaagcgtgatgaaactcgcatacttagaggaacgtatagcatttatctcgggaaacgaacttaaaagacttgcgcaggatgcatacagcaaaccggcaaggccgtttttcccgcttgaattcaggagtactatgaatgaaaggatgcctgaacttactgattttcaagtagcagattttaaatacaaatataaagataaagaaagcggcggtatatatatggacaaccttatatgtatggagatatcgtttgcggttaataccgggcttccgggaaatatgggaaaagtgcacagtgcaagagaagcttttttgcttagggcgttctgcggtaaagataattcgcatgatttgggcatttatgatgaatcaggcattgattatgagccagtatatcttttgcctgaatatggggtgaagtatcatgcggaaagctgtacttatgtaaattcgtatccgcttaagtctgttatgacgagcgctgtcaaaagaaaatataaagcgtgcagcatttgcaaatcaaagaatgcggcgcgaggcagtacagtttactgttttaaatacggagactcgtatcatacggcatcttgcagcactgtcacaaagtatacggtatgtatggatcgccgcgacgcagagatgagagggtatacaaaatgttctaaatgcgggggaataaaatgaacaaatttaatttagatatgccgaaaggcaggataaaagaatatgagaaaaacgcgatacttttaagcagtcccgattttcttattcctatgaaatttacagattatggagataaatacaggatcacttatgattacggcggatttatacccttaagcgatatgaacggctgtcttacggtaagagatattttcgattgcatcgaggaggttataggaattctcaggattgcatcggtttttatgttgtttcctgaacgatttcagctcagaaaagagactatatatatgaaccgcaaagagagaaaagtgaagattatgtttataccgcctgacggaaactctgatccgaaggaagaacttttgcaatttataggtgatatccagaatatgtatatcactaaagctgcggcagagtacagcgagatgttcaaagaatacgtaaataacaactgcactctttcggagctgcaaaacagagcggtgatgatgaaaagagatgcctttatatgcggaataagctgatgaaagcttgatataggggagtaaaaatgataaaatttgagagagcaaagcacaaaatacggaaaaaagaggtggcaatgtgaataaatatgctgacattcatatagataatgtgaagctttccgaagatgagaaggcagttgtaataatagaccagagtaagcttcctggagaaaccgtatatcttacgcttaagagcaatacggagctttgggatgcaatttacacgcttaaggtgcgcggtgcaccggccataggaatctttgcagcttacgcaatgtatgtgcttgcggcagcttctcttaaagatacagggaataattttgaagagttttat

SEQ ID NO: 2169 - DNA, 11435 bp, Unknown
  16S sequences of unknown bacteria
tgttcaggcgggatggcttctggactggaatgtatgaatatgcacaaatccgagaaaataccccgcggatgctgaaaacaacagctttattatacatgatttttgcacgtttgtcaccataaatttttggcggtgcaattttgccgcaaaaagggggctatgctgtcttctgcagcgaaaaacaaagggatcggagaaaatatttttgcgggaatggaaaacccccttgtcagagccgggaatttgtggcataatgaatgcgcttatttttgcagcggcattggaatggttccagccgggatggctgctgaagaaagtgcggtaaaaccgataattcattgtgctgcagggggtttctggtttttggaaaagtcctcaaaagcataaaacgctcatgggatggacacagtttttcgaaaaaagagaatagcaggttgtgaatcgggcgaccgattttcaatacatggaggtgtacccaagtggttgaagggtccggattcgaaatccggtaggtcggttttgccggcgcaagagttcgaatctcttcacctccgccaagcaagaagccagatgagttctcctcatctggcttcttggcttttgcttttgcactttcttacaaataggacagtatatgaatacgggtgaaggattcatattgcaaacgatccggattgtatgacagtccccgttgcgttaccggatgttcaaaatacaaagaatggcctaatcagtctttctcatggcactgtacaaaatttatcggctcgattgacaggcattcaccctgcgtcatgttcgctgtatctgcatatgggaggcaagcgtcctgctgtccaatccggcctgttccgtttggctttggtcaggcggacaacatcgcttgcaaaacgcccgcctggggaaggcgggcgtttttacgtgagagccttttagccttcggatgcctctgcatccgaagagggcgagagaattgccggtcggcgcggaatgcatcttttcagcaggggggatgcctgcggccgggaagatctgcggaagaacagcaggaggggcgttggatttgagtgcaggtttgtgcttcattatccatagggttcagttccggggtcgcagaggtgacggaggcatggttgacaatgggactgcaggcgccggcgcggactgtgccggacagcaggaaagaaaccgattggccaggctgcagggacgcccaggtaaagtagccgggccaaggctgccagcattttccgcagtccagtgaaaaagcggggcaagaaagctctgggggcagaggatcggataccatgatctgctgcgcctcatttggcccgaggttggtaacggttaaagcgtaaatcaaaggccggcagggctgtgcgcactgcggtgcgcatttatccagacgcagatcggtgccctctgcaatggccaaatcgctggtggaacagttgttggttcgatctggatccggggtagggctggaaacctcggcggtgttggtcagcgtcccttgggctgaatcggacagttcgccccgcagcagcagagactggctgctgccgccggacagatcgcctaacggtgcggtgccgtcccaggggatccaggtgctgccgctgtccaaggaaaattccacaccggacagttccgggggcgtcgtatcgctcagcagcacatcccgggcggtattggggccggcgttggtgatcaggatggtgtaagttaccaactggccgggcagaacggggccgtcagggccggtttttaccacagacaggtcggcagaaaagaccaccggtgtttcttgcgtatcggtgttgtttgcagggttcgggtcgggggtgtcgctggaaataacggcggtatttaccagagaacccgcagcctgcggagcagccactgcccggattaaatgggtttgcgacagcccggcggccagcgtacccagagccagagcaccgttccagggcgtccaggtgagtccgccatcggccgagtgctccgcgttggacagcccggcggggagccgatcggtaagaatcacattttgcgcatctgcaggcccggcgttgaccgccagcagggtataggtaagcagatcccccggcgatacggaggcggggcttccggttttaaccaaagacaggtctgcggagggctgaacgggcgtttgatccgtgtcggcattgttggacggatccggatccggggtgctggaggataccacagcggtattgcgcaggatgtcggtggccgagggactcaggatgccctgcagcagcagtgtctgctcctggccgggagaaacaacgcccgcggaatacggattgctccagggattccagctctggccgttgtctgtggagaactggggattcagcagcacgctgggtacagcgtcgctcagcagcacttcctggctgtcggaggggccggtgttgcggatctgaatggaatactgaaagagctggccgggaatggcgggggaagaggctccctgcttcacaacggacagatcggctgagggcgccacatccaccacggcgcggtcagtgttgttgtccgggttcggatccggggtgctggaagagacagaggcagtgttggtcagtgtgcctgctggtgtggaaggggacaccgtgccgcgaatggtgagaacgatggaggccccgctcggcaacgtccgggccggatagggggaaacccaaggagaaaaaggaccgccattcacggagaactctgtccccagcagtgccgcgggcaggtcgtcgcgcaccaggacatcctgggcggcggacggaccggcgttggaaacggtgatggtataggtcagcagttcgccagctgttacaaggggcggcagggcggttttggtcagggaaagatcagcggcggtatccaccgggatccgggcggtatcgctgttgttgtccggatccgggtccggtgtaagcgaggatacggaagctgtgttttccagaatgccttcggcgtctgaatgaacggttccccgcaggaggatcgaaaggttctgccctgtggccagagtgcccagagataggctgccgggccagggggcccagctcccacctccgtccagggaatactctgtccccagcagcgcactcggcagtgtgtcgtccagcctggcatccaccgctggatctggtcccaggttccgaatggttacggtatacgtcagcagctgaccgtggaggaccgggcttggcgtgccggttttggtcagggccaagtcagcggcggtattgaccggggtgcgttcggtgaaagagttgttgtccgggttcggatcgggtgtatcactggaaatggtggctgtgttgcgcagcgtacctgtggccgccggatccactgtgccccgcaggaatactgtccgggcggaaccggcggggaacgtgcccagtgccaggattcccgtccagggctggaacgtgaccccgtccaaggaatagctcccgccggagagcatatcaggaagcgggtcggacaggacggtgttctgcgcatcggacgggccaagattggacagctccaccgtgtaggtgagcacgcctcctgccgataccgggctgggagaaccagttttggtaacagacagatcggcggactgttcaatgggaatagcctcgctggaagtgttgttgccggggtccggatccggtgtgtcgctggtgacggcggcggtgttttggatcactgctgcggccgaggcgggaaccgtaccgcgaagaaggattactctggcttcaccggggagcagggtgccgagggggagggaaggcgtccagggctgccagctgctcccattgtccagtgaccattccagattgtttaaaagcggaggctgcggatcttccagcaccacgtttacagcgctggaagggccggcattggccgccgccagggtatacgtcaccagctcgccggggcgggcgggtttgggcgcgccggttttaaccagcgacaggtcggcttcctccccaatggggacgtcgacggtgtccgtattgttggacaggtccggatcataggtagaggaggatactgaggcggtattggaaatggagccggtggcggaggggtccaccatgccccggagcagcacagtgacactggccccggctgggatgtcgcccagcggctgcgaaccggtccaaggctgccaggtggcgccgctgttgagggagtattccggaacgagaagctgcgccggcactgcatcgatgagcacggcgtcccgggcggtatccggaccgttgttgacattttggatgaaataggtcaggggctgtcctgcagtggccggtactggctctgcggttttggataccagtaagtcggcggtaggcagcaccacagaacggggacaaatcgccccgtcgttgaaggaggcaaaaaacgtagtggaaaagggaacgcccgcggcggtattgccgctgtgggtatagcggtagaccgttccgtcattgttggcaatggcgtagagcgtgcctgtgctgtcgatgaccactgcgccgaaggaggcattggggttgggagcggtggtggaaagggacgtaacctgtccggtggtgggggcgacgcgggtcagaacgccgtcgcgctgcacgccatacaaattgccgtcggatgggtcgtaggcccagtcgctgatattgaccgcggcggacaggggcgtgccgtagttggcggtctgttcggcataacctgcccgcggatccaccagtttcaaaaaggtgggggacgaagggcgcagatccacggtgtagaagcgtgcggtgttgttgatatagagatagaaaaagccggcggcgtcaaaagtaccggtattgtatccggccgcgggtaatccggcgggccgggtcagctgggtgatcacagagtttccgtcaatacggaccagagtgttggtagtctggtcgtaaccatagagggaatcatccagcgggctgtatccgatggcgtttacatcgtgagccggggacagaaggccgtgcagtgtggattggccgctgaccagatcgatatcataccaactggtggggcggctgacaaactggatcatttgagtggtgcagggcaggggagcatccactgcgtcatgcccgaaattttgcccggcaaggacctcgttgcgttcgatttgggcggcagtgaccgtggtggtccatgtgcgggggttgttggagtgagcatagcctgccggttgagcaaccacagtaggcgggcaggcgttgggcgggagcgcggtttcgcagactgtataggcgcctggcgcggtgacggaaaagccatagctgccattggagtcggattgggtggcagagcagctgccggaaggcgtatataacagaacaaatacgccggggatgccgggttctcccacgtcatactgcccgttttgatttcggtcgtcatagacgatcccgttaatgatggctggcataacagatatccccttcctggaattggcggtataaaaataggtgtataccgccaatccatagtatgttttcggcggtgaaaaggagagtgccggacgggagccgcctgccgctgaaacgggcgctttctgcccttttgccgtgggatcggccgaatacattgcacagcaggcatttcggcttgaaaaagtcgaaaaatgtgatatgataaaaacaagcgtgtggcaagattatgtgcctgtgtttcgcaggcgttgacgaaaatgccggggagatttgcttccttgtatcattttcctgcataaaacagcagaaaacaatgagggctggtgtgctcgcgtaatgagttgccacacgcttttacccgaagaaagggggacgcaggatgtccttttttcaacatattgaaacgcgaaatgagttggccgactttttagggattccccggaagaagctgactcatcttttgtatgtgcaaaggatcgaaaactgttatcatatgtttgaagttcccaaacgggctggcggcacaagggtgatttgcgcgcctacaggcgacttgaaaagcctgcaacgatctttggcccgaaggctgcaggagcactgcctgcggtgccgggaggagcgggggctgtctgtcaatatcgcgcatgcctttcagccgcgcaggggcatcatcaccaatgcctatatccatcgaaacaaacggtatgtattcaataccgacctggaggattttttcggcagtattcatttcggccgtatccgggggcattttcagaaaaacgaacactttcaaatgcctgcagaagtggcaaccattctggcgcagctgtgctgctatcaggggaaactcccccagggggcgcctacgtcgccggttctttccaatctgatctgtgaaatcctggacttccggattctgaaaatcgcaaagcactataaactggattatacccgttatgccgacgacctgaccttttccaccaatgacaaaacgttctgcagccgatatgacgctttttatcagcagctgcagaaagagatccgccgcgcggggtttgtggtcaacgaaaaaaagacccggctggagtaccgggatgcgcggcagactgtaactggcctggtggttaaccggaaattaagcgtcgaccgctgctactgcagagaaaccagagcgatggctcataccctgtacaaaacaggagaataccggatacagggcgctgcgggtacgatggcgcagctggagggacggtttgcctttatcaatcagctggatcggtacgaaaacaaacacagcctttctaaaccaagagattttaagacgctcaacgggcgggagagacaatatcagaaatttttattctaccggtatttttatgccaatacccaccccctgattgtgacagagggaaaaacggatattctgtatctgaaagccgctctgatgaacctgcaccggagatatccggaactggtcgtccggcagccggacggaacgtttgcttttcaggtgcgctttctgcaccggtccaagcggctgcggtacttttttgatctcagcctggacggcgcagatgcaatgaagaatctttatgaactgtataccggcaaaggggcgcactggaagacggcctattatccctatttcctggcgctttccggtaaaaagccgcaatggcctgtcatactggtgtatgacaatgagatcaacgacaaaacgcggccgatcagcaagctacttcattctattgggatgggggaggaggggaaagagcgcctgaaaaaatctttgaaagagcagttggtggcgggagggaatctctatctcgttacacacccgctggctgagggcaaatcggtttccgaaatcgaagatctgtttgctgagagaacgcgcgcggtggtcatcgacggacggggcctctcgctgcgggatgattatgacccccaggtgtcttatggaaaagacgccttctccaaatatgtgctgagccattaccagaccatcgattttgtgcgttttattcccctgttggatcggattcgcgatgccgttgcggaaacgcaggcggcggaacaggagccggagggggtttgagtgcgtatcctgtggcggaatacgtaatattgcaaaagcggcggactttaggaacgccgcttttgttctgcggcgtgtaaggtgggaccgaaatggatacactgaatacaaatgcaccggcactgcgccggcgaaatgggaggcgagacatgagagctttttttcagcgtcacgccgttctgcacatctggctgctctgtgcgctgctgaccgcggcggcctttcacctgagcaagggaaaccggatgctgatgaatgcgctggcggagcatgtgactgggccggtcaaagagactctgggcgcgctgtgcgcggcggtgcctttttctgtggcggaagtgtcactttttgccgcggcagggatcctgctgctctatctgggggctttggtgggagatctgatccgttgccctcggcgcggaagccttctttacacgcgctttttaggactggtgtgcgtaggcgcaacggtttacagtctgttttgcctgctctggggcgtcaattattacaccgatggatttcaggagcgctccggcctgcgggtaaaagaagtgtccatcgaagagctgcaggcgaccacggtctattttgcgcagaagctcaacgaaacgtccgcctcggtgaagcgggacgaggcgggggtgttcgacgctgaccgtaacgcaatttacgacgatgcggtgcagatctaccgcggtgtggagcaggaatatccctttttggcgctgcgggatcaccgccccaagcgcgtctctttttcccggttgatgagccggacaaattttacaggcttttttttcccttttaccggggaagcaaatttgaacgacgacagcccggcctgtctgctcccagccaccatcgcccacgaaatggcccaccagcgcggcattgcttcggaggacgagtgcaatttcctggcagtgctgacctgtgccacaagcggcaacgctgtgtatgagtattccgggtatctgatgggctttgttcatttaagcaacgctttgtatcgttcggacccggcgcgctgggagacggtccacgccgaattgaacgcgcaggtgcgcgcagatctggcggataacaatgcctattgggcacgctttgaaagcgaaacggccgaactttcccaaagcgtttacgacggcgttttgaaaagctacggtgaggaaagcggtatccagagttacggtgaggtagtggatcttctggtggcttattacggtccgcagatatgaaatgcgaaaacaggtgcggccgccggaaacggcggccgcccccgttttttttgatcctgcatcgctggttcaggtatcggcggcgagcgtccagctctggttcgcactctgcagcttcaccatgttggcatagcgcccgcccagttggagcagtgcctggggggagccttcctctgctacgtaaccgtctgccagaacaacaattttgtctgcatcagccactgtgcgcatgcgatgggcaatgatgagcacggttttgttttggatcagccgggacagggcctgctggatcagcgtttcattttccacatccagagaagcagtggcctcgtcgagcagaataatgggagcgtctttcaggaaagcccgggcgatagaaatgcgctggcgctcgccgccggagaggcggcagccattttcgccaatgtcgctgttccattggtccggcagcttttcggcaaattcgtccacattagccaggcgtgccgccgcaagtacttcgtcgtcgtcggcgtctttgcggcccaggcggatgttttccagaatagtggtgttgaacagtgttacgtcctggaacacgatggagtaaaggctcatcagccgctccgggtcgattttggaaatatccatgccgcccacggtgatcttcccccggtcgatatcccagaagcgggctgccaggcgggagacggtggtcttgccgccgccggaggggccaaccaaagctgtcacctggccctgtttggcggtgaaggatacgtcccggagtacggtttccccgccgctgtaggaaaaaccgacatgttcgaaggtaatatcgcagcccagattggtaagcgtatcgcagccttcctgggtgggatggcagagaatttcgttcattcgggcaatattggtgcgggcggagatgatggccgccagattctgcaatgcgccctgcaacggttcatacaggcgggaggccaccagcagaaaggcgaaaaaggtcagtacatccagcgagccgccggagagcagaacagaaccaaccagggcagtggtggcgatgcccagtttcaaaacgagggaggcggagaccacgaatacggcagtacccagctcactgacaatggcccggtgttctacagtatcgattttggtgtatagaccgttcagataggcctcttctgcattgcaggatttcaggtcgcggacagtttcgatgcattcctggatgccgtcggcacaggccatttttgccgccatggattttcggctcagggattcctgtactttggccgacagccacacgatcaggaaagacaccggcagcacccataaagatgccagcgccatccgccagtcgaagaaaaagatgcctgcggctaccaacaaacaggaaagaatggagccggccagttccgggataaaatgagaaaaagccgtttcgagaaaagcgcaatcagccatcaaggtgctggtcagatccgccaaatcttttttcccgaaaaaggacaggggaattttacgcagccgttcggccagcgttacccggcgcacgccgctttccaggtaagtggcaagataagtgctgttgtactggaaccaagtagcggccaggataaacaggatgcaggcgatgcagcccgctgcataccatccggcgcggcccgcaagacttccgttcagcagatcgcgcacgagtaaatagagcaggcacgccgggaacatgaaagacaggttctgtaccgcgcaggcgacgcagcctttgaccaggtcttttgcgccctgccgggagagggcatagtgcttctgcagcgtttcgatcatctcgacacctccactttccactgcacggaggcttgataatctctccacattttggcgaatactccctcctgctccagaagcgcgcggctcgtcccgcactcgacgattgcgccgttttgcaccacaaagatgcagtcggcgttcatcacagtggaaaggcggtgggcgatcatgagcacggttttgtttttggccagcgcatggaacgccgcctgcactttggcttcgttgtctggatcggcgaaagcagtcgcttcgtccagaatgactacgggggaatccttcagcatggcgcgggcgatggccacgcgctgctgttcgccgccggagaggtatacgcccttggtacccagtacggtgtggatgccgttgggaaatttttcaatgatatccatgcactgggccttttgcagcgcttccaagacttgagcttcgctggattccggacgggccaggcgcacgttgtcaagaatggatcctttgatcaggcggctgtcttggaacacataggatactgtgtccatcagcgtttccttgccgatgtcccgcagatctacgccgccgatgcggatcgcgccgctcctgggctcgaagaaccgggcgatcaggttggccagagtgcttttcccgccgccggagggccccaccagagccgccgtctgccccggttcgatgcgcagagagatgtgatgcagcacgtcagtttttccgtcataagagaacgatacgtcatccacttccacgctgccgtctgcgggcattttgggatgggctgcctggggcaggggggcgaggctgagcacgctgtcgatg

SEQ ID NO: 2170 - DNA, 2565 bp, Unknown
  16S sequences of unknown bacteria
gactcggcaaactccgccgtcggctcggctcttttgaaaaactcctcgggagtgctgtgaattattttgcactccttgtcggtttccatccattcctttatgtcggcaaggtcctttctcgaagggccgccgccgtggtttccgacgccccaaaggcacatccatatttctctatcctcgtggccgcccttaactccctggcaatggcctttcgcgcagccgaaataggtgctgttataggttggggaacggaaggcctttattttgcttccgtcaaagccctcccaccagaagaaatcgtcgggaagagcaagctcccagccgaaggggcgaacgcaaatatagctgtcctgaccgcatttttttataatctgaacaagtcctctcgtgtggccgaaggagtcaaaattcagcgcggttgtggggttttcgccgaaattgtccatgaaatatttatgtccgacctgcgcatggcggataaagctttcgcccgagggcatattggcgtcgggctgaagataccagccgccgataacgtgccattttcccgcctttatgagctgctttatcttttcaaaaaggtcgggggcataatcggcaatgtacttataaaggctgacctcattgtggcagaagatataatcgaattggtcggcgagatttgccgcgctttggaatgtggaaacggcggccgacgcgccttcctcccactcccaaagccaaacggggtcaagatgggcttcgcatataagatgcaattccttcatttcgtcacctcagattttaaaaataatataaaaaagccgtacctcagaaaaaggtacagctttttacccgaatcagttgtttattgtatttgcgatttcataaagcttgtattcaaagggcttttccattttaagagcctcgaatatgtcgatgtcaacaagctcgccgtgccgataagccacaacgcggttgccgataccctgagaaagaagatcgactgcggcatagcccatttcgctggcgcagacgcggtcgcggacgctgggcgaaccgccgcgctgaacgtgaccgagaatggtggcgcgggagtcgattccggtgacggcctgaatctgcttggacagcttttcaacaccgccgataccctcggcgacaacgattataaaatgctttttgccggtgtttttggcacggtaaatgcggtcgatgatgtccttttccacatcaaactcaacctcggggacaagtatggtggtagctccgcaggcaatgcccgaatgaagtgcaagataaccggcgcctctgcccatgacctcgacaatggtgcagcgctcgtggctctgtgcggtgtcgcgcagacggtcgaccatttccttacaggtgttgacggcggtgtcaaagccgatggaatactcggtgcttgaaatgtcgttatctatggtgccgggaacgccgacgcagggaattcctctttccgaaaggtctcttgctccgcggtaggttccgtcgccgccgatacagacaatgccgtcgataccgtgctttttgcaggtgttgatggcggtctgcataccctcttcttccttaaatctcgggcttcttgccgtgaaaagcacggttccgccgcgatgaataatgtcggatacgctgcggatattcatatcgaaaacctcgtcctcgataagtccgttatatcctctgtaaattccttttactctcatacccttgctgagagccgttctgacaacggcgcgaacggccgcattcattccgggagcgtctcctccgctcgtcagaactccgatggtcttaacattcatgtaaatgcctcccaaatccctaaaataatacttattccattttatcatctttggctcaaaagtcaagatatttgtcgaatttatcgcatatttatgcattttatttaagcacaaagacgcctttttccccgagaattctgcgcagctcgcaaagcagcggctcgtttaggtcgacaaacaggcttctcggcgccgccacacgcttgccgctgtcctgaaatttaaagtaaacgggggtcgttccgtcgaatatttcaaggaggtttttcaccctgtcgtagacctcaccgccgctttggggaagcagcagatgaagaccgtgatattttgactgcgaaggcgccttttgcctgtttttttcaaagccgcggggattttttgcaaactcctcggcatcgcaaatgctttcgcatataatctgggtttcccgttcctcgcgaagggatattcttccgcccataacaacggtcgagccttcaaaaacaaggtgggaatactcgcgcagcgttttgggaaacacaaggatttccacatttgaggatgtgtcctcaagggtcagatatgccatttggtcgttgtttctcgtggtcttttttctgacctcgctgataactccgaggagctttaccctcttgccgtcgtgatttttttcctgacccgagacaaggttttcgatgtcggtaatgcccgccgattttttgataccctgatatttcaaaacgggatgtcccgatatatatatacccgtagtttcctt

SEQ ID NO: 2171 - DNA, 3981 bp, Unknown
  16S sequences of unknown bacteria
ctcctcgtcaacgtcagcgaaggggagaatgtagttgacaaccggcttcccggcgatcttccagagaatggtcacgacagccccgcggtcggcggcagcctccgggtcaagctctccggagatgctctcaaagcccgcgtaaatggtggtatcgcggtcaagcgttacggtatcaagcttttcggtgagctcagcgtcggcgtaccagccggtgaagagatatccgtccttttcgggagcttcaatctccgagagatcaatcacggttctgttctcataggtgtccgcgctgacaatctcgccgtcagacacgacagtgagcgtcttgcggcggatgagctcggagaggataatgaagaagaagttgtcgtcgtccttgtcctcgtcttcagccgggattacgacgagattgtctatagcgtcaaggatagccttcgcgaacgtgtcgacttttgcctgatcgtccttcgtgagcccgcgctcgacggcgtttatcgcgctcgtgagggcggcgaagctctcggctgtgtacttctcggcgtcggtcggagccttcgctatagcggcgtcaacagcggaatagtcggcgggatcgctgagtgtcgggtcggtgccgacgacccttacgttgtaggtctttttaaccgtgcgggtcggctgagactgatcgtcatgcgggtttgtccagacaatcataccggttatcgtcacgtcaacgctcttttcggagtgggtgacggtgaccgggaactttccgtcggtcagagcgccgatggttatcgcgggattgtcagagatccatgtgataccggaaacgctttcagcgtcaggcttgttctccgggaggtcggctatagtctcgccctcggcgacacggctcgcgattatcacgttgtcaaacgccttgtcaagcgccgcgtcgaccttcgcgaagtcccagtctagctcgacggtgatctctttctcaatgacaactccggatttttcgacctttatgtcaacataaggaacgcgggtgttattgtcctcataatcggtgagcccgtcgtagaaatagaacctgatggttccgtccttcgcgattccggctctgtcaccgaacgtcttcggttcgttggttattgtgaccttgacgccgtcaatgccgttctccgcgaacttcgcgctcatgaaatcgcagaaattcgcgttttcggaatagttcacatgaacggtgttccggtcaagaatattctcaagcgcggctgtgagttttacctgtatatcggcgctgtccgtgctgaacagcgtgagtacaaaatctctgtcaaacgtttcgtcacccgtctttattgtcgcggtgatggtaacgttcttcgttccatccgccggaagaaggatgacatttccatcgttgtcgatgtaatttgtgtcagagctcttataagtgatgctgtatccgtcgcctttggtcgggagaccaagcgcgccggtagatttgacttcgttgttcttcgggagagccttcgaaatcgcttcgagggcgcgaccgagggtattaatctcccagttcgcgtagaaaatgtagctgtccttctctttcgaggcggtgaatctgatctcgtatgtgtctccgactttcacagttttcgttctgctgctgccggagttcgcctcggagcactcccagcttacgagatcataaccgtcctttgtgtatgtgtcgccggggagagtgtacatgatgctctcctcgccgccggatttcaggacaacgtttgtgctgtcgattgttccgtgttccttaaagaacttgagcgtgcgctcgacctcgcggtactgcgcgtagagcgtcgttatctcgtcgaaggacagatcggcgtcgccgtagttcttgccagagccgtcctgcttggtgttccagccgcttaatatcattcctgttttctcaggagtaatggtgatttttccattttcgctgagagtaatcgtctggtcggaaaaatccttaccgccatagtaattactaatataaccgtcattcagattgagcgtgactgacttctcacggctccagtgagcgtagaaagttcttccgtcatcctcaggtttcataagatatccgccggaataactactggtgatctgctcaccgccttccggctcggtgaaccagccgaggaacttatagccgtcacgcgtcgggtagtcaaaactgtaatcacgtctcgcgttatctgatttcgacgcgtcatacacgtaatcatacgtctttccgacaacgagcgagcgcgtctcgctgttcccgttgcagtcgtcaaatgtgacgcttattttctcgcccgcccagacaggctcgacatttacaacgttaccatcatatttcagatagtaactgctcaggcagtcgatcgaatcaccgggcttgcattgacgcctcagtttctgggaatggaggttccagcttttgaactcatacccttctctcgtaaacccgttctccgggaacttggtactccccgcggtctccctcgtgacgacaatatcgtccatgcttccctctccacccgcggcggtgaagcgaagcgttgtcgtgccgtcctccgccgccgaaacgccgagcggaagcgcgcagacgatcatcatgcaggcgatgatccccgccagaattcgtttgaacatctttctgttcttctccttcaattttttatatttgataaaaaggagcgcggatgtcgtttcaagacacccgcactccccaatacccggaaatgcaaaaacagaaaccttacggctggctaagaaatcatccgcaaaaacccgcagacagcaggcaaaacaccggcataacaaaaaatccggtcggacattcatcacagtatgggcaagtcgcgccggattcgaaccggctttccgtttggatctactcagtttacaacctttcaaaccgtgatctctgtaatatttaccggtaaattataccataagtaatacactgaatgcaatgtacaatatgtaaactttttgttttttacccggtcctcaaacagatacccgacccggaatgtcgcattttttcgcattttgtgaaatctgcctatttattcctccgcccggatggggtataatattatcagagaattctatcagaaaggaattaccatgtcatcactttcaagccagaaatggttccgctcgctcttccgccggcgggtgcagataactctgctgttgttttttcagattgttttcatactgtatatcgttatcggcgggtcgaggatatccgatataatcagcgcggggctgaccgcgctcagcttcatcgccgtccttctcgtcgtcaggaagcgcgagaagggcgcgtataagctctcgtgggtgatacttatgctcgcactccctgtcttcggcggactgttctacatcataaccgagctccagacccaccgcccgaagttcgtccggctcgagcgtcaggctctcgcgaagtcctccgcgctcatgagccttcccggaaccgcgcgtgacgaggcggtaagcgaaaatccggacctcgcgccggagatcgattacctcgagaaatccgccggatacccggtttattccggcacacgcgtcacatatctcacccccggtgaggcaaagctcgcgcatctgctcgaggagctcgaaaaggcggaaaaatacatctttctcgagtacttcataatccagggcggagagatgtgggacgagattctcgcggtgctgaagcgcaaggcggccgcgggcgtcaaagtgcgcgtgatctatgacgatttcggctgtttcttcctgctcccgaaggatttcccggcggagctcgcgaaatacggcatagactgccgcgtcttcaacccgttccgcccactgctcacagtcgtgcagaacaaccgcgaccacaggaagatcgtctcgatcgacggtaaggtcgccttcaccggcggcatcaacctcgccgacgagtacatcaacgcgata

SEQ ID NO: 2172 - DNA, 6889 bp, Unknown
  16S sequences of unknown bacteria
tcgcggctcgccggtctggtgtggattccttgtcagttgaatagaaaagaccgccgtcgggcaacaggccctccggctcgctaaaaaggtcagcgtgattctaaattcacgctggccttttgccttgcaaaaatatccaagttacatcgaagcgtccaactagcataatttgaatatggtttacaccaaccgcgaattggaaaacaggtctgcccatggaagcagcgagtccacccacgtaacacgagactatcccaagcaccgccatttgagtctgcccagcgccacctgcgggggaaccgagcggcgataggcagcggagggaaaaaggcccacccattttgacggcggaaataggcgagcacaggagcgcgcacaggcgttgggggtagctatctaattttattacgcgcgacgttgcgagccccgccggcaaaatgggcaataaaaggctttttcccggcgggtgagcgaagcgaaccgaggtcgaggacagccccgaaggggctaccgcagaccgaagcccgcgacgcgcagcggggcgggccgcctctggagtcgccgtgccgccagctttctttggtactttctttcgcttcgaaagaaagtacttcccccctcggtgcggcagccccaccgtccgcgccggagtcggcgcgtcagccccccggcaggaactgctttcggcaaagttgccttataatgccgcttgcaggggctttccgctcgccccctgcaccccctcggttcgtctgccaaagcgaatttacaaccccacgggactgtacctgcactccgcgccggagtcggcgcgtcaatccccgtatcagaaaattgcctacggcaaagataacgtataacaccgccagagagttttccttttccccgcaccaccgcagcaaataaacacccaatgggacagcagaaccgccatgtgcaaacatttgcttaccttttttccgcgttttctctcccaaatcccctatttaacgaacaaacaaaaaatatctaaaaaaaatgttcggatttttactttacaaatcccttttttgggtgtatgataattcctgtattccgaacctgactatgaaccagctacaggaggatgaaacccatgaagaaaattctcggtctgcttcttgccctctgcctgatcgccggctgcaccagcgccttcgccgccggtatccccgtggaacaggtcaaaatcggctacatcaccatcggtgatgaaaacgaaggttattccgccaaccacctcaatggtctgaaggaagctcaggctgctctgggcatctccgacgatcaggtgctgtgcaagtacaacgtgcccgagaccgaagacgcctatgaagccgccatcgacctggcggagcagggctgcaatatcattttcgccaccagcttcggccatgagagctatgtgttccaggccgctgccgaatatcccaacattcagttctgccacgctaccggcaccgccgccatgagcagcccgctgaacaacgtgcataactacttctacgcggtgtacgaatcccgctacgtcagcggcgtggtcgccggtatgaagctggctcagatgatcgaggacggcaccatcactgctgaaaatgccaagatcggctacgtgggcgctttccccttcgccgaagtgatctccggcttcacctccttcttcctgggcgcccgcagccagtgcccctccgttaccatggaagtccgctacaccaacagctgggctgatatggcgctggaaaaggaaaccgccgaggctctgatcgccgacggctgcgtgctcatttcccagcatgccgacaccaccggcgctccctctgcctgcgaggctgccggcgttccctgcgtgggctacaacatctccatgctgcccgttgctcccaacaccgctctgacctccgctgccggcgactggggcgcttacgtgacctacgccgtgaagtgcctgatcgacggcgaagagatcgaccgtgactggtgcaagggctacgccgaaggcgctgtgtacaccaccgaactgaacgacagcatcgtggcccccggcactgccgagaaggtcgccgaactggaagaagccttcaaggctggcactgtcaaggtgttcgacacttccaccttcaccgtcaacggcgagaccctgacctcctacaccaccgcctacggtctggaaggcatcgaaatggtgtccgacggcgagttccatgagagctccgtccgcagcgctccttatttcgacattctcattgacggcatcaccgctgttgtggaataatagaaacagttccaccgcagtccccggacgcggtttcggggctgcggctggtctaaagccgccggagggtctatcagccctccggcgcgctttgttgtatgatggaatcaggacatggattgcggagggatcgaattgcagccaaacgacgtgttgatcgaaatgcgcggcatcaccaagcatttcggctcggtggtcgccaatgaaaacgtgaatctgaccgtgcgccggggcgagattctcagtgtgctgggcgaaaacggcagcggcaaaacgtcgctgatgaacatgctggccgggatctactttccggacgccgggcacatctacatgaacggtcaggaagtggtcatccgttcgcccaaggatgctttcgccctgggcatcggcatgatccatcagcatttcaagctggtggatgtgcttaccgcagccgaaaacatcattctgggtctgcccgggccgctaaagttggacatgaagaaggtcacgaaggaaattcgtgatctggcggaaaagtacggcttcgagctggatcccgagcgcaaaatctatgaaatgagcgtgtcccagaagcagacggtggagatcgtcaagatgctttaccgcggagccaacgtgctcattctggacgaacccaccgccgttctgacccctcaggagacggaaaagctgtttcaggtgctgcgtaacatgcgcgatcaggggcactccatcctgatcattacccacaaactcaacgaagtgctcagcctgagcgaccgcgtggccgtgctgcgcaagggcgaatccatcggcacggtggacacgaaggatgcgacagagcgcagcctgaccgaaatgatggtgggcaagaaggtcgagctggacatcgaacgtcccgatcccgtcgatcccatcatgaagctgaagctgaccaacgtcaacgccgtggatcacgaaggccgccctgtgctgtcgaacatcgagttcgaagccttcaccggcgaaattttgggcattgcaggcattgcgggcagcggtcagaaggaactgctggaggccatcgcgggtctgcagcccctgaccagtggccgcatccagtaccgcaaccgcaagggtcacatcaaggaactgaccgaaatgagcgcgcaggagatccgcgagatcggcatccgcctggccttcgtgccagaagaccgtctgggcatggggctggtctcctccatgggcatgacggacaacatgatgctgcgctcctaccgccacggccacggctttttctccgagcgcaagcagccccgggagctggccgagaccatcatgaaggagctggaggtggtcacccccagcgtggaatggcccgtaggccgcatgagcggcggcaacgtgcagaaggtgctggtaggccgtgagatttcctcttctccgcaggtgctgatggtggcctatcccgtccgcggactggacatcaactcctcctatacgatctatcacctgctcaacgagcagaaaaagaaggggtccgccgttatctgcgtgggcgaggatctggacgtgctgctggccctgtgcgaccgcatactggtgctggctgacggcaagatcagcggcattgtggacgcgcgcaccgccaccaaggaggacgtgggtctgctgatgaccaaccacggctatcgcgaagcggacaaggaggcggaagcatgagtcaggtatccaccaaagaacccctgtttcatatcgtcaagcgggagggcgtgaccttcgtccgtgcgtcgctgatccgtctggttgccattttgctggcgctggtggtctgcgcgttcgtcattatgggcatgacgggcatgaatcccctgagcgtatacgccggcatctggagcggcgcggtgggcacggcccggcgcacctgggtcaccctgcgggattcggccattcttctgtgcatcggctttgcggtgctgcccgccttccggatgcgcttctggaacatcggcgccgaagggcaggtgctggtgggggccatggccaccgccgccgtgatgatctacggtgccgaccttcccagctgggcgctgtacgccctctgccccattgccggaatcgcggcgggcagtctgtggggcatgattcccgcgtttttcaaggcccattggaacaccaatgagacccttttcaccctgatgctcaactacatcgccatgcagctggtgtccttcgccatcgtctactgggagacccccaagggttccaaccacgtgggcctgatcaacaaccagaccaaggccggctggctgccctccatcggcggcaacggctacctgctgcccatcatcatcgtgatggtgctgatggtgctgatgtacctgtacatgaactactccaagcagggctatgagatcgccgtggtaggcgaaagcgaaaacaccgcccactacgccggtatcaacgtcaagcgggtcatcatccgcaccatggccatttccggcggcatcggcggtctggcgggttatctgctggccagcggcgtgggccacaccatttccaccgggctggcaggcgggcgcggcttcacggccatcatcgtggcgtggctgggcaagctgaatccctttgccatggtctttgtagccttcttcttggtctttatggaaaagggcgcggggcagatcgccacgcagttcaacctgaacgaaaacgccagcgacatcatcaccggcatcatcctgttcttcattttgggctgtgagttcttcatccactatcaggtggagctgcgcaagcgggaaaaggaggcggcgaaggcgtgagcatcatcatcgtatttctgcaaaaggccattgcgcagggcatcgccattctctacggagccaacggcgaaattctgacggaaaaaaccggcaacctgaatctgggcgttcccggcatgatgtacatgggcggcgttgccgggctgatcggcgcgttcctgtacgaaaacggcgcggcgaacccctcccccatcgtggggatgctgattgcgctcctctgcgcgctggtatgctccgggctgggcgcgttgctctacagtgtgctgaccatttccctgcgggcgaaccagaacgtgaccggcttggcgctgaccaccttcggcatgggcttcggcaacttcttcggcggctccctatccaagctggcgggcggcgtgggtcagatctccaccaaggtcacggccagcgctttccgggcgaaaattccctttctcagcaatctgcccgtcgtgggcgaattgctgttcagctacggcttcctgacctactttgccatcattgccaccatcatcctcagctggatgatctaccgtacccgggtgggtctgaatctccgggcggtaggcgagaatcccggcacggcggacgcggcgggcatcaatgttcccctttacaagtacctttccacctgcatcggcgggatgctggccgggcttggcggactttacttcgtcatggagtacaccggcggcacctgggtaaacaacggtttcggcgaccgcggctggctggccatcgcgctggtgatcttcgcccgctggcggcccctgagcgccatctggggcagcatgttattcggcggcctgtacattctctatctctacgttcccggtctggatcggagtatgcaggagatcttcaaggcgctcccctatctggtcacgatcattgttctggtgctgaccagtctacgcaagaagcgggaagaccagcccccggccggtctgggcaacgcctacttccgcgaaagcaggggctaggcaggggcagtgcccctgcaccccacaccgcgcccatagggcgcggggatgctcgaggaaaagcaagttggctggggttttaccgccgtggcacgacgggtgccacggctcgccggtctggcagggctaaagccctgcaccccacaccgcgcccatagggcgcggggctgctcgaggaaaagcaagttggccggggttttaccgccgtggcacgacgggtgccacggctcgccggtctggtgcggcttcatgttaattgaatagcaaagaccgccattcggcaacgggcctcatggctcgcagcaaaggccagcgtggatataaaatccagctggccttttgcgttgcaggaatccaattattgaagtatccaaagcgacgttgtttgcgtatggatagcgccaaccacagaagaaaaacaagcctgttcttctgctctgcaaaaccatccaagcgatgccacgacattgcaacttgcattggtttagtccgcctcgcgccacctgcgggggagcagagcggcgataggcagcggagggaaaaagacccgtccattttgacggcgaaaaaaggcgagcccaggagcgcgcacgaacgtaagaggtaactcgcaaactccattgcgcgccccgccggcaaaatgggcaatagaagcctttttcccggaagggcgagcaaagcgaactgtcccgaagggaagcgtggccccagtggggccttgggcgcagcccaaagcgacccgcagggagggtgggaggcgagcagagcgaccggcagggagctatgcgacaccggacaccccgtgctcgaggacagcccctgagggcagt

SEQ ID NO: 2173 - DNA, 7846 bp, Unknown
  16S sequences of unknown bacteria
ccttgttacagatacgaaggaaaataaaaaggtctccgacggttttgccgatccatccctccggaacctctacctcaaaaatgccatgaccctcatcgacctcgatgtaatcccgaatatgatcggcggtatagcgaatagcagcccaatttgccacttgcttttcagggtaaattacttcgtccgctccgttacgcagaagaaatttctcctgaacatcacgctcggcgcgtgacacaactaattttgcgccgagttccttcagtaaagaagtagtctccagcgaattttgaaaatttcctcctatggtgactatgcacacatcaaagtttccgattccgagcgactttaaaaattccgtgtttgtgctgtcacctatctgtgcgttagtaacgatcggcagaattttattgaccctttcttcgttgctgtctaccgccatcacctcatgcccgagcttattcagctgcaaagcgatatgcctaccgaatctgccgagacctatcaacaatatgtttttcataatatagtaactcctttatccgactgtgatattttcgagcggcagctttgcaccgctctgatttttattggagatcgccgcgtaaatcagggtaagtccgccgactctgccgagatacatcaagacgatcaaaataagctgagaaagaacaccgagctgcggtgtgattccaagggtaagcccgaccgttccgacggcggatgccgtttcataaaggcaagtgctaagcggcagaccttctgccgtgctgatgattattccgccgataaaaaacagcaggaaatacattacggcaacggttgcggcgtttttcactgccgaaccgtcaatgcgtctgccgcagacttcggcatcgtcctttttgcgacagacggagaatgcactcagaatcagaacggcaagcgtggtcgttttcataccgcctgccgtggagccgggcgatccgccgacgagcatcagcagaatcataattgccttggaggaaccggtcatagcgggaagatcggcggtattgaaaccggcggttctcggtgtgacagactgaaaaagcgacgcaagaatcctttcggcgagcggcagccccgtaaaatcacagaagaaaaagaatactgcgggagcgataatgaggattgccgttgttaccaatatgaccttactttgcatacggtattttttgaaatgccacttgtttgtgcaaatatcgtcccaggtcaaaaatccaataccgcccacaataattaaaagcataattgcaatgtttattgtaggctctccgatgtatcccgtaagagacgggtatttgttttctgcggtgccgagtatgtcaaagccggcgttgcaaaaggcggaaatcgaatgaaatgccgccatccaaattcccttgataccgaagtttccgcaaaatgtcggcagcatgacgatcattccgataagctcgatcaaaaaagttccccgtacaataaagcgggtcaggcggacgatcccgccgaccttcggggcagagatggcgtcctgcatggtactgcgctgcatcagcgatatttttctgccagacagcatggcgaaaaatgccgcaactgtcacaacaccgagcccgcctatctggatcatcagcagtattaccgtctgcccgaaagcggaccaataactgcccgtatcctgcacgaccagccccgtaacgcaaacggccgaggtcgatgtgaacagcgcctcgtgaaacggcgtaacaactccggcagtcgatgaaaacggcagcatcaatatcagtgctccgatcagaataaccccggcaaagcccaaaacgatcagcttaaaggatgacagtcgcttttttctatgtgtaatttcaggcatatatacttctcctgtttttgtttgtttacaaagagtatattatgaaatataaaaaaacggtgtaatgatccggtgtgctgcattaagattgcattaaggcgctcattctttgaaaaaacagtgcagagtatagcaaacggcacagacaaaggcggatcgtttgtaaccgttgtgcggcttgaaacaaacctcagagccactcttacagaacaacaaaaggctctgctcgaacagtttgaaaaagcggatgcagaaatttccgacaggcacgaactgcaagcattcacaatcgggtttcgattggcggctcggctgatgatggaagtgtacgaaccgacgccggaattagagccgtaacaaaaacacaataatcggaaacgggatcgcacgatcctgtttctgtttcgagaatgttgactgcagcaggcagaggatatcacaatcctttgcctgctttctttttgcgagtaatccccctcgcagaaatttgaacatcctgtaaattctttgtttttcaggcgctcaaccgcattagtttttgccatgaaaagtgaggggataaatttttttggttgtaaccactgcgttttttcggcatgaaaagtgaggggataatttttcgggttgtagtccataggattttttcctttggataagtggggggataaaaaattttggttgtacctactgtgttttttcggcttaaaaagtagagggcgaaatttcataaccgtttgaaaggagttggcacagatatgattgcaaccacgcaaaaagaaaatatcaaggaggaaaaagtggcagaaaaattttcaatcatctcaaaccgcataaacgactaccgattgaagccaagagattacgccgtctactgctgccttgtaaaacacagcgacaaaaacggtgtctgctttccgtcacggcgactgattgccgaggaatgttgtattgacaaaaagacggtggacgcagcgatccgaagccttgaaaaagcggggcttgtgaaaaagaaaaagcgccgcagacaggacggatcgaacacaagcaacgcctacacggtcaagttatttcggtagtgtaattttttcgtacagggtggtgtaagaaacggtatcgcagaactatacccatagaactaaacccactgagtatatattacagcagaataaagaaataagacggcaaactcttccctctgccgaaacagccgcagaaaacgccccgtacgccaagcaaggagaaaaccgagtaaacacccgaccgagctgcacaaaggcaacatacggcgctgtaaacggcgtgtacgcccttttttcttttctgccgtgaaaatgaaagttctgcataaatcagccgttgtttttgaggaattacgtcttattccgcaaaaaaacgcaacggtacgaaaacaagcaggagaaagccgaggggttgcgttgctttccctcggcggttcacagcggacggcaacgccgaccgcagggggctttgtacgatattttaaagctgattataaaactacggtttaggggttgctccaattttatcctcgctgatttaggggttgcacttttttcaacgaaaatagcggcataaaaagaaaaattccggtcctgttattggcggaatgtaaaaataccaaacagccttacggcggaaaggattctatggaaaatacagataaaaacactttcaaaaatatgatggggaaacttgctgttttgccggaaagtaacataaaaatacaatcggacgatgaatttgattctaaaactttcaggtgtctgcagcgaaggacatttcacagtctttcaaaaaacaaaatagtgcagagcaaaaaatatcggatcgggcacatgaactatattgtcaattcctgctttgaaattgagccgcaaaacacggttgacaacggtatccgataccttctcggaatggaaatgcaggacggtaaggtttcttaaaaaatcgtctggacttttcaaccgattgagagtatattgaggttgcggaaattttccgcagctctcaatcggtttggctgaaaacaaggaggtaaacatgatacagtcaagccaaaaaataaccgctctgtactgccgactgtcccaagaggatatgcggcagggcgacagcgacagcattgtcaaccaaaaaatgatccttgaaaaatacgcaaaagaaaacggctttgaaaacacacaggtgtttgcggatgacggttacagcggagtaaattttgaaagacccgcctttcgccgtatgctcgatctgattgaggacggaaaaatcggcgttatcataacaaaggatctgtccagactcggaagaaattatattgaagtgggttcatataccgaaatatactttccgaaaaacaatgtgaggtatatcgccgtcaacgataatttcgattcaatgtatacggacggaaatgagcttgccccgttcaaaaatttgttcaacgaatggtttgcgagggatacaagcaaaaagatccgtaccgtaaaacgggcaaaggcggaaaaaggcgaacgcatcggttcaagaccgccttacggctatgttaaggacccgaacaataaaaatcatattattgtggatgaggaaacggcgccggtggttcaaaaaatcttttccatgtgcgttgcgggactcggtccgacgatgatcgcaaacaggctgaaagaaatgcagatactgacgcccgtgatgtatgaataccgcaaatccggaacagcggttacggcgcttgataccgacagaccgtatgactggaacgcaaaaacggttgcggatatcctttcgagagaggattatatcggcaacacggtaaactgtcggtttaccgtgccatcatacaaagacaagcgtaagatgaagcgtgatccgtccgagcatgtccgttttgaacatacgcacgaaccgataattgatatgcagacttgggaaaccgtgcaaaagctgcgtcaaggtaaacgccgaccgacaagcataggtgaaacaagcaagtattccggtcttctgttctgtgccgactgcggctcgaagctgtattttaatcacaagcgtgcggatgatccgaaaagctattccttcaactgctctcattaccgcaataatgcgaaagaaaaatgcacgccgcacagaatccgtgaggtagtactggatgagatactgctcgaggagctgcgccgtattacttacacggcaagaacaaaagaacggcagtttgcggaattcatcaaccaaaaaagctcctcggaaaaccgacgggagcttaacgccaagcagcgtgaatatgaaagattgtctaaaaggatggcggagcttaatgcgttgttcaagcggctatatgaggacaatgtcctcggcaggataaacaacgagcagttccgtatgctgtcctgtggctatacggatgagcaaaagagcatagacgccaagctgccggagttggaaaagcaaatacaaaatttacagcagatggcaagcgatgtggataagttcatagggctcgctaaaaaatatacgcgcataaccgagcttacacccgaaatcctgcacaccttcgtttcaaagatagtcattcacgagcggcgtgagcggttcaagcaaaacaccgaacagcaaattgatatttatttccgttatatcggcaatacagccggattataacgaaaaaagccaacggacaggcaacgcatacgcatcacctgtccgttggctacaccgattaacaaaggtgtctttatgggaaccttgttaatactgggttttcagctctcaaattcccgatttgatagcaaaatgattgcaaaccataaaacgactttattctaagtgttctatcggtttacaggtacaattatcttaatactaaagggaatcactttatcgccgcaaaacggcccgtcgaattcaattcggaggttgataaatttctgaattcgctacgttgaaaaacacaacagttattttaagcagcgcaataaacaaagcggcaggcaggtcagcttccgctttcaattcaaaaacaaaagtcgttacggagcagccgcaaaggcttttgttttttatgttgatttttccgaaaaaacgccctctcccgtatgcagaggcacagccctttccaatgtcgcggcctcaatttcacccgacaatacatagataaattgcaaattttcataccaacgcatgacctgaaagcccgagttttgcggatagccgctgtcatttaatctcaagcacacaatacggaaaatccgtattatcattcaaattgaccgggtttatatattccgtttttcgatatatcttccttgttttgtcgttattatttattttttaatgttttatgatggcattttgaaatttattgcgatataattatactgcattttaaaagaatacaagggatttgcttatatacgggcaaacagagctttgctgtcttcggcaaaagaacaagcggcttggtgccgtcattgaccgtaggccgttagaaagctgtaaaattttgaggtgtagagcatgatattcattcagcattacgattccccgctgggcggcgtgctccttgcggcggacgagataggactgagagggctttggtttgacgggcagaaatattttgcccgcgatctgcctgccgagcgcacgaagcggaaaacacccgttcttgcggaaaccgagcgctggcttgacatttatttttcgggcaaagagccgaactttttgccgccgctgcaccctgtcggctcggcgttccgtcgggaggtgtgggagctgcttttgcaaattccttacgggcagactgcgacctacggcgaaatcgcgcggcagtttgcagaaaagaaagggcttgcccgaatgtcggcacaggcggtcggcggagcggtgggtcacaatgaaatttccataataatcccctgccatcgagtggtcggcacaaacggtaatctgacgggctatgcgggcggaatcgacaaaaaggtaaagctgcttgagcttgaacacgccgacatgaccgaattttttataccgaaaaaaggcaccgccctttaaggccgccgcattataagggcggcaactgcgcggagctgacatgaaaaaatttcaacggggcatcgcctttgcgacggtgtcccgtgcctttttatatattttttgcaaaaactcaaggtgcaggggccgtattttttcatagactgatgtagaaagaaatttttacggaggaacggccatgaattattatggcaattgcaacaatcgaaactgctgcccgagcggcgaaacgggaacatatgttacaatacagggccccgcaggaccaaaaggagagcgcggagaaaaaggcgacaagggcgatgtgggtgaaaagggcgattaaggcgagccgggggaacgcggagagcccggagaaagccccgttattaccgtggccgaaagcacgccattaagctataaactgaattttaaaacggccgaacagagcataacaacgcccaatctttttgctccatacaccgaatatcacgtcgacctttcggcggtaaacagcctgcttaccgttcctcttgaaaatctcgttttgtcctatcaaaccacctcgtcaagcgcgctgagaatatcggcggcgccgaaaaccgcgggaacgacggttctttgcgacataagaaggctgacgatatataacgcaagcacaatcgagtcgcaaacctcagataacacaagcatctcggcacggacggttcttgacgaaatcgtctatacaagctcacaggaaagccacagcatgaaaatacgccagcaagaccccgaaaccaagctttggtcgctttgcgaaatcacctcgtttatttccaaaaacgccgcgcgcacctcggttacggttcgttttcttgagcatggcgtttcctatctcccgcccgaaacggtataatttaaaaaagtcattgatgtccatct

SEQ ID NO: 2174 - DNA, 1882 bp, Unknown
  16S sequences of unknown bacteria
ccctcgttgcgcctgactgtactcataacaagcgagaacccccgctcgtagctcttcgccccgtaggggttggggcggaatgtgacaaggcggttttctggggttaccgtgagcttcacggcccaacgcccgtctgccgcctccggcgccgccgctcgttcgcgcacctcccgggcaagcacacccgtatcgacatcgatgccgagatatgcgcaggcccgccgcaggcgggtcaggtgggcgtcaagcagcagcggtcgacccgcagcaagggcgatggtctcgaaagcccccaccccaaagaagaatccgtcgtcggctgccaccagcggggccgcgccgcgtgccctgtccgcgtcgctcatcgcgtctcgcctcccgccaccgccgccaagaccgcccgggccttgtcgagcgtctcctgatactcgaatgccgggtccgactcgtacgtgatgccgccgcccgcgcctatccggtagcagccgtcctgccagacggcagtgcgaatcacgatgttgaggtcgcagtccccgctgtccgagaagtacccgatcgaacccgtgtacatgccgcgggcactgcgctcgagctcgtcgatgatctgcatcgcccggatcttgggagcgccggttatcgaccctcccggaaaagccgctcgtaccaggtcgaacacgtccttgtcgtccgccaaccgcccctcgatagtcgataccaggtgaaacaccgtcgcatagggttcgatggcaaagtggtcggtgacctggaccgaccccggcacgcacacccgcgacaggtcgtttctctccaggtccacgatcatcagcagctcgctgtggtccttggcagagtcgcgcagctcggcaaggttcgcccggtcctcttcgggcgtggcaccccggggccgagtccccttgatggggcgcgtctgcaccacgccgtcgcgcaggcacaagaagcgctccatcgaggcgcagcacacggcccagccctccccctccaggtatgcggagaatggcgccgggttgtaggtgcgcaggtagcggtagacgtcgtagggcgccgcctgactgggggcaatgagctcgtgggtcatgtttgccacgtagatgtcgcccgcgcccatgtactggatcatcgccgccaccgccgcctcgtattcctcgcgggtaaagcggctctgaaatgccgcaagatggtcggtgcacacgggaaccggggccttcggggcactgcgcaccaaccgttcgagctggtcgagacgcctgccggacgcgtcgtccagaccgtcgtcggtgaggaagagcgtcccgttgacgcggtcctcgatcaggtagttgcggtagaagaccagctgggcatcgggcattcgcagctctttggggtgatgcgagccaatgcgctcgaaacgccgcccgtaatcgtaggaaaggtacccaattgcccccgaggccaatggcagaccgtcgagtgcctggtcgcggcgttgctcgaagatgccccgcgctgtctccagaaagccgccttccacccgccggccgttcaccttcacaaccccaccctcgtcggtcagaaccgcgcggaggtctatgcccacgatggagaatcgccccaaatcgcccgatagcgaagagtcgagaaaagcagcccggccgctgcctttcagcagctcgaagacatcggcagcgcctgcgctgacgtcctccaagcgccgcacgcgcgccctcatgcccaggctcccgctgcgcagagacggcagacctgcagatacgctgcgagcagctcgtgcccgtagctggtgagtaccgcctcggggtggaactgcactgtttttcacaacaactaaatttaggatttcacgactaatttctttcgggtttca

SEQ ID NO: 2175 - DNA, 29204 bp, Unknown
  16S sequences of unknown bacteria
tttttcttcccctgtgacattatgtactgcctgataatatctacggtagctccacttgtctgttagatacgactgattgtaaatatatcatagtacagcaagatgaaggagtcaagaaatcgccgtgttaatcacaattcatcccaccacttatagaagtgggggatttcttgctcacggcgtgttaaagcttaagcataatgaagcttatttatctatgcttgatgcatcgcttgacgaattatctgccggaaatattatatcaaaaccacaaactgaataattgactttaaaacagcaggaagccgaagctccccgctgttatttatttagtatccgcagctgcagccgttggtgccgttaaactggtacatactgcatccgcattcgttttcctgcggtttttcgcactcgtttgatggcttttcacagcctgcgacaggaggttcaggcactttggcgctgcacatgcagccgggttcttcagcgcagccaccctgctgtatgagagctgaggttaatgaattgtcgcatgggatgtcagcctcgcagcctgtcatacacataagtgtttttcttgtaacctccagatttatggaaggctcaagaatcagaagcgcggtgagctgggttcctgcagcggtaattgtgatttcagggttgagtatgtttattctgccgccgagagtgaactgaattgcaggagaaattccatgaacactgcaaggtatgccggcgtcggaaattgcaaaggctgtcgtgcccgtaactgcaagtggagcggtgatattaaatgtcgctctgaaattacataccgatccgccggtattcactgtaccgtcgagaattaactgtcctgtcagattccagcctgtgataccgtttatcataaaaaacgcttttgaagggagtccgctgcattggcattttgtgtccgaaagctgattttcgatatttgagatatccactgtatatatgccgttctctgtatttacggcatttactgcatgcccgttgagagtaacgcctgcaggggcgatggcagcagcaggtgtcaggctgtttactactgcaaaacttctttttacagtaaaaacggaagctgtgcccgtctggcagtcggaagttccgccgcagcagcagcactgccggatgcagtcaggagcgggagggtcgcagcagcatttctgcgcgcaggggtcgacaggaggcagcggttcctttgacgttatgagctgcgcggggatttcagatgttgcagtgtttaagctgtagcttatagggcaggaatgtccttccttgtatgaaaaaactttatctatatatgcaagatttgatttggaatttctgaaagctggagaattgctgtctgtatttgttccgcagcagccgcacccggcgctgtctgcgggaatgtatgaacttaacattattcatcaatacctttctatattgtgttttattcatattatgaaaacagtctgtacaaggttcaaattatccgaaaaacaatatattgtatctaaacagaagaaaaaaaagaaagaagtacaatatgtagtttttgtgtaaaaaaacagccaaaacagcttcctgtcctgcaaaaaaagtggagggtaaagtgcaaaaagtggcgggcggtggttgtaaagtggtgtgaagtggagtattatggtattacatcatacaatgagagtggtgtagtatcttcagtcgaaaggatagcagtctgatgttgatgggtaaattccagaactcaatagatgccaagtcgaggatgatagttcctgcgaagttcagagaacagttgggttacaagtgcgttctgactatgggtatcgacaggtgcctgtatatttatcctatggctgagtgggagaaatttatgaacaagctgtcagcgcttcctatgtctgatgcaaacgccagagctttcatccgtcatttctatgcaaatgcggtcgaaagcgagatagacaagcagggcagaattacacttcctgccgatctcagagaatatgcgaacatagacaaggagcttgtaactataggcaatctggacaaaattgaagtctggagcaaagaggagtgggacagcaaggataatatgactcagctttcacctgcggaagtttcacagaagatggttgaatatggaatttaaacacacatcagtccttttaaaggaaacaatagacggacttgcaataaaacaaaacggaatatatgtagacggcacgctgggcggaggcggacatgcttcggagctttgctcaaggctttcaccggaggccgtgtttatagggatagacagagaccgggacgcacttgaggcggcaggcaaaaggcttgaaaaatacccgtgcaggaaacattttgttcagagcaattattcggatatcaaagacgttctgaatgaacttgaaatagagcaggtagacggcgcaatgctggatctgggagtatcctcgtttcagcttgataatgcgcagagaggcttctcatatatgaacgatgcgcctcttgatatgcgtatgaaccagtcggacagctttacggcgtatgatgttgtcaacagatacagcgccgcagagcttacagatataatcaggaagtatggcgaggagaaatgggcatcgcgaatagccgattttatcgttaaattccgaaaggacaagcctgttgaaactacagcagaactggtggagataatcaaggcggcgattccggcaagagccagaagagacggaccgcaccctgccaagaggacctttcaggcaatcagaatagaggtaaacgatgagctggtgcagcttcgcagagcctgtgaggaattctgtgatgtacttgctccgggaggcagactctgtataataactttccactctttagaggacaggatagtcaaggaatgcttcaacaggagagtgaacccgtgcacctgcccgccggaatttccggtatgtgtgtgcggcaaggtggcagacgtcagaaaaataactggcaaaccgataactccgggtgaggaggagctcgaaaacaatcacagagcacgcagcgccaaattaagaataatagagaaactataggaaggaacaaaaagtataatgcaggcacaaaactggtatcagtacgaagaaagctacagaaaatacggctttgatatgaaacctgaacaacttaataaaccgaagacaaagcctgcagacagtggtattgcgaccaaggacaaaaaaagactgctggcacttacagttattttcggcattatgtgtattgcaattataatatcgtcggcatttgcggcgacactgcaatatcagataaacagacttaccatggaaaacaacgagatttccagagaaatcgaagatatagatatcaagctccagacggccaacagcgttactgttctggaaaaaaaggcaagcggcaagctgggaatgaaatatccttctgccagccagatcgtctatgttagtgatattacagctccaaaggatttcgcagctacagtaaaggaagaggcatataattgattgcagtaaatatactagtatataacgataaaagaattgcatagtgaaaggagaagctggataacttaattatatagataaagtaatccggctttttgaatatttatgttaaaggtatcaggattaaacagaaaaagattaataatagctttcggcatcgtgtgcgcgctgctggttatactatgctttcgtgtaggctactggcagattatcaaagctgatgccatgaccgaaaaggcggtggagcagcagaccagagatacaccggttgaagcaaaaaggggaacaatatatgacagaaacggagcagagcttgcagtaagcggatcctcatattccgtatgggcaagacctgcaaacgtcaaatcaggaagcaccgaagaaaaaaagcaggcagctctcgacacctgcgtttcagccctttcaaccatactcgatatggatgcggaggaagtgagaacacttgtaacaaaagagcagtcgcttgtcaagatatcaaagggtattgacaaggaaaccgcagataagatcagggaaaaggaacttcctggaatagaaatatcagaagacaccaagagatactatccgctgggctcctttgcatctcatctgataggaagcgttacagacgataatgtgggactttcgggaatagaacttcagtacaacgaatatcttacaggagtttcgggcaggtggattaaaaacacagacgttgcaggcaacggcctgtcctacggacttgagaaatactatgagccggaggacggattaagccttgtgctcacggttgatcaggtaatacagaactatgtggagaatgcaatcgcaaaggttcagaaaaaaacctcatctgacagagtaatgtgcatagttatggatcccgaaaacggagatgtgctgtctatggcggtgaccccggattacgaccctaacgacccgagaacaccgaccaaaaaatcagaacagaaaaaactcgaaaaaatgacagacaaagagaagcttgaatactggaacaaaatgtggagaaaccctctggtttcagacacatatgagccgggctcaactttcaagcttctgacaacctcgatagctcttgaagagggacttacaaatatgaacgagtcattcgtatgcacaggcagctacaaggttgcggatacaacgctgcactgctggagaagaggtaatcctcacggtacgcagagcctcaagcaggctgtaggaaactcctgcaaccctgtatttatgcagctggggcttcgcacgggtattgagaaatactacgagtatatgaaccttttcggaataaccggaaagacaggaatagactatccgggcgagggaagcgcaatacttcagagcaaggatacggcaggacctgtagggcttgcaacaatgtcctacggtcagggtattgcggtgactcctattcagcttatcacagcgatatcggcaataggcaatgacggcgttatgatgaagccgcacatagtcaaggaactcaaagacaaagacggcaatacagtcgaaaaatatgaaccggaaatagtaagacagatactgtctgaaaaaacagcagatgaaatgtgtgaaattatggagtatgttgtatcggacggcggcgcaggcacagctaaggtcgagggctacagagtaggcggcaagaccggtacggccaacaagccggataccgtaaagggcggttatctcgaggaaacctactcatcatttatagggatgtctccaatgaacgatccaaaggtggcagtgcttgtaatagctgacaatccgaagggtataaaatacggcagccagaccgcagcgcccggcgctaaggaaataatttcagaggtagtaagatatatgggaatagagcctcagtattccgatgaagaaaaaaaggaaatcgaggcaaagcagacagaggtgcctgatattacaggtgaaagtttaagtgatgcaataggcattctgggcggttcttccctcaaatacaaggttcagtcgggaaacaaggataaggacttcaaggttaaggaccagtatcctaaagccggaaccaaggttgagaagaacagcacagtgtatatttacgggagtgactagaatttgacagatgttttcgcaataacgggaactaatggcaaaactacagcatcatatatgcttagaaatatactatgctacagcggcagaaaaacagggctgataggcacgataacccaccagataggggaggaggaatacagttctgtaaacactactccgggaaaggatctgcttcgtacatactttgacaaaatggactcaaagcatatggactgctgcgttatagaggcctcctctcacggccttgtgcagggcagacttgacgacacggagatttcctacggagcatttacaaatctgacgcaggatcatttggattaccacaaaacaatggaggaatatttcagatgcaaatgcctgctctttgaaagaaatctcaaaggcggagccgtaaatgcagatgacagttgggggaaaaaaatactgaaaagctacggtaaaaaagacaaactggcctccgtttcaatgaaagacagacattgcgattatttcggaaaaacggcagaagcggatataacggggcaggtgcttgaaatatatataaaaggtgaatatgcgggtgatgtaaggctttcaatgccgggagtgcagtttgcatatgatgcccttattgccatagggcttgcctatgaatacagcatagaatttgacaaaatcagagcgggcattgaaaccctcagaagcgtgcctggaagatggcagcttgtatgggacagagataatatcagagccatagttgactttgcacatacgccggacgccctcgaaagacttctcaaaacagcgagaaacctcacagacggacagataatatgtatgttcggctgcggcggggaccgggatacaggcaaacgttttcaaatgggtgaaattgcaggtcgctacagcgattatgtaatagttacaagcgacaatcccaggggtgaggacccggaggatataacggcgagaatagaagagggggtatacagcacaggcgcttcatattctgtcatacccgacaggaaaaaagcaatccgaaaggcagctgtgctggcaagaaaaaacacccttataattgtggcaggcaagggccacgagaaatatcagataataggggacaaaaaactgccctttgacgatgtcagaatactaaaggagtttttagaggaaaaatactgatgaacaaactaaatctaagacagataacagaggcctcaggcggaagtctggtgcagggcgatgaaacacaatatataacaggggcgtccatagactcaaggactgcggtggcaggcaacctgtttgcagcaatacgcggtgagaataccgacggccacagatttatagctgcggcttttgaaaacggctgcagcgcagctctaatagatgacagaagctatacagacaaaatacctgcgggtatgggcgcagtgctggtagatgataccgttaaggcgtttcaggatatagcctcatactacagggcttccatggatataaaggttatcggtgttacgggaagcgtaggcaaaaccggcaccagcgatatggttaaagccgtatgtagcggcaagttcaagacagccaagaccaaaggcaacttcaacaaccatataggacttccgctcagcattctggactttgatccggacactaaaatcggcatactggaaatgggcatggatcggcccggtgaaatagaatttcttgcaggtattgcaaagcctgatatagggataataaccaatataggtacggcacacattgaataccttggcagcagggaaaacatattcaaagccaaaatggagattacagcctacttcggcaaggataatgtcctcatagtaaacggcgatgatgatttcctcggcgccctctgcgatacggagtacagacttgttaaggtaggcgctgcgggaggcagtcaggtctatgtgtacaatataagcgacagcgccgaaaacggtgtggagttcacactggaatacaaagagaaagcaacaagaattcacctgcctgttcccggcagacacaatgcagtcaatgcggctcttgccatagcggcggggcttgaggccggagtttcggtggaggaggccgcaaagggtcttcaaagtcttgaatttaccgataagaggctttcggtcaagggcaaaaacggcatcaaggttatagacgatacctacaatgccagccctgcttcgatgaaagctgccatagacgtgcttatgtcggcaaagggacttcgcaaggtggcaatcctcggagatatgtttgagcagggaaaggaaagcccgagatatcatacagaggtaggagagtatgcttcagacaaatctgtcgatatgcttattgcaatcggagaggatgcggagtatattaaagatggcgcattgaagtcaatgagcgccgaaaacgttaaatattacaaaacaaaaaatgaatttcttaaagaaatgaaaaacattattaagtcaggcgacgttgtccttgtcaagggttcacgaggcatggcaatggatctgatagtgaagaggattatggagtagttgaaattatgtatacggtaaagattataattgccattgcagtggcatttgcagcagcagttttgcttacatcagttgaaatccctgttttaagaaaaaaacagatgggacagaacatcagagaggaaggacctaaatctcatcaggcaaaggcgggtacgcccagcatgggcggtgttgccataataatatcggcggcgcttacggcatttatcataggcggcatcaatatagagacggctgcaatggttatcgttatggcagccttcgggcttgtgggatttctcgatgacttcatcaaggtcatcaaaaaacacaatctgggtcttaaggcgtggcagaaaatagtgttccagtttgcaatagcggcagccatagcgtgctgggcggcatttgcaacacctgacggcacacttgtatatataccttttgcagatatatatgttgatttcggcggctggtatatacctttcataatatttactgtcgtagcaatgacaaacagcgtcaaccttacagacggacttgacggtctggcatcgggctgcaccgctttcgcatcgcttttctttgcccttgtggcaggtatgtacggtatgagctctcctgcggtattctgcggagcagtgacaggcgcgtgccttggatttctcgtatttaacagaaatccggcaaaggtgtttatgggagatacaggatcacttgcgctgggcggcgcaataacagcggcggctattcttatgaagatggagcttctgctgcttatagcgggacttgtatatgttatagaggctctttccgttgtaatacaggttgtaagcttcaagacaacaggcaaaagagtattcagaatgtcaccgatacatcatcattttgagcttggcggcatgtccgaaaaagcggtcgttatgatgttctgggcatttacgtttgtatgctgcgcggcaggacttgtgattgtaggattataaaagaattatgcgaggagatttagctatgaatcaggataatttcaaagacagaaaagcacttgtggtaggactgggcaaatccggcaaggctgcaatgcaggcgctctcaaagctgggagctaaggtatgggtacaggactcaaagcctgaggaggatatggagccgcagcttctggcattcatggaggacagaggcatcaaaggattctttggcagaaatcctgaaaatcccgaagattatgatatgcttgtattaagccccggagtatcccccgagcttgacttcataaaaaaagcagaagcagccggagcagaggtaataggtgagcttgaaattgcctacagagtaggcagaggtaattatatagccataaccggcaccaacggcaagacaacaacgacaacccttgtgggagagatattcaaaaatgcaaagaaaaaaacatatgtagtcggcaacatcggcgttgccgtaatttccaaatcacttgaggcggaggaggactcctggcttattaccgaaaccagcagcttccagcttgaaaccgttaaatatttcaagcccgcagtgtcagccattttaaacctgacaccagaccacctcaacagacacaaaacaatggaaaactacggcaaagccaaggccaatgtgttcaaaaaccagacggcaggtgactaccttgttataaattacgatgacaaactgtgctggaagctggcagagggctgcaaagctaccgttgttcctttcagccgcagagagatacttgatttcggcgcatatgtaagctacggcaatatagttataaaaaacgaaaaaggcgaaatcataaacatatgcaaggccgaggagctcaaaatcataggagaccataacctcgaaaacgctcttgcagcggcagccgtaagctactttgcaggcatagagcctgaggttatatcaaaaaccctgcgtgagttcggcggcgttgcgcacagaatagaatactgcggagaggttgacggtgttaaattctacaatgactcaaaaggcaccaatacagacgctacaattacagcgcttaaagccctcaaaaagaacataatacttcttgcaggcggagatgccaaaaaacaggacttcgcacctcttgctgcagagctttcaggaaaggtaaagcatatgatgctctacggcagggatgcgggagatataaagaatgcggcagatgccgcaggctttaattcatacactatggtcaaaaaccttgaagaggcgacaaatctggccttcgaaatggcgcagccgggagatgcggtgctgctttcacctgcatgcgcaagctgggatatgtacagcaacttcgaacagaggggagatcactttaaaattcttgtggaaagactgggacgctgatggaaactattaaaagagcaagaaaaaccggagattttgttatagtgcttctgacactggcgcttaccgtattcggagtaataatggtattcagcgccagctattacagcgcgctttcaaagaccggaaacgcctacgcctatctgataagggacggaatatgggctgttgcgggacttatagctatgtttgtgctctcaaggataaactacaagacatacagaaaatgggcatttcccatactgattgcaagtataattctgcttatcgcgctttttatcccgcatgtgggaactaccaccaacggcgcgacaagatggatagaactcgggcctataacaataatgcccggtgaaattgccaaaatagcggctataatattcgtatcctcgtacttaagcacaagcgcggagaagatatatcagctcaaatccatactgtttctgctggcgctgtgcggcatattcggaggtctgataatgtttcagcccaatatgtctacagctattaccgtagtaggcattatagtggctataatgtttgtggcgggacttgagcttaaataccttggcgctgccggagttttgggagttgtggcaggctgcctgctgatttttacagacaaggacggctacagactgagcagggcagtaagctttacggatccttttgcagatccgctgggagacggatatcaggtctgtcagtcgcttctggcgctgggttcgggaggacttttcgggcttggtctgggcaagagcatacagaaaaacctgtatctgccggagcctcagaacgacttcataatcgccataataggcgaggaacttgggtttataggcgtgctgctgcttatggcggcatatctggtgcttatatggagatgcgttcacatatgcatcaatgcgcctgaccgtttcagtatgcttctggcttcggggattacctcgatgcttgcgatacaggttatattaaatattgcggtagttacatcatcaatgccaccgacgggaatcatacttccctttgtaagctacggcggaaacgcgctccttatttttacgggagcgatgggaataatgctgaatatatcgcatcattcagccaaataaatatatcaggagatttatctatgaaagttataatgacaggcggaggcacaggcggacatatctatcctgccatcgccattgcagacaagattaaggaaaaacagcccgatgcggaaattctgtttgtgggcaccaaaaaaggactggaaaaaactctggttccgggtaacggctaccctatagaatttataaccgtaagcggctttgacaggcgcaatatgctcaaaaacataaggaccgcggcggatcttgtcagaggtctttctcaggccaaaaaaataataaagagctttaagcctgatgtggttataggcacaggcggatatgtgtgcggacctgttgtcaagactgcggcaaaaatgggtgtcagaacatacatacacgagcagaacgcgtttccgggaatgaccaacaaaatgctggagccttatgtagacaaggtgtttatgggcttcgaaaaggcgggagagtatttcaaacaccccgaaaagcatatcgttgtgggaaaccccgtaagaaaaagctttttcaccaaaacaaaacagcaggcaagagaggcgcttggcatagcagaggacgaatttatgatactttcctttggcggcagcagaggcgcaggccgtatcaacaaggcgatgctttccgtactcaaagaagtaaacggtatggataagacaagcctttatttcggtacgggagatgtttactatgatgtaatatgtcacgaggcgaaggagctttgcggcatagcggataatgttcacattatgagatatatagacgatatggacaatcatctgatggccgcagatgttgtggtttcaagggcgggagcactcagcatagcggagatatgcgtatgcggcaaatgcgctgtgtttatcccatcacctaatgttaccggcaatcaccagtaccacaatgcaaaggcggttgcagacaggggcggagcatttctcatagaagaaaaagaccttacggacgagcttctggtttcaaagcttatggagcttaaaaacgacccggaaaaagtaaagactatgggtcaggctgctaaaaagtgtgctttcaacgattcagcggaaacaatatacgaaacgatattcaagtaaccaatacgcacctttggcatattataaaatatgttatggaggtgcgtttgattttgtcctatcacataaaaggcggagcaaaggtgcagggagagtacagggtgagaggcgccaaaaatgcggctcttcccatacttgcggccggcataatggcagagggtgaaacccgtatacataactgcccggacataagcgatgtgcgcgtaatgagagatattctcaaaggacttggagcaaagactgcgtcagacagtgacactgtgacggcagactgcagaggaatttcacaaagcgttatcccgcagacgcttggagcaagacttagagcttcggtgtttttcatggcgccgttactttcaaaaacaggcagcgttacggtgcctgttccgggaggctgtcacataggcaaaagacctgttgacatacatattgatgttatgagagctttcggcgcggaggcagaggaaaccggagaaaaaataatatgccgggcagacagactctcaggagcggatattaccttgagatttccgagcgtgggcgccaccgaaaacgcagttatggccgcggtatgcgcagacggcgcaagctgcatacaaaactgcgcaagagagcctgaaatagtatgccttgcagaatatctcagaggctgcggggcggagattaaaggagacgggaccggcaccatatatataaacggtgtgaagcggctgcatgcggcggatataaggcttatgcctgaccgcatagagtgcggtacatatatggcgatggctgctgcaaccggcggagagctttttgcggagggcataaattctgaatatcttcagagctttacggaggccatggaagcggcaggctgtagattcagatattttgaggacggcatactgcttcgcaagaatgacggactcaaaggggatatcaggataaggacagagccgtatccgggatttcctacagatctgcacccgcagtttgcggctatgatgtgcagaagcaacggcggctgtgaaatagaggaaaccctgtttgaaaacagatataaatacatagaagaactgaaaaaaacaggcggaaatattgaagtttttcaaaaaaaagctataattaaaggtgtgcccaaattatgcggcgcacatatgaaagcgcccgaccttagaggcggcgcggcgcttgtgaccgcagccctttgcgcctgcggagaaagtgtcatagacaatacacaatacatacagagaggttactgcggatttgatgaaaccatcagatctttaggcggagatatatggacgatttaagcagaagagatacaatgtcctttgaaacggatacggattatgattacgaagatatgtactacgataatccgccgcaggaggatgcagaagaatacagcgctgccgtaagcggcagcatagaaaaacggcgcaagaagcgaaaccgcaagaaacggcgcaaaaaacgacttggcctttggatactcataatcatagcggttatagtgctggcggtgctgtttggaagatcatcgtattttaacattgatgaaatacaggtcaagggcaatcattactataccgatgagcagataatatcaatggcgggggcgcagacaggaatcaacaccttttcggcgggaaccggcaatatggaaaagctgctgtgcgatgattcctacatagcgacagccgatgtcaagaggaagcttccaaatgtccttgagattacaatcagagaaagaaccgaaaccgcagcggtatattccgaaaaaaattattatatcgttgacggttcgggatatatactcaaggttacagccgaaagaccggacgttacaagagttctgggacttacggttaaaaacggcaaggagggcgaggctcttgaggtaaaagaaagccgtatgcttaccgaaaccctcgatatgcttaccgaaaccatgaaaggtacggtatctttcaaaaagattaaggccagcaatactgtgctgagggcatatatatacaatcaccttatagtcagaggtacggcggcaaatatttccgagtgcatatcaagcggcaagctggaggctgtgctgtatgacctgtacgaaagaggcataaaaaacggtatgataagcgtgggtgacgaccaatattgcgtattcagcccaaaaattaagtaaaaatcataaaaaccgcagtaaatatagtgcatttatgcgggaaatatgatacaattttaaagataatattcctagggaggaaaccagaatgacaaattcaatcttacagtttgaaagcgaagaaaacacagcggcggttatcaaggttgtcggagtcggcggcgcaggctgcaacgctgttaacagaatgatagattcagagcttggcggcgtggaatttatagccataaatacggacaagcaggctcttgccaaatcaaaggcccagaccaagcttcagataggagagaagctcaccaagggacttggagcgggagcaaatcccgagatcggccagaaggccgcagaggagaacatagaggatatcaggaaattccttgcaggagcggatatgatatttgtaaccgcaggtatgggcggcggcacaggtactggagccgcacctatcatagccaaggtgggacgcgatctgggcgcgctgacagtaggcgttgttaccaagccgttcacatttgagggcaagaaaagaagcgcccatgcagagcttggtgttcagttccttgaaggttatgtggattcactggttatagttccaaacgacagacttcttgatatagcggacaagaacaccgctatggttgacgcattcaatatggcagacgacgttttaagacagggtgttcagggcatatcagatctgatttcagatgctgcgcttatcaaccttgacttcgctgacgttaagacagtaatgggcaacagaggcgttgcgcatatgggtataggcagaggcacaggcgatgacagagttgcaacagccattgagagcgcaatcaagagcccgcttcttgaaacagacgttaagggcgccaaggcagtgcttctcaacatcacaggcggatacgacctgggtatgcttgaggcaaacgaagcagcggagcagattgcaaaggcggcagatcctgacgctatcataatcttcggagcaactgtaagagaggatatacaggatgaaataatcatcacagttatagctacaggctttaacgaggacggcaagggcagaccggttgcaccggaagcgcctaagcaggaggcagcagaggagactgaatccgaagaggcttccggcactgatgaggatacaggcatcgaaactagagaaataactatagatgatacacttgaaacaggcggcggatttgaaattccaccattccttaaaaagtggaaggaataactgcacacaaagaaaggttttaaataagagccggttttaaagaccggctttttatgcattttaaaagtatgaagcagattacatcttcagacaacagaatatgcagaattatacggcagcttgacagcaggaagcacagagaaaagcttgggctttatctcatagagggcgaaaacctcacagaggaagcattcaaaaacaatgcggacatagagtttatcgccgtaaacgaggacaggctttcatattatgaaaacctgtttggcggcaggctatctgagtgctatgtgatgccggcggggctttttaaccggcttgcgcagaccgagagcagtcagggcattatggcggctgtcagaataccgcggcttacacagcagcagtttatggagcatatagcaggcggcaatgtgatagttttagacagacttcaggatccgggcaatataggcacgatcttaagaacctgcgatgctgcaggatacaggggagctgtgatgataaagggcactgccgatatatattcgccaaaggtcgtaagatctgcggccggctcagtctttaggattcccgcgtattatacggcgggagctcgtgatggagtgaaacttttaaaggacgccgggttgcagatcataggcacaggctttgatacagaggatatgtattacgatgtggatatgaggcgaaacaccgcagttgtaataggcaacgagggcaacggtatttcggaggaaatggcggccctgtgcgacaggacagtaaaaatacccatgcgcggcaatattgaatcgctcaatgcggccgttgcggcagggatactaatatatgaatcaataagacaggagagataaaaatgcgtgacaagcttactacaattttagaagaagcaaaagaaagacttgcaaaagccgcttcaatatcggaagcagaagaaatcagagttaatcttctgggcaaaaaaggtcagatgaccgaaattcttcgttcaatgaaagatatggcgccggaggaacgaaaagctttcggacaggcggcaaacgaaaccagagcagccatcgaaaaaatgcttaaatccaagcttgacgaggtgaaagcaaaggcacaggctgctaaattcgaagcagagaagatagacgttacagagccgggaaaacctgtagtactgggctcaaagcaccctatcacaatcacaatagaagaaatttcaagagtatttatgtctatgggattttcaattgcagagggaccggaggttgaaacagtattcaacaacttcgacgcgctcaatgcagcgcctgatcatcctgcaagagatatgacggacaccttctatatcacagaggaaacacttcttagaacacagacttcacctgtacaggcaagaaccctgatggctcaggatcctccaatcaaagttatatcaccgggcagatgcttcagatgcgatactcccgatgcaactcactcaccgatgttccatcaggtagagggacttctggttgacgagggcgttacaatggcagacctcaagggagttttagacagctttgcaaagcagatgttcggatcatctgtaaaaacaaaattcagacctcaccacttcccgttcactgaaccgagcgctgaaatggacgtatcatgcttcaagtgcggcggcaagggctgcagagtgtgcaagggaagcggctggattgagatattaggctgcggtatggtacaccctaatgtactcaaagtaggtaatgttgacacagaaaaatacacaggctttgcctttggtatgggtgttgaaagaatagcaatgcttaagtatggaattgatgatatcagacttctttacgaaaacgatatgagattcatcaatcagttcaaataggaggtaaggcgaagatgttagtatcattagaatggttaaaagattatacagaagttaatgtttcagatgagaaattctgtgatgatatggttatgtccggttcaaaccttgaaacctgcgagcacgttggcggcgggctttcaaatgttgttgtcggcagaatcgaaaaaatagaaaagcaccctgatgcggacaagctggttgtgtgtcagctcaatgtgggaaaagacgagccggtacagatagttacaggcgcaactaatgtatatgagggagcaatagttccggtagcgcttcacaacagcagaattccgggacctctgcacggacagccaaagacagagggcggagtcaagattaccaagggcaagctcagaggcgttgaatctttcggtatgctctgcggaccacaggagctgggtcttgacgacaaggtggcgccatatatctcaaaggacggaatatggcttttaaacgacgaatttgaaatcggcgcagagctttcagaggcgcttggacttgaggacacagtagttgactttgaaataactcctaacagacctgactgcctttcaatgatcggaatggcaagagaggctgcggcagtattcggcacagagcttgaataccctgaaacagagtgcgaccacgaggagggaaatgcagcggattatatcgcagttgatattcagtcagacctttgcagaagatatacggcaagaatagttaaagacgtagtaataaagcagtcgccttggtggatacagaaacgactcatcagagcgggcatgagacctatcaataacatcgttgacattacaaacttcgtaatgcttgaatacggtcagcctatacatgcatttgatatcaacactcttgcaggaggcaaggttgtaatcagaacagcaaacgagggagataaattcactacccttgatgaaacagagagaactctttcagagggcatgctgatgatatgtgatgccgaaaaacctgcagcaatagcaggcgttatgggcggacttgattcagacatcagggacaatacgacaacaatcgtggttgaatccgcaaactttgcaggtgacagtgtcagaacaacctcaaagaagctgggacttcgtacagaagcatcggcaagatttgaaaagggcatagaccctaacctgtgcgctaaggctgctgacagagtggtaaaactcatagagcttacaggagcaggcacacctgttgcaggaagcgttgacgtttatccgcaggaaatcaaggcagagcctgttcacgcaagagtttcaagaataaacaaagtgctgggtgttgaacttacaagagaatttatggtaaacgctcttgagagtctggaaatgacagttacaggcgagggcgatgatatgtacgttacggctcctacagtaagacaggatatccacattgaagaggatatcgttgaggaagtaggcagaatgtacggctttgacaagcttcctgttacaattcctagaggcaacagcgaggcagtaaagcctgacgacagaattttaagagatttggcgagagacactatggttgcaatgggcgcaacagaaatccagacatactcgtttgtaagccctaagggcgttgacaactgcagaattgacgaggattcatgggaaagatgcttcgtaagaattatcaatccgctgggagaggaaaactcggtaatgagaactatccttactcctaatatgctggaggttctctcaagaaactacacaagaaacatagaagccgtaaaggcatttgaaataggcaacacatttatggcagacctgtttgacgagaaagctcttcctgaagagagctactcgatgtgcgttggtatgtacggcaaagacgccgacttctacgcgctcaagggcatgatagtagagttgctttcgataatgggcatcagagatgttgaatttgtcgcagaatcagaatacggagtataccatccgggcagatgcgcaagaataattgcaagaattcctaaaaaggcaatgcctgaggttgacgatctcaaaaaacttatcctgacaggagaggttgaaggcacagaggaatacaacaagctcaaggatataatcgagaacagcgatcctgttgcaatgggagattatgaacaggttgagcttggtatcatgggtgaggttcaccctgaggttacggcaaaatatcagataaagacaagatgctatgtatgcgagctgctgtttgatacagtatgtgaaatttcagatacagacaaggcatataaacagcttcctaaatatccgtcaacctcaagagatatcgcgcttcttgtagacgaaaatatggaagttggaaccatcgaaaaggttataaaggctgcggcttccgaaatactcaaaaacgtcaagctgtttgacatatacagaggcgagcaggttgcagacggcaagaagagcgttgcattcacactgacatatcaggacgaaagcaagactcttactgatgatgacgttgctcctgttcacggtaatatacttaaggctcttgaagaaactctgggagctgttcttcgtgaaatgtaatcggggagtacggttatggaaaacaataaggttaaaatcagaatatacgggcaggaatacactatagtaggtgagagaagccaggatgagattatcaaggcggcgcagtatgtagacgagcgcatgcagttcataggcagaaactcaaatctgggttccaccacgtcacttgcagtgctttccgctgtcaacatagctgatgagatattttctattaaagaagagcttgagcagctcagaacactgaatgcacagcttgaggccgacgccaaaaagtatgtggatctgtgggacgatgccaaaaaaaacgtaatacagtacagaaatgaaatagaggatctgcgcaaaaaagcgtcagatgactcacagcttagagaaatacagagaagatacaaggagcttgaaagcagcttcttcgatcttcagatggaaaacgttcagctcaaaagcagactggacaagactgaaaaatagacaatagcaagaggtttggaagcggctctatgaataacaaaagcataaaaattctggaatacaacaaaataattgagatgctcaaggctggagctgcttcggagatgacaaggcaggtgatatcagagattaagcctctgaccgatatctatgagataagacacctgctgcagcagaccacagaggcggtcaaggttattgtagttaaaggcaacccgcctatgagcgcgttttacgatatagccccggctcttatgagagcaagaaaaggcggagcgctgacaatgcagcagctgcttcaaatatcctataatatgcgaacagcaaggactatgagtgcatttctcgaaaaggatctgaccgaaattccggcgcttactgcaatcagagaggtcatctcagtaaacagagatctcgaaaatgaaataacaagatgtattctgtcagaggacgaaatggcagacaacgcctctcctgagcttcgcagcatcagaagaagcatagtaaggcagaatgaggctatcaaggcaaagatgaatcatatgctgggctctgccgaaaacaaaacacttctgcaggattccatcgttacgatgagggacggcagatatgtaatacctgttaagcaggagcaccgctccaaattcccgggtatagttcacgaccagtcctcgacaggcgcaaccctgttcatagagccgcaggttatcgtcaatatgaacaatgagctcaagcagctttttcttgacgaaaaaaaagaaatcgacagaatacttgcggagctttcagacagagttgcagagaattatcacgggctttacaacaaccagaagctgctggtggagcttgactatatatttgcaaagggcaagctgtcgctttcctacagaggcgaggagcctcacataagcgatgagggtatacttgatcttaaacaggcaagacatccgctgctggatcagaaaaaagcagtccctatcaacgcttcactgggcaggaactacagcacgctgataataacagggcctaatacgggaggcaaaaccgtaactctcaaaacagcgggacttctttcgatgatggcggcagcgggacttcatattccggcctcctccgagagcataatccctgtgtttgaggacatatttgcggatataggagatgagcagagcatagagcagagtctttcgactttctcatcgcatatgaacaatatagtcaatatcgttgacagagcaggccccggctgtcttgtgctgcttgacgagcttggcgcgggtacagaccccacagagggagccgcccttgcaatagcagtcctcgaaaagcttagggcaaacggcgcgcttatatttgcaacgactcactatacggagctcaaaaaatacgccatatccacagcaggtgttcagaatgcctcgatggaatttgacgttgaaaccctgagcccgacctacagacttacaataggaataccgggcaaatcaaacgcctttgaaatatcccgcaagctgggactttcagagagcataatagacaaggcaagagagcttcttgagggcagggacatagaatttgaagatgtaatagcagcccttgaggacgaccgcaagagagcggaggaggagcgcgatcaggctatagctctgaacattgcaatgaaaaagcagaagcaggagcttgagcagcgtgaggccgagataaaacagaaaaaatcagaaatacttgcaaaggcaagagaagaagcaagagaaatagtaagagaagcaagagataccaccagagaggttcagaaagagcttagggaattaaacagaatagacagtatcgcagagcgaaataaggtgtttgacgagggcagacgaaaggtcagaaaccttgagggcaggtatcgtgaaaaaatagtaaagcaggtaaacaacaagcctgtaaaagcatccgacctgaagataggaaacagagtcaaggtgctttcccttgatcagaacggcgaaattatgagcctgcctgacgacaagggcaatatgacggtacagatgggaatactcaaggcaaccgtcaacatcaaagacataatgcttatagacgatgtcaaaaaacaaaagccttctcctaagcagagaaactacagcagtatgtatcaggccaaggctatgaatatgagtacgacaatcaatgtcagaggccagaaccttgatgatgccgttatgaatgtggataaatatcttgatgatgcgtttatggcaggcttaaaagaggtcactgtcattcacggcagaggcgagggtattctgcgtacagggcttcagcagatgatgaagcgccacaagcacgttaaagctttccgaaagggtgcctacaatgagggcggagacggagttacaatagtacagttaaaatagagaggtaaacagatgaaagactacaggcagcttatagctgaaataattgcaccatgtgtagagggacttgaggcttccgaaatcagagaaatggtggaggttcctgctgacagcaaaatgggagattatgcattcccgtgcttcaagctggcaaaactgctcagaaaggcgccgcctttaattgcaaaatcaatagcggagcagattgcgtcagatgaaatattcgaaaaggtggaaagcgtcaatgcgtatgttaatatgttcatatcaagagacgcattcattgacgatgtagtaaaagaggtaatcgcaaagggcgatgctttcggctcatcggacattggcgcaggcaggaaggtaatagtggaatattcatcgcctaacattgcaaagccgtttcatataggacatatcagaagtacggttataggtaattccatatacaagatatatgactttttaggctatgatgctttcagaataaaccatctgggagactacggcacacagttcggcaagatgatatgcgcctacagacactggggcaacaaggaagatgtcataaacgagcctatcaagacacttctcagctactacaccaaattccacgttgaagttgaaactcatcctgagcttgacgatgaggcaagagaaatctttgcaaaactcgaaaagggcgagcctgaggaggttgcgctctggcagtggttcagagatgaatccctcaaggaattcacaagagtatacaagatgctgggaatagaattcgactcctacaacggagaaagcttttactcagacaagatgcctagatttgtagaggagctaaaggcaaagggactgcttgaggaatcacagggtgcgcagattgtaaaccttgaggaatacggtatgtcgcctgcccttattacaaaatcagacggctccacattatatataacaagagatattgccgctgcggtatacagaaaagaaacatatgacttctacaagaacctgtatatagttgcatcacagcagaacctgcatttccagcagtggattaagattttagaacttatgggctatgaatgggcaaaggactgcgttcacattccgttcggacttgtatctcttgaagaggggaccatgtctacaagacacggcagagttgtgttccttgaagatgttttaaacagagctgtagatgaaacaagaaaaataatcagggaaaaaggcgttgcaactgagaatatagacgaaaccgcaaaacaggtgggtatcggcgccgttatattccaggaattatcaaacaacagaattaaagactatgtattctcatgggacaaggtgcttgatttcaacggtgaaacaggaccgtatgtacagtacacctatgcgagagctgcaagccttatgagaagagcagacgcaggcgctcttgcaaaagcgcaggctggcgatatagatgtaacatatatcagaggagatgcggcatatgagcttgttaagcttttagaggctttccctgaagttgttcttgaggctgcagacaaatatgaaccgtctgttgttacaagacatatagttgatattgcgcagagctttaacagattctatcacgatgagcatatcatagttgagaatatcgaagaacaggcggcaaaacttgcacttgcacaggctgctaagaatactataaagaatggtctgggactactgggaattcagtgtccggaaaggatgtaattaaatgataaaatacgttggtgatgtatacagaccgccaagtgaggcgtacagcctgatagttcaggctaccataggatgtactcataacaaatgctcattctgcaaaatgttcaaggaaaaaagattccagacaagaccgacagaggatattattgcggattttgcgtgggcaagaaaaagatacagaagcgtgccgaggatattccttgcggatgcgaacgctctgtgccttaagacagacaaactgatgccgatactgacatatatagaagaaactttcccggaatgtgaaagagttactatatacggcagagcatcggacgttttaagaaaaacagaagacgaattgagacagctcagagagcacggtcttacaatggtatatataggcgctgaatcaggcagcgacaaggtgcttgaaatgtgtcgcaagggcgaaacaagacagcagctgattgatgccgtaaagagaatcgaaaaagtcggtatcaaggcatcagtgacattcataagcggtcttgcaggcaaagacggctgggaggatcacgctatacagacaggcactatgattacggaaatgaacgcttcgtatgtcagccttctgacgcttcttgtagatcctcaggctcctatgtacgaggatatacagagcggcagactcaagctgcttacaccgcaggaggtgcttgccgaaacacatctgatgctggagaatgcaaaccctgaaaaaacatgtatattcagaagcaatcacgcctcaaactatctgtcactcaagggcgatctgcctcaggacagagacagatttctggcgcagattgaagctgcaatgaaaaacaccggtatgttaaaagacgaaaggttcagactgctgtagattaatgatatgaagatattacttacaacgcttaattccaaatatgttcattccaatctggcgctcaaatatctctatgcggcggggcttcccaactgccccggacttgagataaaggagtttaccatcaacaatgaggacgactatatatatacggagcttgtcagaaatgaatatgatgtagtatgcttttcatgctacatatggaatatagagaaaattaaatatctgtgtgaaaatctcaaaaaagcaaagcctgaaatcaggattgtatgcggaggacctgaggtaagctatgataccgaaagcttcatgtccgaaaaccctgcggtcgatgccgttattttcggcgaaggcgaatacgctttcagcatgctgtgcagggcgctgacaaagggaaccccaaagtttcctgacattaagggccttgcctacagagcaggaggccggataattgtaaatgcgcctatgccgcctgttaaattcagcagcctgccgtttccgtacgaggtgcttccggcagaggaggacaaaatcgtttattacgaatcctcaagaggctgcccgtacaactgcagctactgcatttcatctatagacaagacggtaagggcgctgccggcagagagagtgaaagacgaactgtcatactttatacacaagcgtgtgaagcaggtgaagtttatagacaggacttttaactgggacagaaacaggtgcatcgagatactggagtatcttgtgcttatggataacggcgtgaccaatttccattttgagctttgcggcgaccttatagacgaccgcctcatacagcttgcaggcagcgccagagcaggtctgttccagtttgagataggcatacagaccacaaatccgcttaccctgcgggccataaacagaagaagcgaaatcgaaacctgcctcaaaaacatacgaaagctttcaaggcttggggcggctcatgttcatgtggatctgattacgggacttccttttgaggatatgaactccctcagaacgtcatttaacaatatataccctgtaggcgcagactgcatacaggtgggatttttaaagatgctaaagggaacggcggtcagatatcacgaggagttctacaactatatatacagaagcaaagctccgtacgaagtaatatcgaattcatttatgacctcaagagaggtcgtgagagtaaaacagcttgaaaatgtacttgacctgttttacaataaaggaggttttgagtttgccctcaattaccttatcggcaaatcagaaatgactccgtttgatttttatacggaattatcggattactactatatcaaaggctatcagcacaggagtcattcaaaagaggatttgtacagaattctttacggatatgctatgtggaaatgcagacattcgggagtcgaccgggaagaagccataagatatctggagcaggatatgaagctgcggctcaatgaagacgcagtcagaaaatttatgaaaaaaggatgggaattccctcaggagaaaagatggcaagagaatataaggatttaaaacaggaaaaatcatttgcagcgagaataggaattaaacagacagtgaaaattcctatcgaggaaatggaccttaaaatcagagaggacaggataggcagatactttaagaaatatctcaataaatttgtatttgctgagttttcggatgagtttctgagcaccttcaaggctgcggatattatgagaggcgttccgattccgctcagaaaacaggatattaaagaattcaacggaggaagcggtatttcaatgcttcatattgcagagaatatggcatgggtaatcggctgcgaccctcacttcaaatatacacagagctacgttgactgcatggacagactctacggtaaaaaaatctgcgagggtctgctcaaagaaggcagagatgcggcagaactcaaggactacgacaatgcctgcatacatttcagagcatcgctttgcatgcagccggactatctgcacgcaatgtattcctatgccagagtatgcagagtaatgtacaccagcagcaaaaacagagaatatgtaggcagaatgaaagccgaatctcttgatttctttgaatttatggtggcagtgcacccaagacacgcgcaatcatactactatctggggtacgcttatctgaatatgggtcagtacatcaaggcaagacttgtatggaacgatttcctcagattcagcaaaaacggcaaggataaaaaagaaatccgcaagagaatagagcagattgcaaagcctgtgtacatagaagaaggatgcaatgacgttatggcaggcagatttgaggatggaattaagaagcttgaaaccttcctcgacgatgactacagtaaatggtggccgcttcactattatcttggagtggcatatgaaagatgcggcaggaccgatgatgcaatagagagatttaaacaggttctcaagatgaacggaagtcatctcgaaaccatggaagagctttatgccatatattcttcggcaggagatgaagccggagccaacaaataccgaaagaaaatggctatcatcaggaaacagcttgaagaagaagctgaagccgttgcaaaagaagaagaaagagaaagcaccatttccggtatcgaagagtctgatgctcttgacagagaatacgaaaaaactcctgttgaaaagatcattcagaaaggcagtgaggcgcagtccaagcttgatgcaatcaaaaaagaaagagcggagactatggacagcgaactggcagaggcaatgaagaagagaaaacaggaagttgccaagggatcgagacctacaaagagattaaaatagcaaaaatgagcctgcgggctcattttatttatgtagttttgatttttagaaatgcacataacagagggtttggaagctgccggacaggcagcaaaaacttttaaaaagaatttcaaaaaagggattgacaaaagggagtggatttgataagataatctagctgtcgccgagaggcagacagcggtattctaaataaacagcttctgaaa

SEQ ID NO: 2176 - DNA, 32759 bp, Unknown
  16S sequences of unknown bacteria
tccactccaaaccgataaagttttttgggggagaatcccctgcacctccgcgactgacgtcgcggtcttgcgataaaacaggcgcgcatttacagcgcgccttttttgtgccttctacgcattgcttggctttttagccgcgcaattgctgtccactccaaaccgataaagttttttgggggagaatcccctgcacctccgcgactgacgtcgcggtcttgcgataaaacaggcgcgcatttacagcgcgcctttttttgtgccttctgcgcattgcttggctttttagttaatatttcctttctaaaaattttctcatagaaaactatttttattaaaaatttctaaataaaaaatattcctcaacacatacttttctatatggtttgtgcaaattgcaaactaagcataaatatatggcagccaatcgcggttatagatattttgttgactctaaaaaatataaaaaatatattctttatatgaataagtttatatcttttgcgtccttagcactgctcacttcctccacagctttttgcgacatgatgtccgatattgtaggagatttgacaatgcctccgcccacggatatttcccagaattttccctatggcatcaccgcaaaaactccaccttacatacaaaaaattttaagtaaaaaagggcgcgctccgtatcgaatgaacctgcgcatattccaggggtgcccaacaatcgagtcgtctaaaaacggaaggctatgggcggcgtatttcggcagcaacgagcaaaatgaaggcaacggaatgttttccaaaaaagaaaaaatattcccatatcagccaaacgatgttgcacatgcgggacaattcacagtaattgctacaagcgccgacggcggtaaaacttggaaggaagttttcgtgttcgatccctcaaaagtcatgaacgggacatcgagcgaccccctactttggaaagacgccgacggaaatattcgttttacagtagtgagaaatatggatgtaggcgacaaggaaatcggcacaaccgccacttgggagtttataatgctcgaccctgagagcgaaaatacgggctggtcaaaaccgagacttgtttgcaaggtaaatgcctctgtaatgaagcccctcgtattcccggacggttcccttctaagaccgtgcgccacgtggggtcatccgcacaaggcctattttataaaagaatcgcgcgatggtaaagcggaatttgtctcgcgcatatatgacgacaaggtgaattttggagagcaatcggttattctccgcaaagacgggtcaatattttcgactttgcgccgcgccccatggaatccggtcgcggggtttgaatcgcgcgacggcggcaaaacttggaaggaagtagggtttccggaaaaaatttcggtggcgacaaaaactgttttatttagggcaaaatccggaaatataatacttgttggcaacgacgcaaaaattgtaaaaattgagaatgacaaacccgaatttgaagaagtgcgggacattaacggcaaagtggttaagccgcgcgggctcagaacctgcatgactgcatttataagctacgacgacgggaaaacattccctaaaaaaatactgctcgacgagcgctttactagctatccgtccatatgcgagcacgatggcttcctttatatcgcctacgacaattctcgcacgggatacaaacatcaggaaattatgctggcaaaaattacggaggcggatatcgaggccgggaaactcgtaaatccggagtcaaagttgaagatggaaatatctgcgccctacaagcacggaggcggagttagaaaagacgataagctactttgatgcaaaaaaaagccgtcttaaaaagggcggcttttttcatgcttttaatatcttccaaaaaatagaaatttcgcggatatttttattgataccgcattttgcacttatacttatgaatcctgccctaatcaaaaaattttgcattaactaaaaaacatttggctcttttaaaaaacttgcaatccccagtgttgcgtgcattattttttgcaatttttatataaaaactcgaacggtaaaaattatgtcacagataaagacgataaaagacgtggatctcaaaggcaaaaaagtctttgtgcgcgtagacttcaacgtccccttcgacaacaaaggggaaattagcgacgacacccgcatcgttgcggctctgccgacgataaaatacctcatagacgaaggcgccatgcttgttctgacaagccacctcggacgcccgaagagcaaggaagacaaacaattctccctcgcgcccgtcgccaaggctctctcggaaaaactcggcaaacccgtcgtatttgttgacgattgcatcggaccgaaggttaaggaagcttgcgcggccatgaaacccggagacgtcgttttgctcgaaaattcccgcttctatcccgaagaaaagaaaaacgatcccgaattcgccaaaaagctcgccgaagacaccggcgctgaggcgtatgtcaacgacgctttcggcactgcccacagagcacatgctacaaccgcaggagtagccgcatacctcccgattaaagttgcggggctcctcatcgaaaaggaactcgaattcctcggttcaaaaaccgaaaatccggagcgccccttcactgtaattctcggcggagcgaaagtttccgacaagattactgtcatcgattccctcctcgacaagtgcgattcaatgctcatcggcggcgctatggcttacacttttgcgctcgcgcagggcaagaaagtcggaaagagcctcgttgaagccgacaaggttgatctcgctctcgccgccctcaaaaaggcgaaggacaagggtgtcaatttccttttgccggttgacaatgtcgtttgccaaacaattgattttgcggctggaactgtcggagaattgaaggtaatggaaggtatcgaggacggctgggcaggcgttgatatcggccccaagactgtcgagctttacaagaatgaaattgcgaagagcaaaacaattctttggaacggcccgatgggcgtatttgaaattaaagaatgcgcaaagggcactttcgcaatcgcagaagctgtcgcaaagagcgacgccataagcattgtcggcggcggagactccgtaaaggccgtaaaaaagagcggctatgcgaaagacgtcacattcatttccactggcggcggcgcttccctcgaattcctcgaaggcaagcaattgcccggtgtcgcagttctcgacagaaaataattttaacaaaaggagaataaaaaaatgtcccgcaaatatttcatagcaggaaattggaaaatgaacaaaacggccgcagaagcgaccgctttgatagaggcaatcaacgaaaaagccggctcgcagaccaaggttgacgtcgctgtatgcccgcccttcaccgctctcgacgcggcttcaaaggcgcttgcaggctcgaccgtaaagctcggcgcacaaaatatgtactttgaaaaaagcggcgcctacactggcgaaattgccgccgatatgctcaaagaattcggctgcacatacgtcatcctcggtcacagcgaacgccgcgaatacttcaaggaatgcaactgcctaatcaataaaaaggtgaaggcggttctctcaaacggaatgaatcctatcctttgcgttggcgaaaagcttgaagaacgtgaagccggcaagactctcgacattgtctctgagcagacggtaaaaggcctcgaaggcttgaccgccgccgaggctgaaaaagttgtaatcgcttacgagcctgtatgggctatcggaacgggcaaaactgcaactcccgcaatggcgcaggaagtgcatgccgcaatccgcaagattctcgccggcacttttggcgcggaagttgccgaaaaaatgcaaatcctctacggcggctcaatgaagcccgagaatgccgacgcgctcctcgccgaaaaagacatcgacggcggcttgattggcggcgcggcattgaaggcggacagctttgtcgccctcattgaaagcgcctcgaaagcattgtaatttttcttaaaattttccaagagccgggtgcataaacgcccggctttttttatacaaaaatccattgctgactgttaggccaacattgtctgtgctcattgcgcagggctttttttatatgaattttctgccagtttctatgcgtttaataaaaatgcttcaaaaaaatataaaaaaaggcgcaaagaaaggaatatgcttgcaaggaaagcaaatttttgaggttatagagtgcaaggtcgggccccatgcaatttgcggcgacgcgaaccccgccagatccggaaggaagcaacggtagcgatcacccaaatgtgccgtgggtcgcctgaccccctactctttattttttaagactcatggcttccgaatccgacatttttataaaaaatgcgcctgcgcatgtggcgattattatggacggcaacggaaggtgggctaaggagcgcggcaaaccgcgcatttttgggcataaagagggcgccaatagaatccgcgaagtgatggacgccgcgcgggaagccggagtcaagttccttaccctctatgcgttttcttccgaaaactggaatagaccccaggatgaagtcgaggcattgatgaatctgcttgttgccgcaataaatgaatacggcggggagcttgttgaaaataaaataagattccgcacgataggcgatatctcagccctgccgcaaaaatgccaagacgccgttgcagatctttctaaaaaaaccgaaaacttttcggaatccaccctcgtgctcgcactaaactacggctcgcgcgacgaaatcgctatggctgcgagaaaaattgcagaaaaggttttgaaaggagacttggatccttcctcgataaattgggaaaaaatttccgggcagctgtacacatcggatattcctgatcctgacttaataattagaacttccggcgaacagcgcctgagcaatttcttaatgctacaagccgcatattcggaactatactttacagacgtttattggccagactttggcaggaaggagttcctcaaggccgtcgaggaattcaaactgcgcgaaaggcgttacggcaaaaccgccgatcaactctaaatatccgtatgttagccagaacttttagcacgattctgctttgggctgcaactttgcttgcaataatatatttcgccgcatacggctgggcggtcatagtggcgcttctgtcggccgccgcgttgcatgaagtttttgaggttcaaagaaaaatcggatttaaaccgtcggagacttttgggcaaattgcctcaatcgcaatttttttatgcgtttggatagattccgaactcgcaatatcgggcggctttggggggagcttggcgtttgcgctttcgcttacggcaatatcttgctgcgtcctaaaacacccatactccgaattttttaaagagactactttgccgacaatttgcgctatatccactgttccgttcatgttgcagtggctcgttgtcttagggtttgcggatttcggtttgtcgaaatatacgggggtaattctatcaatttggattttggccgccgcaaaattttccgacgtaggcgcgtacgttcttggttcggcattcggccggcacaaaatggcgccgtccataagccccaagaaaacatgggagggcgcagtcggagggcttttttcatcagccgcagtgtcggcggcaatcgcttgcggctttgcggattccctgcctgcgcaattcactccgcccatagctgccgtagccggaattttaatcggagcagtcgctatactctcagacctcctcgaatccgtctttaaaagggtcgccggagtcaaggactcgggctctctgattcccggaattggaggagctctcgacctcgccgactcgctattgctttcggctccgcttggaacagtcctgctaatctttatacttcaactatgaaacgcaaaaatcttgtgatactcggggcaacaggctccatcggggacagcacccttaaagtcgtaaggggaaatcccgaaaggctaaacgtcctcggaatcgctggcaaaaagaactacgaaaaactcgccaaaatagccgacgaatttaatgtgcgccacgttgcaattttcgacgacgccgcttacgacgccgcagtggaatccgggcttttcaaggggcgcaaactatatagaggcgcggaaggccttatggaaatatccgtcttgcctgaggccgacactctcgttgcggcggtagtcggaacgcaggctctaaagccgactttggccgcaatccgcgccggcaaagatattgcgcttgcaaacaaagagttgctggtaatggccggaaaatttgtcatgggatacgcgaaggagaacaatgttgcaatcctcccgctcgactccgagcacaacgcgatattccagtgcattaacggcgagcgcaagcgcgacatcgcaaagcttctcatcacggcttccggaggaatgttccgcgactacacgcgtgagcaaatgctctccataaaaccccaagacgccctgcgccacccaaattggaaaatgggcccgaaagtcacgatagactcatcgaccctcgccaacaaggggcttgaagttatagaggcgaaatggcttttcggcgtcgagcctgaaaatatacaggttgttgtgcagaggcagagcctcgtccactccatggtgcaatttgtggacgggtccgttttggcgcatttttctccgccgtctatgactttcgctatttcccacagcctcctctaccccgagcgcggaaattgcgtctgcgagcccatagatttttcaaggggcttttcgatagacttcgccccgccggacacggagcgctttccgtgcttaaagcacgcgtacaacgcgcttaaagcgggcgggacagccacggctgtattcaacgcctcaaatgaagttgcggtatcccgcttcatagagggaaaactcccgtggataaaaataccaaacgttatagaaaaaaccctcgaagccgtatcggcaaaggatccacagacacttgacgacattcttgccgacgatgcgctcgcgcgcgtcaaagcgcttgaaattgcggagtcaatcgcgtaaatgacggacatagctgagattttttcaaacacgtgggcgataatactcgttctgctgtttttcggaggctcgatttttgtgcacgagctcgggcacttcctcgccgcaaaaatgcgcgggcttaaagtaataaaattttctattgggtttgggcccgcaatattctcgcgcaaaggcaaagacggctgcgaataccttgttggcgcgctcccgctcggcggatacgtagcgattccgcaacttgccgacttgtccgcattggagggaactgattcatcggagggcaaaaaccttccaaaggcctcatgtaccgacaaagtcatagtaagcgcggcaggcgcattttttaatttattgctcgcggcgtttctcggtctatttgtatggattttcggagtccccacaagcgactcggaagcgacaaccgtcgtcggatacgtctcaaagactctcactggcgccgacgggaaatcggtggactcgccggcgcacaaggccggactgctcccgggcgataaaattttgtctgttgacggctccaaagtgtccgacttcatgcagattatagagaaaatcgcgataggctcggggcgcactgcaaacggctcaccaaaagcggtgctcgaaatccaacgaggcgcggacatctttccggtggaggttttccccgagcttataaaaacaaatccgtcatccggcgacgagatacgcatgataggcatatcccccgcaatgactatgaaaatcggcactcttatggagggctcccccgcgaaggccggaggggcgaaacccggcgacatagtcgtatccataaacgggcaaaaactttattcaaatatgcagctttccgacattttggcgaaagtcgaggaaggcgaaactgtggaacttggcgtaatccgcaacgggactcctacatcgctaaaaattgcgcctgcgaaaatcgcgcttacaaagtctctttgcaaagtaaaactccccgaaggagccggatttttatcgttcatttcggtatctcccaaaaatccctctaaaacttccgcagaaacaataaagcttttctcgaaggaggcggcgtatccgcaattctcaaaaatcgaggcgggagacattctttacagagtcggacaaacccgggttgagtcgctgtcgcagctcaacgcgctaataaatgcgggtcttggcccggacggagccgcaatgttcttttccgacgagaatatgaaattgaaatcggtgcaccttcccgcaggctccacctccgaaatactgccgccgcgcgaaaaaatgatgctcggatacatccttgaaaacgtaatagttgtgcgccacccgtccatcgcaaaacaattccgcgacagcctcgaacgcacgtactccgcaatggcgagcctcgtgaatccgcgaagcgacgtcgggattgcgagccttgcggggcctgtcgatatcggaagggttatttacaagctctctcttacggacatctctttgatgctgtccttcgcggttctgctaaacgtaaacttggccattttaaatatgcttccggttccggttctcgacggggggcacattttgtttgcgctgattgaaaaaattcgcggaaagcccctgccgccctctttcttcatggctgttcaatccttcttttccatcctttttatggtgctcatgggctatgtggtttacctcggatttttaagatggagcggagattcaaaatacgaatcttccatggaaaaaacctcgcaatactatttaaaggacatttcatttaaaaagcatgaataactattgcctatcaagattcaactgcgtcagaaaaccggttcgcactgtccatgtagggggtgtcgaaatcggcggcgataaaatcgtcgtgcaatcaatgacaaacacaaaaacttgcgacgttgacgcttccgtgcgccagtgcatacagcttgcagaggccggatgccaaatcgtgaggcttacggcgcagaatctcgaggcggcaaaggctcttggggagatttcaaagaaattccgcgcggcgggttttgaaacgccgcttgttgcggatatacattttctgccggcaactgcaatggaggctgttgagcatgtcgaaaaaatacgcgtaaaccccggcaactttacggacaaacagcgcaccgactccaaagcggaatattcggacgcagaatacgccgccgacctcgagcgcgcccgcgaaaaattcatacccctcgtccgccgctgcaaagagctcggcagagccatacgcattggtacaaaccacggctctctctccgacagaataatccgcaggtacggcgacaccccggagggaatggtcgttgccgcatttgagtttgcgcgcatgtgcatagacgaaaacttccacaatttcctgttctcgtttaaatcgagcaacacgcgcgtaatgacgcaggcttacaggctcgcggcttcaaaaatgagcgcggagctcggggcgtcttaccccctgcacttgggagtgaccgaagcggggctcgggattgacgcccgcgtaaaaagcgcaatgggcataggcggcctgctattcgacgggcttggagacactataagagtctccttaacggaggatcctgtggaggagatacctgtcgcgctttcgcttgcgcgccttgcggaaaaggtgcgctcggccaaggctgtcgcgcaaaagccggaaggaattgacttttactcgtactcgcgccgcaaatgccggaccctcgaatgcggaaagcttaaaattggtgccaaggctgttccagcggcggcggctttcggcaagacttcatgcgcggatttttgcgtaatagacggcgttgccaagctcgagaacggcgcaaagctcgaaatttccgcatacggggcaaatgacgcccaaaaactcgcagcagacgcctcccgcgcccagattttggccgcccttgtagatactgccgacgtaaaggcgctcgccccgaccttaaaaacaataaccaacgtagtattgatagtgccctcacccgcggacggccgccacagcgtgggcgaagcgcgaatgtttgcagccaccctgcgtgaatttggcatagacgcgccgatatggcttaaattcgacaagtccatcgccgtaaatcccgaagccgacgagatggggctcttgaacgaggccgccatatatatcggatccctaatggtggacggcataggcgacatcgcctcggtcgaaataacgggcgatccccaaaaagacgccaaatattgcctcgcaatactccaaggtgcgcgtgcgcgccgctcaaaggccgagtacatcgcatgcccgagctgcgggcgcaccctgtacgatattcaagacgcatttgccaaaatacaggcggcgacgagccacctaaaagacgtcacaatcggagtgatgggttgcattgtaaacggccccggagaaatggcagacgccgacttcgggtatgtaggcggagctcccggtaagataaatctctataaaaacaaagtctgcgttgaaaaaaacattccacaagaaaagtccatagaaaggttagttgagctaatcaaaaaagaaggtcgttggactgaaccaaacggaaagtaagcttccgcaaattttaaaaatttgcaaacgcaggattggcggaaaatcccctccttaaaataaagaaacgcgcttgttgggcgcgttttttttatttttttgaaggcaaaaatcaggcgtttttttcaaataaaatgttgcctaagcgctaagcgtatataatattactaatatgccgccaacaaagtgggggactctcttttttttgcgggttgacgcggagtcggcggcttgaaatatcggcgcaaaaaaggcagaaaataccggaaaaattttaccgtaaaaacggccttccccgcccgaaaaacgaatttaataaaataaataaaaatggctgatacaaacaaacctaacgacaattacgacgcgtcaaagatacaaaagctcgaagggctcgaaggcgtgagaaaacgccccgacatgtatatcggagacactaacgaaagagggctgcaccactgcgtatttgaaattgtggacaactcgatagacgaggccctcgccgggtactgcaatctcatcaaagtaagcattcacaacgacggctcatgctcggtggaggacaacggccgcggcataccggtcgatatccaccccaaatataaaattcccgcactcgagcttgtaatgacaaacctccacgcaggcggaaaattcggcaagggcgcctaccaagtatcgggcggcctgcacggtgtcggcgcaaaatgcgtaaatgcggtgtcggaatattttgaagtcgaggtccgcaagggcggaaaaatctacaaaatggaattttcccgcggcaaaacgaccatgcccatgaccatcatcggcaacactaaaacgaccggcacaaaaatcaccttcattcccgacccccagatattcaccctcacaagggaatttaagtacgagattctttccaagcgcctaagggagctcgcgttcctcaacccgggtatcacaatcgaactctccgacgaacgcataaacaagcgcgaaactttcaactttaaaaacggaatctcggaatacgtccaatacctcaaccgcgcaaaggtggtcgtaaacccgaaagtaatatacttttcgggcgaagctcccgccgcggaaggttccgattccctcattaaagtcgatattgccctgcaatacaacgattcctacaacgagcaggtttacgcctacgcaaactcaatcttcaatgtcgagggtggaacgcatctgagcggattcaggacggccctcacccgcgtaataaacaactacgcgaaggctaacggcctcataaaggacaaagatcccgcgatatctggcgacgactgccgcgaggggctcaccacagtaatttcggtaaaagtgccagagccgcgctttgagggccaaacaaaaacaaaactttccaacggggaagttgacggcatagtccaaaaaatcgtcggcgaaaaattaaagtactattttgaaacaaacccctcaatcgccaaaaaaataatagacaagtgcgtcatggcagcgcgcgcgcgcgacgccgcccgcaaagcgcgcgagacagtccgcaagacagtcctctccgcaggcggcctaccaggaaaactcgcagactgctcggaaaaagacccgtctttgtgtgagctttacattgtcgagggcgactccgctggcggttccgccaagatggggcgcgacagaaaataccaggccattttgccgataaggggaaagctcttaaacgtcgagaaggcgcgcctcgacaaggttctaaacaacaatgaaatccgcacgataatcaccgcttgcggaaccggcataggcgaatccggcgaaggcgcgtttgacgtcaccaaggcgcgctaccacaaggttgtcattatgaccgacgccgatgttgacggctcgcacatcaggacgctgcttttgactttcttcttccgccaaatgcgcgggctaattgaaaacggatacgtgtacattgcccagcctcccctttatagaataaagagaaaaaagcgcgagcaatacgtaatgaacgacgccgaaatgaataagatacttctcactctcggctcggaagacgtcacccttacgcgcgtgcgcgacaattttgagttcccgccgcaaaaggttgacaaattggttgagatgctctcgcgcctcgaaacgctcgggcacgggattacccgctatgcatgctcgctttcgacgtatctcgacacgaaccgcgatggcaagcttcccaagtacattgcccgcgttagaaccggcaacaaggaggagttcaaatacatattcgacgaggacgaacgctcaaaattcttcgtggaatacggcaactccgaggatatttttgagggcaacacaatccgcgaagtcgtggacgagcttggaaataaagtccaacagcgcataaatgtgtacgaaatatacgaggcgcaccagatagaaaaaatcctcgcggaattcgcaaaagttgggcttgtagtgcagtcgttcacacccaccgaggagccgcgctacatcttaacggaaaacctcggcgccgacaaaaagaacgagtacaagctgtacagcattctcgaattagtctcaaagatacgcgagctcggcagaagggggcttagcatacagcgctacaaaggccttggagaaatgaacgccaaacagctctacgaaacaactatggacccgaataagcgctcattcctcaaagtgtcgattgacgacgccgccgaagccgacgcaacattctcgatgcttatgggcgaagacgttcccattcgccgcgccttcatagaagacaacgcgctcaacgcttcgtacctcgacatctaacaccaaaatttttaaaaaatgtacactgaaaacgaaacaataataaatacgagcattacccagataatgcaaagcgcgtacatcgactactcgatgtcggtgattatatcgcgcgcgctgcccgacgtgcgcgacggcttgaagcccgtgcaaagaagggttttgtacgcaatgctgcgcgagggccttttgcacaaccgcccgtttgacaaatgcgcgggcgtcgtaggggaagttttgaaaaactaccacccgcacggcgactcctccgtttacgacacgcttacaaggctcgcgcaggactgggttatgcgctatcccctcgtaatgccgcagggcaacttcggctcgattgagggcgatagccccgccgcataccgatacacggaatgtaagctcgcagaaatagcggaagatttgcttgcggatatagacagcgacaccgtcgatttcatgcccaactacaaggaaacgacgaccgagcccgtcgtcctaccctccgcccttcccactctgcttatgaatggctcaacgggcatagcagtcggcatgacaacaaatattccgccgcacaacctcgcggagttgattgacggaatctgcatgctaatcgacaatccctctactccattcgaggaattgcaaaaggtcataaaaggccccgacttcccgaccggcggcgtaatagtcggcagaaacggcatcgacagctacatgaaaaccgggcgcggcattgtaaagatacgcggtgtcgcaaacgtcgaggagttgaagaacggcaaggagcagattgtcattacggaaattccctacaacgttaacagaaactctctggttgaaaacattgcgcagctcgtcacggacaaagtcttgacggaggttagcgacatcagaaacgagtcggacgaaaatacgcgtgtggtagtcgaattaaagcgcggggagtcgccgagagtcgtgctcaacaagctttttaagcacacgcagcttgaagcgtcgttcggcgtaatattgctcgcgctcgacaagcgcaagccgaagttgatgaatatgcgtgaaatgctcgaatgctacatcgagcaccgcagggaagtcgtttaccgccgcacttgctacctattgcgcaaggccgaagaccgcgcccacatactcgaaggctacaaaatcgccctaaacaacctcgacgatttcataaaaatcataagggcgtcgaaggacagggacgaagccaagggcgctctaatggcaaaatatccgctctccgaacgccaagcaaacgcaatactcgacttgcgactccaccagctgacaggcctcgagcgcgagaaaatcgagaacgaatatctggaattaatgaggctcattgaagagtacaactccattcttaaaaacgagaaaaaactgctttccgtaataaagaaagagcttctgcaaatgcgtgaaaaatatccctccccgcgcaagacccagtttatggccgcggaaggcgaattccgcatggaagacgtcatcgcaaacgaaggctgcataatctccgtttcccacaacgggtttataaagcgcacgagcgttagcgcataccgctcgcagaagcgcggcggcaaaggcgtcatcggcagcgggcaatacgacgaagacttcatcgagcatatctttacggcctccacgcacgactacataatgttctttatgaataacggccgcgtgtacgtcgaaaaagtctatgagattcccgaaggcacgcgcatatcaaaggggcgctctataaaaaatgtactcgcgctccagccagacgaaaaagtcgccgcaatgatttgcgtcaaaaacctcgacgaccagcaccactcgctcgttatggcgactaaaaacggcgtcgtgaaaaagacgattctgtccgaatacaaaaattgccgcaagggcggaataataggcataactcttgacgaaggcgacgacctcataggagttgtcctcgcggaaaatgaagctaatatcattcttgtgacatacgcgggaatgtccatacgcttcaacgagaccgacctccgcgcgcagggccgcgcaacacgcggtgtaaagggtgtcaccctcaaaaagaaaaacgactgcgtcaaggcgattgtcgttgtagatcccaactccacgctgctcatagccggtgagatgggccaaggcaaaagaacttcgtacgatgaataccgcctgcaaaaccgcggaggctcgggagttatagccataaagacccacggggtcgcgggcgcgctctccgttaaggaggacgacgaaataatgatgtttacgcagggcggacaagctgttcgttccccggtgaaaggcattcggataataggacgcactacacagggcgtaaggctcataaacctcgctgaaggagacaagcttatcggaatttgcaggataatcgacgcaaaagacgacgatataaatacgtcggaaacgcccgagaatgacggaaatccccccgaggaagctccccaagaggcgtaaaactttaagggcgtctaaaaaacgcctttttttttatgaacttcaaaaaactctaaaaaatgtccgatttaaaagaggctgcattgagggaagaagtccgcgcgtttttggaaaaatttccaaagcgcggaggccctgttatggcgcgggcgatttttgacgcgaaagacggcaaaaataaaatgttaaacttgattcgcgcacagcgcaacgccggcgcggaaagtataagcgcccaaaactattttgagacgccaattgaagtcggcaacgggcaatccattaaaatcagggtatataacgccgagcctgaaaggcctaaaactgctcttatatacctgcacggcgggggctggacgataggctccgcgcaaacctgcgccaaagtatgttccgacttctcaaaagatttcacggtaatcgtgcccgaatacagactcgccccggagcacccctaccccgcggcgctcgacgatgttctttccaccgtcaaatgggctcttgaaaattctaagcggctcggaattttaaatggggacttttttatgtgcggagacagcgcgggcgggcatctcgcaattacctccgcgctaaaaagcatcttacagaagctcccgactcccgcaaaactcgcgctattctatccggtgacgagcatgttttacaaaggagattcgtgggatagattcgcttccggatatgcgctagatgacgaggcaatggaggccttcaactgcgcatattgcggagatatttcggcgaggcgccagccatgcgtctctccgcttgaatttgccgatttaaaagccttccctccgacaataaccatatttgcctcccacgacatactgcgcgaccagtgcgaacaattcgcaaaaaaactcgccgaagccggcgtgccgtcgcgctacgcatgcatagagggtgcgccgcacatttttatgacaatgccgggcatggaggaatgctacaacgaggcgtttaaacttgcccgcgactttctaatttccgatatgccgcgcgaatagagcgcaaataggtttcggctttacgctctaataataggggtataaaaaactacattttcccggcttcgagaacgagcccgtagcgcaaattgcaaaaagtgtgcgtcaagctcggcgcgccaagttttcgcataagggcgtaaatgcacgcaaaagctgcgggaactatgtctgtgcgccctttgcttacggcgtatttgctctcacgcacgtcagagtcgcaaaagcagaccgcatctaaaagtatgtgcatttggtcaaaactaatgacattttccccgccgccaagcccgagcgcttttttagcaaatcgcgcggcaactactgcgcctcccgccccgacaagcgttttaaagctcggaactgacgcgccgaatgcattttccatcaccatgtcgaaaaaattatccaagaacgagagttctgcaacagtaagcgctttttggggattatttataaatctgcgggttacatttacagctccaacaggcaagcttaggcatttgtccatttccccgccgcttccaaaaactacttcaaggctcccgccgcccaaatcgaaatacgcagtcggctccgtggaatctatggaggggtctgacatcgcgccgagatacgaaagccttgcttcgtcgttttcgcccaaaatccgcacttttgtaccgcatatattaaaaatatcatcggctgttgactgcccgttttgggcgagcctgaaagcggaagttgcaacggcgtacgtcttaaaatttttagaaaaattgcgggcggcggattggaactgcgatatacaggctgctgcaagctccgctgcgttgggaaccaaacctgcggattccattgaagacactcgcgagtttttagtttcctcataaattctttcaacgcttccgtcgggattggcgcggcctaataggcattttatggtgttcgagcctatatctacagcaagtatattttcggaggtcataatttaaagtcccccggtgccactataacggtaaactcgccttttgttgaagcgtttttcaattcagcgcaaacttcgcggagagttcctacaaaaaatctttcgtaaatctttgaaatttccttggcgaagcacacgactctttcccctccaaaaacttcaagggcgtcgtcggcaaatttctcgattctgtacggtgactcgtagaaaataagcgtgtgaggaaaatcggcgtatttttcaaaaaaagcctttcgggcagatgtctttggaggaaggaaacccgcgaacaaaaaagagtcgcttggaagccccgacgcgcataaagcggaaataaaagcgcacgcgcccggtatgggcacaacctttattcccgcgcgcctgcattcgcgcactatcctaaagccggggtcgcttatgcacggagttccggcgtcgcttagcagcgcaatgtttttgccctccattagcttttcaagcaatgcgggggcagcggatttctcgcgggaattctcgtttacgaacatagttttctttatgccgagttttcccagaagtccgcccgtcactcgggtgtcttcgcaggcgaccaggtcgcattccgcgagcgtgctttttgccctatctgatatgtcggcgagatttcctattggcgtcgccacaacatagagaatgcccggttgcatgtcaaaacgcgccgaatggctcaaacattttgctaaactcggaaatctccgcctttaagtcggaaaattcttcgcagtcaaaagcgccgcatgcgagcaaatccaaaagcggggtttttacaaaatccctctcgcgccagcgcggatgcggcacagtaagctcggcgtttgaaatcgattcgcgcccgtaaaaaattatgtctatgtctatcgggcgcgggccgtttgcaaaattctcctccctcccaagctccctttcaaggcgtttgcattgcctaagcaactccattggctcaaccaaagtttcgccgaataccgcggcatttagaaagtccctctgatcctcataaccaactggaggggtgctatatatgcgcgacttcgccgaaaatgcgcaaaattcttcgagcattgaaagcgcctttacgagattctcgcggcggttgcccatattagagcccagcgacagaattatttttgttgccttcactttatgtaatcctctcttttcctccgtattttaacggagattttttcaaaatcgtaccccacatcgactcccaatttcgcgacttcaatttccgcttctgcaaggttttcaaacctcgtaaaaagcctttccgctatcgtgtcggcgagtttttctatcagccttacgctttcccccgacaacactccctccgctatcgccatcgcggcgggatagtctatcgtcatagacaaatcgtctgttttggcggccgggccgagatttaaaaaaaggcgcatcgagacttcaaaatcccgcgattcgtcgcgctccgccgcaaagcacccgtgtttgccggaaagttttatcttttctattattatttcgtccatatttccttaattgtaagcgcggtttttacggcgtttaaagtcttttttacgtcgtgcacgcgcagtatgtctgcaaaatcgtttagcgccgcaattgcgcccactgaggcggtggcgtcgtccctgtcggaaaaatcgtccccgactattttagaaaacatagacttgcgcgaaactccaagcaagattggaaatcttaattttcttagacctttgaggcgcgctataagttctacattctgggaaaaagttttgccaaagccgattccaggatcaagtataatattttccgtacaaaccccttccgccaaggctgcgtatatttttcggcgcatattatccaaaaatttttcaaaaaagtccgactttatctctgaacctctattgttgtgggttattacaagcccgcaatcgagcttagcggcaactttagccattctgtactctccgctaatattggaaactacatcgtttattatatccgctcccgcttccactgccgcctcggcgactgcaggcttataggtgtcggccgacagcgcaacatctggaaattttgcgcgaaccgcctcgactgctggaattaggcgcgtaagctcctccgactcggatactatttccgcccctgggcgggtcgattcagccccaatatcgataatggcggcgccgctatcaaccatttcccccgcctttttgagagccgcatcgatagacgcgtatttcccgccgtcggataacgagtccggagtgacgtttagtatgcccattataactgggcgcccgcagctaaatatttcccgaagttttcgcattttttagatattgcaaatattcgccgatgtcctcgcggcgcgtttggatatagagtgagcgcgccattgcaatcgcagaatttatatctccggttttaaccgcaaccgacatcaagccgattttcgccgcaactgcataagattcgtcttttcccgccctttcatagtagatttttgccgcgttgaagtcgccctcagcaaagtatattttagcaagctcaaaacatgcgagcgggtcgtcgggcgcggattctacgcactttaaaaagtccctctttgcttcgtcctttttgccaagagccatatttgcaaccgcccgtatgcgcgatttttcattagactccggcagttttgacagcaattttagcgatttttccgattccccggaatgggcaagcgcctttgcggcttccaaaagtctttcactatcgccctccgactcgtaaatttttgcagcctctaagtacgcctgttttgaaaataaaatatcggcgcaaataacttgcgtttttttacggtctgcgtctgattccggcaccatcgagaacgccgcaatcgcacccgcggcgtcctgcaatttcgccctgcacttgcccaatagtttaagcgctgcggcgtctggaaattttttatttagaatgtcctcgcatattttcgcggcctgcgtgtacatatcgaggttgaataaataaaaagccttggcgtaaagcgcgtcgagcctctccggggactggattagagcctgctctacacagctcaatgccgccgaatagtcggcgcggcgcgcggcgtatgcggcaagccataaaagtatgtctatatccgaatttccggagagcgcgagagccttagcaaaattttcgcgggcctctttttcctttcctatcctatcgagcgaatacgccagatttttgcgggcggcaaaaaagtttggcattttttcgagagcggaagaataggccgccgccgccgcctcaaagtttccgctgcgatattgaaagttcccgagggtaaacggcatagccgcactgcaattttcctctccggccgcctccatgagtatttttatgctttcgtcgctttgggcggaggctttttttagaattgcagcctcgcgctttgtcactgtcgggatattgccgaaaggcgactccaacgcattttgccccaacgccgcaaggcatggacaagctaataaaatcgcgtaaaaaataattctcattttatttccgaaattttaaacggaaccggcagtatgaactgcgcgcgaacctttttgccgtttttcatgggagattcatataaaaatttcgacacagcctcttttgcagcctccgcaaataaagtatttgtgcaacgctccacgtcaagcaccttgacgctcccattttcgtctatctcgacaagcaaccttgcttcgccagaaatcccgcgcttaaataactttggcggatattttacgcggacggattttaaaagttttggaattgagtcgagctccgacaattcgaaaacagggttctcaaacgtctgtccgcccgcctgcgcaaactcaattccttccgtgtcggcgccgcctatggaaaatttcgcgggagaatcagaaattgcggatatgtccgcagatatatcgcctgaaaaattttttacagccgttgtctgcgaaggcgaaaagcccctaaggcttattttctccgacgattccgcaggccgcggtttttccgggccaacctctgcagcgtaaacctttgtgtactcgacaggcactttttttgtttcgacgcccgtaagcgatatcggaagtatcgaaaacgttccgaacgccaatagagccgccaatgcgaaggcggcggctttgttttcaggtatgtcgaaagttgccttcatttctttcgcgtcgcaacaaatatctcctttgcaccgcactcttttgcgcaatccataacctcgacaaggcgctttaccgaaacggttgcgtcggaatttattacaagtgccccgccagacttagacaggcgcgcttcgagggcaggtttcaaagaatttatgccgtatttttccccgtcaagcaacacgcttccatcgtaagttatcgcgacattcaccgcatttgaatcgggggtctgggaattttcggcagatggtacatcgacgcccattgcgtcattgtcggcaaataccatcgtcacaataaaaaatataagcagtataaaaatgacgtctattagcggcgaaatatttatctccgacgccggttcctcgtcttcaaatctcggcctcctaagactcatgccgccgcctccgaacgtatcatttgcgactctctgcgcgaaagtattgcgagaattttagacgccagcgccgacgcgcatatggcaataatccacgaagggatagccaccacaagccccgcctgcgtagttatgagcgccacagatatgccgtccgcaaccccttgcggattctctcccgccgaagctatgcttgcgcacattccagaaaccgttccgagcagcccgatgagcggcgccactgacgaaagcacttttagaaataaaatgcgcctgtccaccccgcccatgagttccattctaagccgcgggaaaattttctttgcgtcatgcggaagctcgcgcgaggttataaagtttttaagcgccgcgccgaaaagctcgtccgagtcgcacactctttttattttggaaagccttatgcacaccccaacccctgagtagtagagataaaacgccagcacggcaagtggcgccatcagcaagccgcccgcctgaaaagtttcgcaaaacgccttaaaaaaatcttccatttaatttccgcttaaataagacgacgctattttttccatgtcagacagcacggactttgcgcggcgggaaaatatcgcatgcgccacatatgcagggattgccaccacgagcccgtactccgtcgtaatgagcgcctcgcttattccggcgcttataaattccgcttgccccgcaccggaaaacgacaaatcaccaaaagtttttatgatgcccgtcaccgtcccgagaagtccgaacaatggcgcgactgccgccgatacggaaagcaccgacaatcccgaaaagagcttttcgcccgcagaaagcatcgattcgtaagagacctcttcgagggctgcctgcgataggtttctcgactctatcaagtctgtcaaaagacgcgaatacgggaaccccgaagcggatgcgattccaagggccgcggattcgtcgccttttgaaagagcctgtttaatttttcccgagacaccttcgggagccctccgcacccgcaaaaaatacgcaagttttataagaaatacaagcgccgataaaaacccgagcaataaaatcggatacatccaaattccgccgagcgatatttcctccgcaatactgcgcgcatttttttccgcgctaaaaactgcgccggaagatatgtcggcgggcagagaactttttttgccgccggcgaaatcgcgaatatcgcgcgcaaagctttcgccgtacagcacgccttccgaatctacaaaccccgctcgctcgggtgatatgaaataggcgaacgccccgatgcgaaaaatcttcccgtcaactttttcgcgcgaagatattggaactgccgcaaaagcgcggggctccaaaggattgaatagggattttagccaaaaatccccctccctccgaataacatcaagcgattcggacgccgaggaacgcgcggcaaccgtctgcaattcggggaaaaaagatgtcctaaaatccctcatatccgccgcgagttctcccgcgcgggaatcgcagaaagccgccgcagatgaaagcgacgccctctccgctatggacgccctcaatgcttcttccagctcccgcaattttcttatttctttcgatagggcgtcgagcttcgatttcttttgggagattttttccaagcgcgattttctgaaatcgtcgagttttgcgcgcgagctttcgacggacttatatgccgcgtctttcatatcggaggcattcgctttcatatcggaggcattcgcaaacaaggctgcgaaagcgagcattgcaataaaaattctcattttttagcctccgccggcttctctatttttatttccgcaatgcccgatttatcggatttgcctgaggcttttacaaacaaacctgtgcgaaccaatccgtctttgagcgaaagttcgcggtccgccgttctgctccgcgcgtagagagaggcaaattccctaaacttttcgttgaccgtttttgattcaaagtcgcgctttgcaagcggagatatttttgagtttaaagaaaaaagtttttcggaaagcttagaatatagagtgtcgagcatcttggagatagcgccaaaggcagcttcgtccctcgatattttttcggccgccgcggcatcgttttttgttgcggattcgagccttttttggagggaatctgtttttttctttaactccgaaacgagcgcttcggaagcggaaatttccgcgtcaagcatccgttcttcgtcggcgaatttcgccctttcttcggcaagctccatttttagcctcgcgtcctccctcaacagggcgtcgagttcgttaaaatcgccgccgtacgcggacaccgccgcgcaagcagacatcagcaatgctaagataaaaggcatattaatccaactttatcctcaaaagttttgtttctttgtaatcctccgatagtattaccatttcctttacggatttgtcggagtttatttttgaaagaatttcgacagcctgcttgtaggattttataggcactgaatttatttcccttatgatctcggagtgtcccaaaccgttgggctgggcggaactcgcggggctgttgggcttcacaaactggatgaccggcgcgtcaataatcggcttttgcatattgcgcgccatggcgtcgtttatgataaattcccttatggaaaatccgagtcgcttaaaatagacgtagtcgctttcgcggaattcgcgaggataagcggctgcggtaaattcaacagccttcttttccccgtttctgagcacctccagcttatacttttcaccgggttttagattctccatcttaaatatgaaggcagccaaagtatagccgtccgccttcattctcggaagctctttcccttcaaacgatacaatcatgtctccgcgtttaaggcccgctttttgcgccggagagtcttcaaataccctgcctattaccactgcgcctatattttctatccccagaaattttgccgcatcgcgcttgacggcctgtacgtcggttattccaagccaccctattttatcacccaccggctttgacggcactctttgcgatattttcttaaaattttcaggtttgatgaacattcgggttagcatatcgtcccagagttcgacacgtccgccttcgccgttctttaaatatagcgtgtaggaatctatcgcagacgactgcccccagcccgcaaaattgccatctaagtcaaaggccggcagccccacgccagccacagggcgctcggacataatctcgcccttgtgcgacaaatttttagcagagacataacttttgtatagcaatggagtattgtccatatctgcggcgagcagaatgccccatatctcctgccctacggaaacttctgccggcttaaaatcggttattggacgaaggccttgcggcaatccgtcccttaattttatgaaatacgccccccacggaacgtccattccaagaaaatccgccttgtagccgtcggaatctccgccctcaaaatatacgcgaaaatcttttaaatttgacgggcgcgaataatacggaattgccgccgggggcaatattataagcccgtctttgtttacaaccgtgccgaaaaccgtcacttcattgcggttctcttcaagctctattatatactttattgtcgcgcaagttttcgcgcgttcggcaaacattttttcaaaatcgacgccgtccgcaaatagcgaggccgcggcgattacaaaagctataaatatacaatatatccgcatgcattacaatatcgcaacttccatatcccaacgcaaacattttagtcgaaaaaaaatttttattaaagtccgttttttgccttgattgaacaaatttttatccataagatttttatgaaaaaaaaacttttgcttaccatgaatttttaattctatgaaatataaactctccataataattttatctgttttatctattctatccattcgcgcattcgcccaatatccgtggaaacctttcggcaaaaatgtccaaacctccatttcaagcggcggcgtattgaaaatccaaggaaaaacgggggactcctctgccggtttttctgccgaagcaaagctaaaaccggcgtcgtcttatgcgctttcattcttggtttcgggaaattcgacgggaggtgcgattatttcaggcacacaatttataaacaaaactttctcccatacaggagggccgtttgccgaatgccgaatgctcttttccacaactgaaaatccgacgctaatccagtcaattttgcgcctcggcggctggcagacgagctcttctctcgaatttaaagacgttaaaatatccgaatatcttcctgtattgcaaaaatccgactttccgaaaatgtcgccttcggaatgtattaaagacggcatatacaagtacgattcgcaatggcaaaacggatacgacgttttcgacaaagtctccgtctcctccggtacgtattttaacgataaccgctgggtgctccaaaagggagaatctgtgacttttgtatttgaaccctacagatacagacagtccgacgcggaaattgacgtttctatatcctacaacccctcgggactcccactacaaatctctgcttctgctgacggaaaaacttttcgggaagtcgcagaaattaaatcgtccggaaattccctagaacttccaaaagatttatttccggcggggaaaatttttttaaagtttaaaactgtcggcgaaaaaaacggacaaattcaaataaacaagctcaactaccgcgctcctataataggtaccgccgcggacgttcaaaacaggctcgccggcgcattttatattggactttccgaagatgtaaaattagacatctcttccgccgtctgcgactctaaagaaataaggcttttattaagcccgggctctaatgcggaattttcggtagatattgaacctcttgaaggaagcccgtcaaaactgcgagggttgcgcgcgaatccaaacgaaagcggcgtcgtaaaaatcccattaccgctaaaactttcggatttgaaaaaagtaaaaattgcggcaaaagataaaaattggtcggcaatctacgaatcaaaggagtcaacacccgccctcattaagcgcgacatttacggatttaatttattcgattcagaccagctaaaaatctggtcaacccccgctgaaataaaaatttcaagggaatgcactccccctaaaaatacggggaaagttttaagcatttccgccgccgcaaacgactgcgaatcggctcaaattgtttttagggcaaaaaaatcaggcaatttaaaaatagaaatatccgacttaaaaaatgcggaaagcggcgcaaaaattcctgcttcaaatatagagctcttttgcgtgggatacgtccccgtatcgcagccgacagacattcttggcgagaaaaacgattggccggatccgctttttcccataaaaacaggggaattgaaaatagaaagggggaaaactcaaccgctttggattagattcaacatacctaaaaatactccctccgggaattacacaggcactctaaaaattgcctttggaaatttttcaaaaaaaattccagtgtctgcaaaaatttacggatttgaacttccggatacccctgccgtgcgatccgcctttggggcttttgaaaggggatttttgcctttttataaaaatccaaaagccgtcgccggaaaagtggacagacagataaaaacaaaactctcaaaagctcacatatccccatataactccatcgcgccaaaattcgacctacaatacccaagcggcgacaaatcaaaaaccccgaaagttgttttcgactggaaggaatttgacgagaaaacgcgctcgctaatttccgaataccatgtaaacgcaataaatcttcgggttgcaggtataggaggcggcacattccacgccagaacgcccgcgcaaataaggggaataaaggaatccgacccgcgctacgaaacagtgcttgccgactacctcgggcagattgacagccacttgcgcgaaaacggctggaccggtattttttacacatacactttcgacgagccttctgaaaaagactatccttttgtaaaaagagagctcgacaaaataaaaaaatatgctccccatataaaagtaatgctcacagagcagcccgcaaaatatctcgaaaattccgttgatatatggtgccccgtgacaggccagcactcgcccgaggactgcaataaacagatagaaaaaggaaaagaaatatggtggtacatatgcatgcaaccccaagcgccctatgcaggcatatttctcgaccaccccggaatagacttgcgcgtatggttgtggcaaagctttaagtacggcgtaaacggaattttagtttgggatagcacttatatgagcagcaaaaccgcatatcctgattccacccaaaacccatattttgacccgatgagctgggccaccggatacggcctccccaaaaacgcaaaaagcccctggggcaacggcgatggcaggctcttttatcctccgcaatcaatggcaaaaggagagcttgccgacgacaaagatgagatagtcgaaacaatcaggcttgaaatgctgcgcgaaggcatagaagactacgaatacctaagcattctaaaaaaacttatcgaaaaaaatgccgataagctcgacgccccaagccgagcgcgctacagcaagctgctcgagattcccgaaaccattacgcactccatgaaagagttttcatacgaccccaagtttatccgcgcccatagggaaaaagtcgcaaaagcaatcgaaaaactgcttttgataaaataggccattggcaaacaactacaaaaaaagctccctttcggagctttttttgtttcggcgcaaatgtagatagcgatactttttgcgctctatgttttgccgggctttttgcgctcagcgtgaagattatataccaaatgccttattttacgaggcattcggcaatttgcacggcattcagcgccgctcccttccagagttggtcgcccgcaacccagaaagacaggccgttttcaaaagccaaatccttccttatcctgccaacgccgcattttaccttgcgctggtacatcaaaggcatcgggtattttttctgcgagacgtcgtcgtcgagttccgctcccgggaaggcggcaattacttcgcgcgccctttctacggatacgggcttctcaaattcggcgtttatcgccacgctgtgcgccctcattacgggcacgcgcacgcatgttgtggagcacaatacattcggtacgcccattatcttgcgcgtctcgttgagcatcttcatctcttccttcgtatagccgttatcgaggaatacgtcaacatggggaataacattgaacgcaatctggtagggatacactgaaaccggcatttcctcgcccttcgcgaatgcgcgaacttggttttcgagctcctgcattgctgcaacccccgtgccggacacagcctggtatgtagccgcaaaaaacctctttaagccgaactccctgtggagggggcaaagagccattagggaaatagcagttgtgcaattggggttggcaataatgtttttgtgcgaagccagcgcctcggggttgacttccggcacaacgagcggaacttccggatccatgcggaatgcggaactgttgtctatggctatgcatccgcgttttgccgcctccggaacgagaatcttcgagacgctcgcgccggcggaaaaaatcgcgatgtcgaggttttcgaagctctccggttttgcctcttccaccgtaaatgtttgcccattgtgagaaattttcttgcccgcgctcctcgccgatgccaaaagtgttagtgaggacatcggaaagtctcttgcaaagagaagttctatgagttcttgcccgaccgccccggtcgcgccgactatgcctattctgtatttcttgttcatggatgatttatctaaaaaaattatagacgtttgtaatgaattaaaagtatgccccacgcaacatttaatttacgtttcaatagctctccaaaaactttttctctacaaaggtggtgttttggagaaaatctaccaagcttcaacctcgcgcaatccgcccagttgcattgaaaactctctcggaacgcctacgggcctccataaaatcgacgggaaaataggagccggcgagaagctcggcacggtttttaaaggccgaatcccgcacgggcttgtctgtgaacagccggaacaggaacgcaaaaaaaacctaatcacaacgcgcattatgcgccttagaggcctccaagacggcgtaaactgcggcggaaaagtcgacacctacaaccgttttgtgtatatccacggcacaaaccaagaggacaagctcggctcgccaaacagccacggctgtgttctcctctcaaatgctgatgtcgcggaactttttgaccttgtagaggacaattcaatagtatttatttcggaagagtaagagatttttcagatgcaaagcgttcttatagttgacgacgaaaaacacacgcgcgacggccttgtggctgcactggccgacaattacgatgttctcgcggcggccaacgccgacgaagctataaagctactcgacgccgaagaatttgacgccgtaatcacagatttcagaatgtcgggcaaatccggcctaagcgtaatcgacaaagccgcttcccttcccaacaagcccgcatgcataatgctcacggcctacggcaatgtcgagacggcagtcgaagcgatgaagcgcggcgcggccgatttcctgtccaagccggtagatgttgacaagcttgaaaaaattttaaaagacgcgctcgacaagcgggaagaaaagcgcgcggaagaaaaaaagattctcgaaaacaaccgagctgaagcgcagcatgcaaaaaagcacattccttcggcggtagtagcgggagcgcactttgagcttggcgacataatcgccaacagccccaaaatgcgcgaggttgtcgatctcgcaacgcaggttgcccactcgaaggcgactgtcaccctcactggcgagacgggcacgggcaaggagcttatcgcaaacctaatccatacgtcttcgccgcgcgctgaaaagccgtttatacctgtacactgcgccgccattccctcaaatctcctcgaaagcgagctgttcggctacgaaaaaggcgcttttaccggcgccgtgaaccgccggataggcaggtttgaagcggcggacggcggcacaatttttctcgatgaaattggcgaaattgacgccacaacacaagtaaaactcctccgcttcctcgaaacgaggacgctcgagcgcattggcggcaaccaaagcattaaagttgacgtgcggataatctgcgcgacaaataaagaccttaaaacgctcgcagaaaaaggggaattcagggccgacctctattataggctcaatgttgtcgagataaatattccgccgctgcgcgagcaccccagcgacattccaagcctccttgacgcctactcaaaatattttgccgatgagaattcgatggagcctgtcgtattttctgccgacaccgtatctgtcttaaaaaaatatccgtggccgggcaatatcagggaattgcgcaatttctgcgagaaaacagtcgtgatgagccccgtccgtgaaataacggcggacaggctcgaagcacgctttaaaaacgccgaacttccgccgcgccccgccgccgcgcacggcaatcttccgcagcttccaatgcctacaaaaaaagaaagcgaagaagcccttataaagcaggctctcgaagccgccggaggcaacaaaagcaaagccgcggaaatacttggcataagcaggcgcacttt

SEQ ID NO: 2177 - DNA, 23572 bp, Unknown
  16S sequences of unknown bacteria
tcctatgcccttctagggctccttcatgccacccgttttacgggtggtcatgactcgcttaagccgaaaaaatggccctgcggagtcaaccgcagagccattttttcgtttagacgcgtttcttgaagattttgtcgcggaagacaatcaggagcaccacgccggcgacgatgatgacgccgccgatgatggcgaagatagcccacagggggaagccggaggaggactcgccctctggactgatggtataggtcaaagctaccttgccgtccttatacagacgcaccagtgtatccttggtcagctcggcggacgaggaggtgatgggattgctggcgttgtcgaacagcttgatttcgtagccggccgcgatggtcagagccttggccaggtcgtcgaccgtggatccggcgggaacggtgatggttttccagctttcgtcgattttgaacgccgcgttggaggaggtgatgaccaccggagcggcggtggtggcggcggtggtgcgcacggggttgccgaattcgtcggtggcgccggtataagcggtggtggtctcatccgagggggcggcggtttcggagggcgcggtggtggcgtccacgggcttggcctcggtggtgccgtccggcttgacggtggtgctgttcggcttggtggtggcttcggtgggcttggtggtgggcgccggcttcccagcgtcgggatcggcgccgttggccttgacgttcaggctcaccaaggcggcttgccactgctcatagtacgagtcgccagtgccggcccccttgaaccacaggcgcaggtacttggcggcagaggggatcttgttggaatagaagtacgccaggccggcggagtcctggtcgggccgatccagggtcatttcgcccacggcgagatcggtgctcttccccttgttggggccgacaaccagctgcttaaagtcccggtaggtgccgcccagggtatccgaccactggattttgaacaggccgcttttgccgtagataccggcccagccgcccccgccgtagccgatgtattcaaaagaggtgaagccctctttgaattcgtaggtgatggagctttccacctcggtcatgcatttcatcatcacctgttcgcggtcgtcgggcatggattccaccatgggggcgttggttgtaaagccatagcacttgtccgtggcgccgccgccctggacgaagacgctgaccgctttgggaaatttgttatctccgaatttgtcagtgaacacgtagctgcccgcggcgcttgccagaaagccgacggacatgcaggaggccagcagggccgtcgccaggaccgccgaggccagtttcttcaaaggatgtttcatagcgcggaatctccctttccctatgtagtgttgggttcctctgccttaagcctacaatagataaggggaaatgtatatcgtccattttccggcatcgtcaaatttgccgcggagggcgggtttgtgggaaaatcggccggatttttgaggattttggaaaatggacgatatacacgctttccccatcctagtatcatgaaattgcggcggaaagccccgccgcgggtttagatgatcgtaggaggggttcccattgaaaaggatcaccggtttgaagcgggcggctgttttgggcctcgcggcggcgctgctgctgacggggacaccgggggtttcgctgccggcgaaggctgcggccgcttcctcctccgaaggcgggggaggcgcggcgcagagccgggacgcggacaccgccgacatgacctaccgccaatatatcgcgcaatacgcgtcggtgcctcggcgcacggacgccgccgagattccggcagccgccttctcttcaaaggaaggggatgggctgacggtgctgcccaccttcgaggggcgggacaacgtcctccagtggaaggagggcgagacggacggcagcgtgacctggactttccagctgccggacatcagcctgtacgcggtggagcttgtctattacgcgctggaaagcaagaacaacgccatcgagctgtcgatggagataaacgggcagaccccctcccgcagcgcgggcagtctgtccctgagcaagctgtggcgcaaccagaccacagagaaaaagtacgacaaagcgggcaacgaaatccggccgggtcagacccaggtgctggaatggcaaagcgcctttttccaggatgcggagggtgtgctcaacgagccgtatgtcttctgctttaaaaaaggcgagaacacgctgaagctcaccggcatccgcacggatttcgtgctggagaaaatcgtgctgcgcaacctcaaaacggcggagccctacgcggtggcggtatcggacagccgcaacgggatggagctgaaaaacgaggtcatcgagctgcagggcgaggatgcgacgctgaaatcctcctcggcgctggcccccatgtacgaccgctccaacgccaacacctatccctccgacccagtgctgatgcggtacaacaccatcggatcctacaactggtccacgccgggacagtggatcgaatggtccttcaacgtgacgcaggcggggtattacaacatcgcggtgagggcgcggcagaattatcagcgggcctatccttccaaccgacggatcaccatcgacggcaaggtgccgttcgcggagatgatgcaggtgcccttcgggttctcgcccgactggtacataaagacgctcggggatgaaaaaccctaccgcttctatctgggagtgggcacccacaccatccgcatggaggtggtgcccggcgattcggcggccatcacggcggagctgcaggaatgcgtgctcgagctcaacaccctgtaccgccggatcctcatggtcaccggcacccagcccgatctgttccgcgactacgccctggaaaaggaaatcccggggctgcgggaggagatgacggcggtgcgcgaccggctccaggccgcttatgagaacatacaggcctcctccggcatccgggacggggatacggccaacatcgaccggctggtggtgcagctggacggattcctaaaggatgtggacaccatcccccagcggctgtccaatttcagcagcaacatctccagcctgtcggcttggatgctcaacctgaaaaatcagccgctggaaatcgactatctgcgcatccagtcggaagacgtggccgtgccgaaggccaacgccgggttcttccagaccctgtcctacatggcgaagcagttcgccggctcctttgtcatggattacaactccatcggagatactaccgccgcggccgaggccctcgatgtgtggattggcctcgggcgggatcaggtgcagatcatcaaggagctggtggatgagaatttcacggccaagaccgggattccggtgaacatcaagctggccaaagattccatgattcaggccaccttcgccgggcgggggccggatatcgccctgttcatcgcccaggatcagccggtcaatctggcggtgcgcaatgcggtggtcaatctcagccagttcccggattttgaggaggcggcggccgagttctcgccggagagcttcgtgccctactcctatgagaacggggtctacggtatgccgctgaccggcagcttccagatgctgttctgccgcaccgacatcctggaggagctggggctgaaggccccggaaacttggcgggatttgtatgagatgattccggttatccagcagaagaacatgaacgtggggcttcccaaagtagtcatcgacgccaccggcgcaggctcgggcaccagcgccatgttcgacaccctgctgctgcagaaggggctcaactatttcgacgacagccggtcgtccaccaatttcgacaagcccgaggccttggaggccttccgggagtggaccgatttttacaccaagtacggcctgccccaggatttcgatttttacaaccggttccgcaccggcgagatgccgatcggcatcgcgggatacaccctgtacaaccagctgtgcgtcggtgcgccggagcttagcggcctgtgggagatgcggcagctgccgggcacgcccagagaggacggcagcctgaaccgggcggccgggctgaccggcaccagcgcggtcatcttcaacaagtgcgacaaggagaacggctgggcgttcgtcaagtggtttgccagttcgcagacccaggcggcctacggacgcaccattgaggcgctgctgggcgcttccgcccggtacgacacggccaacctggaggcgctcaagctgctgccctggaccaaggcccagcagaaaaccctgctgggccagtgggagaacgtcaaggggatcccccaggtgccggccagctattacatttcccggaacctgtacaacgcgttccgcaacgtgaccatttactattccaacgcccgggaaatcctttataagtacaacaaggaaatgaacgccgagatccagcgcaagcgggtggagttcggcctggactaggtaagcgatgatgaaatccagtggttggcctggtataggggatttcccccgtcaagccgccgctgagccgctaggcctgatgcattcagcgcttgcctagagttgtggtttatcccgcgctttgaaaggacggagacggacaatggagaaagaggcccgcaaaaagaagagcttgcgctggtacgggcgggaaatccggaagaaccgggacaattacctgatggtcgcgccctacgccgtgattttcaccgtgttcacggtgatcccggtggtgctggccattgtgatgagcttcacctatttcaacctgctggagccgccccagttccgggggctgttcaactacatgcggctgttcctggacgacgatgtgttctggctgtccatgaagaacaccttgatattcgccctgctgaccgggccgctgagctacttcctctgcctggtgttcgcctggctgataaacgagctgccggtgcgggcgcgcaacctgttcaccctggtgttttacgcgccctccatctcgggggccctgtacgttatctggagcttcatcttcagcggcgacgcttacggcatggccaacggcctgctgatgcagctgggcgtcatcaacgagccgatactgtggctgaccgatccccgctacgatttggggattgtcatcgtggtgcagctgtggctctccctgggcaccagcttcctggccttcatcgccggactgcagggggtggaccgcagcctgtacgaggcgggggccatcgacggcatccgcaaccggttccaggagttcgtcaagatcaccatcccggccatcgggccgtcgctgctcttttccgcggtcatgcagataagctcctccttctcggtgggccggatctgcatggcgctgaccggctttcccagcaccgactattccacgagcaccatcgtcacgcacatcctggattacggcaccctgcggtatgagatggggtacgcctgcgccatcgcgacggtgctgttcctgatgatgctgctgaccaaccaggtcatccgccggctgctgcggggttacaccaactgatgataagggaatgagcttatggcacggatagcttccaaaaaactcaaccggaagataggcggcgacgtcttcatcctggtgatcctcatcctggtgggcgggtttatgctgctgccgttcatctacgcgattttgcagtccttcaagccgatggaggagatcttcctctttccgccccggttttttgtcaaccggcccaccaccgaaaacttctatcagctgacccagctggtggccaactcctgggtgcccttcacccggtacatattcaactccctgctggtgtcgattatcgccacggcggcccatgtcatcatcgcctccatggcggcctatccgctggccaaggcgaccttcccggggagccggacgttcttccaggtggtggtgctttccctgctgttcaccaccgaggtgacggcgctgccgctgtacctcgtcatgtccaccctgcacatgatcgacacctatttcgccctgattctgccggccatcggctcgtccctcgggctgttcttgatgaagcagttcatctcggtgctgccagacagcatgatcgaggcggtgaaggtggacggcgcgggcaccttccgcacctactggagcatcgtcatgcccaacgtcaagcccgcctggatgacctgcatcatcttcgccttccagagcatctggaactacgagggcacccagttcatctacgacgagtccctaaaggtgctgcccaccatgttccgacagatcagcgagggcggtatctcccgggtgggcgtgggggccgcggcggcggtgctgctgatgatcccgcccatcctgattttcaccttctcccagagccaggtcatcgaaaccatggcccaatccggattaaaggagtaatggacctatgcacatgcggcgacacaaatggctgccacggctggcggcggggctgtgcgcggttctgcttctgtccggcctgccggcctcggccagcgtcccctacaacagctatgtttacgaccgatacagccgcccgaccccggcaccggacgcgtatgtcccggtggggacgatagacgggcagatgctgggggtgggggccttcaacgcgccccaggacatcttcaaggacgcggcggggcggctctacgtggcggataccggcaacaaccggatcgtggccctggcggccgatcggaagagcgccaaggcgctgtccaccttccgcaacggggacaaaaccgagacgctgaacgccccccgcaacgtctttgtgacggcggacgggatttactacatcgccgacaccggcaacaagcgggtgctggtggcggacggggacgggaacgtcctgcggattctgggaaagccggacagcgacctgttcggggcgaacacggaattcaagccccgggacctggtggtcacctcggcgggcacggtgtacgtgctggtcgagggggtataccagggggcggtgattttcagcccggacggggaattcgccggcttctacggcagcaacaaggtggaggtcagcctgtctctgctggccgatttcttctggaagaacttcatgaccagcgcgcagaaaagccggatgcggcggtatgtgccggtgcagtattcctccatccaaatcgacagcgaggattttgtctatctgaccaccgaggcggcctccagtcctagcgagcgggtgcgcaagcttaaccccctggggcagaacatcctgcgctccagctccaacgacaagctgtttttcggggataccggcaccttccagctccagggcgagacctatgagacggcgctgacggccatcgacgttatcgacggcaagtacatcaccgtcctcgaccggagccgcagccggattttccagtacaaccaggaatgcgacctgctgaccgtctttggatgcagcggctccctggagggggcgttcaccgagccggtgggcctctgcggcgtgggaaacaacgtgttcgtgctggacgcccagcgcaatgccattaccgtatttgagctgaccccctacggcgagacgctgcacacggctatcgacatctacaccgacgggcggtatcaggattccctgccctactggtacgagatcctcaagtacaacagcctgtccgtcctggccaaccggggcatcggcaaggccctgtaccaggtgggggagagcgagaaggccgtcgagtatttcgaaaagtgcaacgacaccgacgggtattccagtgcctacggggatatccgcaaggcgggaatccgggccaacttctacgctatcgcgctgggactcgcgctgctgatagtcgcgggttggctgtgtaaaaagttccgggtattcccgcggctgcttcgccggatccgagagaggaggaagggcgcatgaattacgcgcagatgtccaaggcccggtatctcttctatctgctcgtccatccggtgaccgccttcgaggaaatgaagttcaacaaaaagggttcggtgaaatacgccacccttctgctggcgctgttctacgtctgttcggtcgtcagccaggtgggcaccgggtacctgttcaaggacaagaacctggaggacgtcaacatcttcggtatcctggcgggcacggtggggctggtcatcgtctggtgcgtggccaactggatgctctgcactctgctcgacggcaaggggcggttttccgaaatctgggtggccacctgctattccctgctgccttatgtgctgttttccatccccatgacggtgttaagccacttcctgaccaacaacgaggccatgttctatcaagcggccatggcgctcatcaccgtgtgggtggtggtgctgctgttcatcgggatgatgagcatgcaccagttcagcctgtccaagaacgtgctgaccatggcgttcaccgtggtgggcatcgcgctgattttgttcttgctggtgctgatgttcaccctggggcaaaacgtggtgtccttcattctgaccatattcaacgagctgaacttccggttccgctgagagggggcttgcacaaatgaaacgaatcggtttgctggtgctggccctgctgacggtctgcggcctgacgctcagcgccgtgccggccctgccggccgcggcccagcccgctcccccctccgcgcaggcggtggaggagctggccaccaagggactgacaccggtggcggagaacgcggcgctcatcctctacgccgactcggcgacggggaacgcggcgctgtatcacaaggcggaaggggttttctggtacaccaacccgccggaatatttgggggagaagcccacggggcaggaaaaggtgctggcctccgcccagatgaaaatcaccttctatgacaagcagttcgtgcaaaacgagcttatcagcaccgtcggttcgctcaacaagggcgggatgacctgccagaaaacggccgacggggtgcagtttacctaccgcttcccccagcaggggatcaccgtgcctctgcggtacacgctgcgggcggattacctggaggtatccgtgccgatggacggggtgaaagaggaaggagagtacaccctctcgaccattgcggtgctgcccttcttcggcagcggcgcggcgggggacgagggctatctcctggtgccggacggctccggcgccctcatcgacttcgcggacgcgtcccgggcgcccagcgcctatgcccagccgatttacggccgggatcgggtgaccaccaaaatccgggacacctacgcctccgagacggcgcggctgccggtgctcggcatccatcggcaggagggcggcctgctggtggtggcggacaagggggccgggctggccaccgccaacgcccagctgtccaatctcaaggaaaagcggaacatggggtatttctccttcctgtaccgcccggcggatcggatgaccctgaacagcagcgaccgcaacgcccgggaggtgctggcctacgccagccgcccggccgagaccgacgcgctgtccctgcggtattatccgctggagggggcgggcacctatttcgacatggcctcccgctaccagcggctgcttgccgaggagcagggaatgacccgcagcgagttcggggacgacctgcccttctacatcaccagctacggcgcgctggagagacgggggagcgtgttctggatccccgccgacatcgtcgtgccgctgaccacctattcccagatgaccgccatgctcggagagctgcggcaggcggggctgaaggggctgacggtggattaccgcggctggcaggacgggggctacatgggcaagctgccgacgggcggccggctggaaagcaagctgggttccaagaaagagttcgccgccctgttcgacacggcgcaggctaacggggaccgggtgttcgccggggtgaacctggtggatttctacaagaccggcaacgggttctccaagtcctcgagcgtggcccgcaccgtcaccgcggccccagcgctgcagtattcctacagctttatcagcggcttctataacgagcggctggccccctggtacctgctctctcccctgaaatacggggaggtgctggacaaggtgctgaaaaagaccgactatgcctacgcggggctggggctgggcacggcgggcagcgagctgtattccgacttccgcaagggcgggcacgaccggctgggcatccaggcctcgtatgtcgaggcgttccggaaggccgcgcaggcggggccggtgatggccgacgacgtcaacgccttcctgctcccttacgtggattacgtggcaggggcgccggcggagcacagccggttcgacatcgagagccggcgggtgcccttctaccagctggtgctgcacgggtataagagctattcggtgccggcggtcaacctgagcgccgacgcgcacacccagtttctctacgcggcggagacgggggcgtcgctgcagtacgtgttcaacagccagaacttcgaccgggtggaggacacctacctgcagggcatttacaactccaactaccgcgactggcaggaggaggcggccgggtactacgcccggctgagcggcctgtacgctcaggtaaagggccgcgccatcgtcaaccacacccagcccgccgacggcgtggcgcgggtggactacgcggacggcgtcacggtggtggtcaactacggcaaggaggcctacgccggggagctgggcaccgtggggccggaggacttcgccgtgtttcagagaggggagggagcggcatgagaaagctgtccacgctggaaaagcggaacgaacgcacgggctacctgttcattctgccgtggatcatcgggttcctgatcttcttcctgtcgcccatcgtcaactccctgctctacgccttccagaacgtatcggtgcgggctggcggcttggatcggcccttcgtgggcgtgcagtttttcaagcaggccctgctggaggacgacgcatttctgcccaagctgtccgccgcgttcggcgatctggtgtatcaggtgcccatcattctggtgttcagcctgttcgtggccgtgattctcaaccagaagttcaaagggcggggggcggcccgcaccctgttcttcctgccgctgatgctctcctccacggtgctgctgtcggtgatcaagggggacggcgcggtgcacagcatatcggacaccacctcggtatacatggtgtcctcggtggacatatccagcgtcctgtttcaaatcggggtgccggaggagctgctgtccttcatgacctcggtcatcgaccggattttcgacatgacgtggatgtcgggcatccagattctcctgttcctgtcggggcttcagtccatcccgggcagcctgtatgaggcggccagcgtggagggggccacggcgtgggaatccttctggaaaatcacggtgcccatgatcagccccattatcctggtcaacgtcatcttcaccatcatcgacagcttcaccagctattccaacgggctgatgcagtatattctcagcgagaccagccagctgcactattcctacgcggcggccatgacctggatttatttcgcggccattatggccgtgctgggggccatcctcgggctggtgtccaagaagattttctacagtgtggagtaaaggaggaaatcccatgcaactgacggatcggctaaccgcgaaggtttcctccgacatcctgaccaaggcccggctgaacaagggaaaaacatggctgtgggcgatttttcggctgtttttgttcatcggcatcggctatgtcatcctctatcccatcctgtatatgctcagcaccaccttccgcagcgacgcggacatcctcgatccctccatcgtgtggatccccaagcatttctccctgaacaacatcaagcaggccttcgacgtgatggagtatcccaaggcgctggccaacacggcggggatcaacatggtggcggccctgctccaggtggcggtcacctcggtggtgggctacggcttcgcccggtacaaattccgggggcgcagcctgctgttcggcctggtgctgttcaccatcatcgtgccgccccagaccaccatgatccccatgttcttaaagttctccaacttcgacgtgctgggcatcgcggaactgacgcgtaccatcttcggcatggaggggcaggtaaagcttatcaacacccccttcgtcatgtatctgcccgccctgttcggcatggggatccgctcggggctgttcatctacatcttccgccagtccttccggggcatgcccaaggagctggaggaggcggcgctcatcgacggctgcgggccgctgaaaaccttcctgcgggtcatggtacccaacgcggccgccatctatctgaccggcatcctgctgtccatggtctggtactggaacgactattacatctcctccatgctgatggatcagaccaagacggtcacggtggccctgtcccatctgcgggagggcatgtggaagttcgtttccggcaaggatctggagctgaccatgctgcgcatgcaggccgggtgcctgctggctatcctgccgcccatggtggtgtactttttcgcccagaagaagttcacggaaagcgtggagcgcagcggcatcgtggggtgattggaaaatcttccagcaccaccgcggctgtcaaacccggcgctttatgctataatggtggaaatcgcggcgaaaatccgggagcgtagcggaatcctctcggatttggtcgaaagcggcagccggcggccacaggcgccggggcgaaaacgacgaggggcggtgtgcggaggactatgagaaagcggcgcgtgaaaatacgccggaatgtccgtgtattccggaagctgctgctcctgctggcgggctgcctgctggtgttcctgctgtgcgtgcgcctgggcaccaggcggatggagacggaaatccggcagcgggacgacaggcaggcttgggatgccctccagcaggtggagaacgcgggcgagatgcttatcgacgagctgctcggcctgtcggaggacattgtcagccagaaaaacctggtggctttcagtaccggcgaaaagggcaaggagagcctggtcgtcgaactcctccgggagaagatggaatccagcacgcttatcaacaacgtgtatctcctgtcccccgaccagaacatctgtgtgacggcgaatggacgggaaaacctggcaggcatcacctccatgctgacggaggaggggcagacggtgctgctcaacccggcggatttcaccgggcggttccggttcctcagcctggcgccggggaagaatccggacaattccaccctgacctttgtgcggccggtgatggatgagagcgcgacacgggtggggatggtgctgttcctgctggacaggaacacggtgaatatccgcaacggcgctttcatgctgccgtcccggtacgatctgtactggctggacggcaccggggtgctgtacaacaccaacgaggtggcggcggccggcgctctgcggttcagcggcttaagggaaagcacggcccagctggtggagggggaagctggacgcgggaaactgcggtgctattccatgaaaagcccccgcacggagttggcctacgccattctgacgccggacgaatcctatgtggggatggcggcgcgcgtctggctgccggtgacggtaggggcgctgctgattctggcggcggggggctggttcttcttccggtatgtccgcgggcagtcccgcaccatcagcaacgctttccaggtgctttccgaaaaggggatcgtcaatatggacgacgccgaaacggaagggctggataaactggtcgtcaagctggtggcggagagagaaattctatctgaccggctggaccattttcgatccatagattttgacaacaagctggcgctggtgctggcgggcggggaggagccggacgagagcttccgcttcctccacgggctgttcgcggtctgcgtcatcagcatcgacaaccagagcgtgttccgcaaggataaatccatcaacgcctcggaggaaaaggcactcatcaagctggtggtggacaatgtgctcagcgagcactacgtctgctattcccggttcgccggcaagaaaatcgcctgcctcatcaatttccgggaacggggagacaagacggggctgcagaccatcctcgaggagctggaggtgctgcgcggggtatgtgaggaggagctggagctcatcttcgtggccggcgtttccggcgtgtcggaaaaccggggagacatcggcgccctgtacgaggaggccatccgggcccaggaatacgcccgggtgcgctccctgccgctggtggcctacgacgaggtggagaagaagatccgcaatccggaggcggcgggcaactattacaagcggctcattgagaaggagcagctgatcattgagaactgccagccttggaactaccgcaacgtggcggcggcggtggccgatttcgagaagctgctgctgagcaatccggtcaacaccttcgacgaggtgcaggacaagtgcaaagaggcgttcctggccatggtgaacacgctgcggcagaaccgccaggccgaggtgtacgacgcgcagagcgagcggcgggacatggaggagctgcgcctgtgcaacaccagcgaacagctccacgtgtttttcaccctgttcctcaaaaagctggacgactgcgtgaccagcagccgggtggaggagcaggactatttcatcgccaaggtggaaagcatcttagaaaagaactatgccgacatgtccttgagcgtggggatgatcgcggaggaactgaacatgcccatgcggctggtttccagccagtataagcagaaaaccggctacggcctgctggatcgaatccacagcttccgggtggaaaaggccaaggccatgctgctggacacccaggacagcgtttatgaaatcgcggaacggtgcggctatgaaaatgtcaacaccttcatccgcgtcttccggaaatacacgggcaagacgcctgggcggttccgggggaactgacaaggggcaaacctattaagatacaggaggaatcgactatgcagggaaaaagatggctcatgggcgccgcggcggcggcgctgctgctgacgatgacggcgggctgcggggacaagggcggccagtcgggcggcggcagcggcaagcttcccatcaacagcgtcagcttgccggaaaagctggatggggacgtcatcaagattctgggctacgccggctgggaagcggagcatgaggaaatccggaaaatcctcaaggacgcgtacggcgtgacggtggaatacacggtgctctccaactggaaggacaacgataacaaaattgccaccgagctggccagcggcaactcctacgatctggtgatctccggcaagagcttggtggacaagaagctagtgcagccgatcgaccagtatttcgacctggaggatccgattttccagaacacgaagaagcaaatcgagacccgccggttcggcggcaagctgtacggcatcacctccaccacctatccccaggtcatcctgtataacaagacggccatcgagaacaacgggctggaggatccgctggagacctataaaaagggcaattggaacttcgacaccttcatgaccctgtgcaaggccatgtcctccgacggggacaacggcaagcggaactacgccttctcctcctgggatccggccaatttcctgacggccaacggcacctattacgtcaagacgggcgaggacggcaagaccgtgctcaacctggacgacccgaaaatgtccgaggcgctgacctatttccgggatctgtcctatacggccaaggccttcacctcctggcagggctggtccttcagcgatttccaggcgggcaatctgcccatgatgatggagcgcttcggcaacaagaccgccaacgcggaattcaactttgactgggatatcgtgcccttcccggtgggcccctcgggcgacaaggattccacccccggcaccgtgggcttctacggcatcggggagggggccaagaaccccaccggcggcgcggcctacatctacctgttctgccggcaggactacctcaagcggggcgaatacctgcgcagctatttcaccgaggagcaggcgaagctgtatgaagagctgcagggtaaggtggaggccgtcccggatttggacggcatcaccgacccggacaatctgatgtacgacatcatgggcggcgccgacgtggcggccaaggtacaggaatataagccggtctggcaggccaagctggacgactatgcgaaagcgcttaagtaacaaggcccgcgtgtggggcggcctgggggcgcttgccgtgtgtctcgcggcggtgggggcggggctgttcctcgccgcccgccccggtgttcagacggcggcgcggataaacggcctggacgtggatgtgcgggaatacctgctggtggccggccaggaacggggcggcgtgctggccgattttaccgcccggtacggcgcgcaggcggacgagggcttctggcagcgcgaatgggacggtgaaaccccggcccaagcgctggagaagcgcaccctcgatcgcttgaccgtcgtcaaggtgcagcagcagatgatgctggaggccggggtgctggaggacgcagggtatgaggcgttcctcgaggactggcggcgggagaaccagaggcggcggcaggccctggagcggggagaagcgctttatgggcccgaaagctacacggaggagcagtattacaccctccgcctggacaaggggctgctggccctggcggacaaactggccgcgggcgagctgaaggtgaccgacgaggaacggcaggccgcgtaccaggggacggatgcctttttgttcgaggaagacgggacgcgcaagcccctggaagaggtgcgggccgtcctcgataagcggcttgtggaagagaagttcgagaaaaagacagcggcgctggcggcgaaggccgcggtgaccgtccaccgggacacgctggataaggtgcgatacaactgacggcggccggatggaatgcctgagcaggaaaggatgaacgcatatgtacacgacgcggggccggtactggataagcctgttgacggctggcgccttactcatgaccctggccctggcgggctgtcagcgcaaggatccggatgcctccggggacgatatcaactggaatgtgggaagcagcgcctccgtacccggcgacgtctccggtgacacggcttccggtggagagccctccggcgacgcctcgggagacacgacctccggcgatgccacccagaacggcgggcggccggtgaattccagcggttctggcggcggaaccaccaacggacagacgccgaacggggattcgagcaaaacgccgacgcccggcggggacaaaactgagccggcgggcaagcctgtgacctattatgtggattcggtggcgggcaaggacaccaacaacggcctgtccgccaacgcccccttcaagagcttgggccgggtgccgcacggcgatttgacgccgggctccaaggtgctgctcaaggcgggcagctattttaaagagcagttgggactgacggcctcgggcaaggaaggcgcgcccatcgtgtacgacatgtacggcacgggcgccaagccgatcatcgacggcggcggaaaattcgaggtcatcaacgtgcgcaacgtccagtatttggagatgcgcaacctggaaatcaccagcaagggcgcgagcggcaatatagtccgcggcattacgttcaccagcggcggcaagaagcacgcgggcggcgcgctccatcacatttatctgaccaacctgaccatccacgggatgaaagccgtggtgggacggggctcggcgggcatctatatcgaaaacggagaatcgcttaacccctgctggtacaacgatttccgcatcgaagggtgcgagatttacgacaccggcgcctgtggaatcatcatcaattccaactacggcaaacgggcggaaatcaccaaatgggatttgcagaagctgccctttacccctgccaccaatgtggtcatcaagaacaacatcatccgggatctgccgggagacgggatgtggatcagcaccaccaagggggcggtgctggaatacaacaccgtctacaacaccggcgacggcaccaacaccgcctacgcgggcatgtggccccacaactcggacggctgcgtgatgcagtataacgaggtgtacggcaaccggctgggcggcggtgacggccagggactggacgtggacatcaactgcaacgacacggtggtgcagtacaactacagccacgacaacgagggcgggtttgttctcgtctgcaccgacggcgacaacaacgactacaaccggaacacggtggtacggtacaacatcagtcagaacgatcttcacggcctggtgaccatcaagggccgggaggtgaccggtctgaaggtgtacaacaacaccttttacaccgacaagggatactccaacggcaccatcgacacgctgctgtgggggaaaaacgacgcggtgttcaccaacaacatctttgtcaacaacttcgcgggcggcagcggctcctacggccggtttgtggacaacaaggacggcaacggggccagcacgtccaacggggggctgaccatgacgttcgagaacaacgtattctttggccgttcccccgccaaggcgcccacggcggaggggaacatccgtgtggccgccagcaacaagatcggcgtggatcccggcctgaccaatcccggcagcgggaagattggccggagcacggcgggcggctataagctgaagagcggctcggcctgcctgggcgcgggcaaggcgatcgcgaacaacggcggcaaggatttcttcggcggcaaggtcgcgggcacgccgtccatcggcgcgcaccagggataacacgaaccatagagaggggggccgccattggcttggcggccccctgtttcacgaggaaatctgtgaaagggtggcgatttttatgaccgtgtatatcgatcccctggccggagacaacagccgccggggggagtctcccgagacagcgctgcgggatctggagccgctgacgcgggggattctgccgccgggcaccgtcgtccggctgcgggcgggagcctgccaccagggcgggtttaccctgaccgccgccggagaggcggccaggccggtgcaaatcggcgcctatggcgagggggagaagccggtaatcgacggccggggcgcgcccgccgcgcttcggctgcgcaactgcgcgtatatcgagctggcggatttggagctgcgcaacacggcccacgcgcccggcgattgttccgggctggcggtgaccgccgggggcgaagggtgccgcacggaggttctccggcacacggtgctgcggcggctgacggtgcggcaggtgaacggccggctgagcaggggaacggcggggctgattatcacggtggagccggccgccgcgccttgccggttcgacgggctgacggtggaggactgtgacatttccgacaccggctcctgcgggattatcctgaactccgtctacggcaaacggccggagatagcctcctgggacatccagccgctgcccttcaccccctgcaccggggtggttattcgccgctgccgcgtccacgatctgccgggggatgggatgtggatcagcaccaccaagggggcggtgctggaatacaacaccgtctacaacacctcctacggggaactaacccaatacgcgggcatgtggccccacaactcggacggctgcgtcatgcagttcaacgagctgtatgagaaccggctgggggccggggacggccaggggctggacgtggacatcaactgcaacgacacgctggtacagtacaactacagccacgataacgaggggggcttcctgctggtctgcaccgacggcgagacggggcactacaaccgggggacggtggtgcgctataacatcagccgcaacgaccggaacagcctggtgaccatcaagggcatcgaggtgacggggctgcaggtgtacaacaacacctttatcaccgatttcggctacccggcggggacgatttccaccctgctgtggagccgcaacgacgcggtgtttgccaacaacctgttcgtggacaaggcgccggcggcctcccggttcgtggacgccaaggacggggaggggaaccctcgggataaccgggggctggtcatgactttcgagagcaactttttcgccggccgggcgccggaggaggaggaaaccatccgggtgctcccctccaaccggacgggtgaggatccggggctggccgcgccggaagacccggggccgcaggggtgccggctgaggccggacgcgccctgcgcgtatgccggaaaacggttgatggaccggggcgagcgggatttcttcggaaaacgggcgatggacgctcccccgtccatgggggcgcacgaaccggaaaaagcctgatttcaggcgggtcgccggatttgtcgatccaggaaaacggtcgatatacacaaaggaaaattaacgatttacttttttatgggaaatgggtacgatggagacagaaccgaaggaacgctattgcccatgcgtatgaaatatggagtggaggaaacagaatgaaagcattgcgcagcagaatcctatccatcgctctggcggcgtcgctgctgctgtccagcggcatgatcgcggcccccctgtcggccggggcgacaggggaaggcagcgacacccctatctacaccgatgacagtaagtttaccgtttgggggaatccggcaaattggggctataccatcgagcaggatccctggaagctgacctgctttgattacggttatccgcagctgcggtacgacgatcccaaaactatcaatctcaatgagaccccctgtatttcctataatgtggaatccaacgcggccttcaggctggagcttttttgctcggccaacaacccccaagaggttgtcaacgtgattgtagacagccaggacatgaccggcaacaaaggaaccggcctggtggatctgcggacggttcccgaggtcatacaggcggcggatgaggacggcaatgtcacgatcaacaccttctatgtggaatttgcccagaaggatcagttcgttcagttcaatacgtatgaatttgttcccgccccgaaatcggaaatcaaagcgccggcctttaccaatgcggacaaattcaacgtgtggggtaatccagcggcgtggggctataccatcgagcaggatccctggaagctgacctgctttgattacggttatccggagctgcggtacgacgatcccaaggaaatcaatctgaacgaaaccccctatttggcctatgatatggaatccaacgccggcttccagcttaaactgtggtgtggcggcaaggacgcggtagttattttggacagcaaggatctgactggcaacaaaggcagcgggcttatcgatttgcgtgaagtaagcgaagtgatgagccacgccggccaggacggcaaggtgaccatcaagaccctttatctggaatttgcgcagaaggatcagtacatccaggtcaattccctcggctatgcccccgctccccagtcagagctggacaaggaggcggcccaggcgttcgatgcgctggtcgcgtctcttcctgctgtggatgaactccagctgaccgacaaagaggctgtggcggcggtgcgggcggcctatgaggagctgactggcgcgcagaagctgctggtgaccaagctggccgagctggaagcggcggaaaaacggatcgaggatttgatctacaacagccagaccgaggttgacaaacgggcggccaaggcggtggacgacaagatcgcctccatcggctatgtcatgctgcataaggaagccctcatcaccgagtgccgcgacgcttataatgccctgaccgagacgcagaaggcgctggtgaccaagctggacgtgctgaaagcggcggaggagaagctggccgagctgaaggccaatccgcccgcggaaaacaccgccaagaccgaaaccttcctcgacaagttcgacgacggctccttccccaaggcggtcaaaaccatcaccccccgcgaggacatcgatatcaaccaggtgttcagcctgcagcgggaggtcaacgccaatatctataagtacaagttcggcgcggaatttgacaaatccagcggcattctcttcaagcagatgaccgaggtggacgccgcggtggtctacgagttcgaaaacggcctcaagtctctggagttcgtggcctcctatatccacgccagcattttcaaatcggcagttcccggcgtgttcgagatttcctggtcggagaccctggacggcgaatacacgcccttcaccgccagcgacatcaagtatacccgggagaaaatcggcgacgattatgtgcccggcgatccggaaaacgaagccatcggcaaccagtatctcgcttactacaacattgagaacattccggcccaggcccggtatatcaagctgttcttcaagggaagcgatccggaggccgagtacccctttaattacgccaactggcaggcgccgctgggctatttgaaggtggaggcctacaagaaaaccgtggatatcgaagagaacaagaccctgaccgacgccgccaccggcatccgggtgaccggcgatctgcccaagggcgcggagctggtcgtcatcgataagtcggagagcggcgtcaagaacgcgctggccgcgtatctgcagaaccccgccgttaaggattatcagaatgcgctgagcatggtggaaatccgcatcatggtgggcggcgaggtctacaccgatttcgagaaaccgctgatcgtggccttcccggtcaaagaacaggtggccggcgcggcgtattacgccatgacgtacgatatggacatcgacaagttcacgccgattgccggcgaggctgtcgacggttactatcagatggaaaccacctggacgggcgatttcgtcctgctgggcaacgacaaggcggccgaaggcttcggtcccgtggatcccggcagcaaagaggaatcctccgacaatggcggcgcgcccgatacgggccgtgcgtttcccgcggcggcgctgctggtgctggccggagcggccggagccgtgctggcgctgcgcaaaagaaaatcctgatagccggatcctctaaaagagcgccgtccgatgatggacggcgctctcagcttgtcgaaaaagggaatctgccattcggaaaacgaaaaaagcggaggcgggttaccgatcggtgtttgcgaggacatgtgcctcgcaaacactccttataggcgaaaaata

SEQ ID NO: 2178 - DNA, 32759 bp, Unknown
  16S sequences of unknown bacteria
atcttattaaaaaaagaaaacaatttcttaaaaaaatcgaattttttagatagttttcacgcctccatagtaaaatgatattaataaattacttaacggaggaatcccttatgaaaaattttaaacaacttatcgttttgagaaccaaacggcttttgaaagaacgcaattggactcaattcaaacttgccaacgaaggcggcatctgctactccacgctttccactgtcctgaaagataagtgcccgaccatgaactccgataccattattgctatcattctcggttttgatatgaccgttatggaatttttcaactgtgacttatttctccccgaaaatatcggcgacaactgatttttacggcttgaatttctcggctacttaaaaggcgccttttgatagagcctctatcagacagacgctctgcctttttgcgagccgccaaaatttagtttatgggcggctcttttcatcgtacctctgatttgcacgaatctccctttgccttttgtatacttctttaaacttttcgtaaaaccaaaaaaattttacgaaaagatgtttaaaaggaaaaaaagcggcttatatataaagtgttcgaaggaagaaaaaaatccgcaaagaaacctcggaaaaggggcgccaaaggaaagaacgcttcctcggaatccattaaaaaaatacatgaataaggagatgtttattatgaaatacctgacttccgattctttaaattctttattaaaacctttcagcggcttttttgacaataactattccgtcatgagaacggacgtaaaatcaaacgacaaggaatacacgctgagcgtagacctgcccggtatcgataaaaacaatatcgatatctctttgcaggacgggtatctgactatcgaagcggtgcgcaataacgaggaaacggagaaggacgaaaattccaattacgtattccgtgaaagaacgtacggcagaatgtcgaggaccttctatgtgggcgagggcatccgcgaagaaaatatcaaggcgaagtatgaaaacggcattttgacggtagtcgtgcccaagtataaggaagaagaaaaagccttgaagaaaatcgccatcgaataatcctccattcctcccttccgccgcggcggaaagcttttgataaaagtttctctcctacaaaaaggggtccgaaataaattcggatcccttttttatggcgctcgatatagaagcctctttttcctgacgaaacagatcttcactttttttcgggcatggcggcagccgtcaaaagccacacttctgcggctcccgcgtcgaacagccgtttcgcgcactcgctgcccgtcgttcccgtcgtcatggtatcgtctacgagcaagacccgcttccccctgcacgaggctcctctctttatcgcgtaggcgcccgacaagttccgctcccgctcctctttggaaagccgcttttgcggcagcgtttcccgcgttttgacgagaagctccttatccgggtcgaagttcaggcaatccgccgccaccacggcgagcgcttccgcttgattgtaccctcgttttttccgctccgtttcgctcatgggcacggggacgacgacgttcggcagctccgattcttgccgctccgccctcactttttccgccattttttccccgaaaaataaagcgagatggcgttctccgttctttaaacgattgagaagaaaagccgcttccccctgatagacgaacggggaaatcccgcgcgtaaagagcggcgctttcgccttgcactccaaacagaccccgggcgcgcaagtctttctgccgcatttcggacacgcttcgccttcgctcttttgcaaaaccgcgaggcacttcgggcacagtctttcgcgggggtactcgaaaatctcctttccgcacgagtcgcacgtatatccgcgcccgcccgccgcaaggcgaaacttatccagcgttttatcgacaaacttttcccaggcgttcatttcctcccccgtcttcctcccccgtcttcctctcctaaaaaatcccacccaaacggctttcgtcaaagccctgggtgggtcgtttttcttttatccgttttctccgtcggcgtcggaatcctcctccggctgcgcggcgggcgccgtttcagcggcttttgccgcctccgcgtcctttttgcgctgatagcgcaccagcatatacgaacagatcgctcccaccgcgaacagcgcgatgccgagcacgagatcccacacttccacgccgctctctttccaagggatatacgcctgcgagaaaatatcgggattatagaacatagacacgatagagcccaacgaaagtccgacgatcatggaatacgcggtatggcgcgctttgccgaacacataattcaaaaacttggaaaaggtgaaaagccccagaaggaaaccgatgaccagcgcggcatagacgagcaaaatcgcgggattggatttccagaaggtaaggctgacgctgtccacgagggatttaaaccatccgagcgccatgagcacggcggtggcgctcagtccggggacgatctgcgtgacgccgacaatatacccgacgggaaggcacaggagcacctgccaccatttgacggatgcaaagacgttcgtcgccgcttcggacgcgtcggaagtgttgagcgcgacggaaacgacgccgatggcgatcgggatgagtatgcctacgattaaaagcgcgatgcgcttcgcgttcatcgccgcgcctttgagctcgtccttgacggcggggaaagcgccgctcatcagtcccgcgaatagtcccaccacggcgaagggaagaagtcccaacagcttttccaccgtaaagaagcccagaagcactcccaccaccatgccgatgccgatgggcagaaggaacataaaacattttttgaattgcttaaaaaggttccccaccgcatagagaaattgatcgtacaatttaaagataatggcgacggtggagccgctgattccgggaacgatgaccgcaagcccgatgaaaaagccgagcagagcgctcttgcaccacgttttcttgttgtattttatcagcgcgatttccagactttcttttcccatatttcctcccgcgtccgtccgaacggctttgtttcgcccgcccggaaaatttttccgaattactttatttattatagccgtttgcctttctcttgtcaagcgtcggaaagaagaaagctcgctttttgccgagtgaaaagctgtgatggcggacacaaaaagagatttcggactttttcgcattttttcttccttttctgtcactcgggaaaatccgaaaaagagaaaaaaatttaaacctttccgtcccttccgacacaccccttttttccccgctcccgcgcgaaaaagcggaaaggagagtatacaaaaacgcccgttgtacgttcccctaaggaaaaaacggacggttgcggggaaaaaacggagtatgaaaaaatattttccgcaaaattttatgattttccgcaaaaaagcgcaaaattttttccctccgagcatatacaataagagagaaattccccttgaaaaggggcaggagcggaatatcatgaacttcatcaaaaaaatgtgtattttaagacaggtcaagcaaggcttttcgggggacggtaaaacgctttcggggcttatcaagatcgagcaatacggaaagaacctatccgtggaagtttccgtcatcaacttcgcgcccctgtcttcgggagaatactattgcctgctcgccgattcccgagggcggacggaaatgctccccctcaggggcaaaagcctctttaacatcgtttccgaactgaacgcggaggaaggcttttgcggcgtcatctgtttcgtcaaaaacggcatcgttcccatcgcctacggagtcaacgggcaaaacgtctacgattggcggacgcttgtacaaaattccgtaccgccccgcacaaaagaaaccgcttacgcggcgggcacgggaaacgcggacgacttcatgagcttcggcagcgaatcttccgaaagcggaacgccgcgcggggaagcgcccgagtccgcggaaaacatcttttcgccgcggtatgaggaaagtccccaaaatctccccccgacgacggaaaagcggccgggcgaagctccgcaaacgcccgttcccgaacgcccgcagcctccccgtcccgcgcacgaaacgccgcccgacccgcaggaagcctctataaacgagccacccagggaagggacgaacgcccgaaaagcggaaggaaagtacgacgacgaaacggtggccaccgaaaactactatgacaaggagaaaggaaaccatgaacgcatcgagaatgaagaatctggtacatatgcatacgctgaaagcggaaatcaagaacaagcagagaaagagcggcagaacgttgcagcgaatggagatgctgaaaacgtacgcaatccgtttacaacggactcggacggatactatctcgccgtcaagggagagatcgacgctctcttcgaaaagtacccttcggacgacagtctgaaagaggtattcgcctattcggaatgggtgcgcgtgcgcggggaggaaggaaaagcggaatacctcatcggggtcatctatgacgatatgaaggcaaagtatatctgttacgccctgccggccgaggataaggagcgcccgcccgaagaggtcaaggaaatctgcactttcgtcccctcttccgcttttacggataaagaaggctttttcgtcatcttccaaagctgttcgacgggcgaatgtatccgccccgagagcctgtaaaaaatttcgccaaacgcacggcagacgtccgcggtcttttctctgcgcgaaaaaataggcgtaagacagtactgaggattcttaaaggcgaaaaaagcgtcctcttttataaggaacggttatccgcctctgtcggcgcggaaagaaaagaggcgaaacgagggactgacggagggaaaacgaggcttcctcctataaaaaaggcggcaaatcgccgtctttttccgccgcattttctatgaattcctctctatgcaaacacccgctcgatttgttttgaagcgaattttttgccttgcgctccttttgctttttcctttttagaaatctttattcttcccgtctgttcttacgattttcccctttccttaaaagcgtttttctttttccttcccgccgtaaaaagaagaggacgttctctatttttccctataaaagaaaaattttttcgtccccctaaaaagacgaaaacttttatttcatcgcattgaatattcggagtcacatcgggcggcaaacggcacgctcccgtttttctactctttgatccccaggagatagtcggccgacacgtccaagacctgacacagccgcgcaaaggtatccaatcggggaagctttttcgttgtgcagtattgcgtgatcatctcgggcgatacccctacccgccgcgcaatctccaccgtcgtcatgccgctccgcttgatttcttcacggagccgaaccttgatttcttctaccataagaaaattatataaccaatggttagaaaatgcttgacatctaaccattggttattgtataataaacatatggaaattatgcataaattgccgaaattttttcggaaacgccgtttggaagtgcaaaagtatccattaaaattcgcctatccgtaaaaaggttcttatttttcaaaaaggccgccccgcaagggacggtctttttgtcgccttcaaagcgaacggatatttccgctttgccgctcgctgtcctcggacgatttactcgttttcgacgagccgcatagaacgagcgtattcttcggaaaaatccgctttgagatcctttgcggtcttggcggaaaaagccttttccagcgcgtccaggctttgtgcgcacgcatcgtattcggcgtctttctcataggtatccagttcgtacaagacgccgccctgatacttgtttgccaaatactcgcgcccggcatcctccgaccagttgaccatacccagctcaaaactcacgattttgtctttttcaaaatcgtaattcacgtcgatggtcaggtaaaaatagtccaccccgtccgaatcggaacgggtattctttccccggatttctccgccgacgcttcccgcggagggctgataggaaaccagcatatttaaatcgtaaaagtcctcttcataggaacaagtgaaccgcgaaggcgcgtcgtagacttggaatttatcgtttcttaagacctctcccacaaaatagacgaacgctcccgtcccgttgacattgccgtaatcctccgcttcgtgataggcaaggggcgccacggtaattacaggcttagaaggctcgccttccagaagaacggacgccacctcgccgaaaactttggcgcactgtttcttcttcaaattcccctcctttccgccgcaggcggcaaacgcgagaacgccgcccataatcgccgcgaagacgacaaagctttttttcatgctcttttcctcccttctttttaatgttttttatcctcaaaagaactgacctctcagtcccccggcaaattcgatacgcgctcaaaaacgacaagctcccttcttgtaccgccctttcgctttccgcgccccatctaaccgaagccctaaggaagttaatacgcaaaaataggggggggcgggcagagagtcgcacttttcagagaggacaggcaaacgacgcttgaagggaaaaaccgcatagggatttcgtcttctctgttttcgttttcattataacacttttccgcgcgtccgtcaatcccccttgaaaaagttttccccctctttttcaaaaagcgggcacaaaaatttcctttgaagaatccgacaaaagtcgggcgacaaaaaaacaagaaaaaagaacaaatagacaatatgaatggctatcagtaattaatttattgatttttaagaaaacaaatctacaagatacttgacagtttcgcgcgggtattatataataaaatcaaccgaataaggagtgacttttccatgaacgaaaaaaccgtaaagacgtcgggcgccgacgagaggacgccttcccgcagcgaatatttttcctggatcaacaacaccaacgaaggctccacagaaaaacagactctcgtcaatttggcgtttttccgctatttgaaagagcgctatcgtatgtcgctggatatctacgcgtgggacgcgggaaatcttgacggagcggggaacagctatgaaaccttggacggagagaagctttcgaagcaatatcctcacggctatgcgcccgtcgtggaagccgccgccgacatgggcacccgcctgggcgtatggggcggcgcggacggctacggggaggacgaaagggacgcggaaaagaggcggcagctccttgtgaaactctgtaaagactatcgtttcgccctcttcaagttcgacgcggtgtgcggtctgctgcgcgaagacaaacgggaagagttcgcaaagtccctgcgcgaatgccgatgctattcgcccgatctcatcctcctcaatcaccgcaacgatcttggaaacgcggaaatttacgccaccacgtttctgtgggagggcatggaaacctacgtagacgtgcacggctataaccccgtcaccgcgccgcataaccgcgcgtatatgtttttccgcggccatacgcccgagttgaaacgactgacggaagatcacggggtgtgtatttcttcttccatcgactatttcgaggatgacctcgtctatcaggcgttcaaccgttcgctcatactcgcccccgaaatttacggcaatccctggctgatgcgggacgacgagcttcccctgctcgctcgcgtctacaacctgcaccgccgttttcgggagattctcgtggacgggatgcttcccgaaggggatatgggcgataaagcggcgattcggggcgacaaaaagcgccgttttttggcgacgggcaacgcggcgtggacggaaaagaaaattcgagttcccttggacgggagcatcggactcgcgccctgtaaacgggtgtgcgcgacgcggcatttccccacgacgcgttttctcggatgttttgcgtacggggaaagcgtggaaatcgctctgccgcccttccgcgcgaccctcgtcgaattttgcgatgcggacgtcgccgacaaacagataacaggctgcgaatatctcgtcctgcacgaacgggaagacggctcgcccgacgagataaacgtcctgtattccaacggcgccccgtcccttttcgatcctgcgaaaaacgctttttcgcccctttcgacgctctcttccgcccctttcgacgcgcgggaacgcgcgcccgaaaagataggctcgctgcaaccctgcccccttccttcgaatgcgcagcagctttacgaaacgacttgcttcggcgcggacaacgattctttggaactgcgttccctgcgtcgttcgggaaaaacggagatccccgaagtgcaggcggcgcgggacgagttttttcatcaggaatcctatcgcctgcggggactcgacacgaatatcccttttgacggcgaccccgacacttttttcgacaccaaatcccgcgcctattataatttcgaaggtcgcaagggcttccgcgtcgaaggcgggtgtctgagggtggatttcggctgcgaaacgacggcagaccgcatagagtttgaatatttcgacgccggctcccggtgcccgtccatgttcgaagaacaaatccccgccgaagcgggcgaagtttcctctgaccttttagattggcgccgcgcgccgctcgtccgcacggaaaccatgcgagaagcggccaattcttatttcgcctattacgtggataaacgggaggaaacaaagggcctgaggaaaaaagccgtctatgctctttcccccgctcccgcaaaaaaggaaagcgaaccgcccgcggcaactttccgttattttcgcctgccctgtcctatggaccgcatatattccgtcaggtttttcgaaggggaaaaagaacttgcgcccgttcgtcccaagctcaccaaccttttcgccgcgtatgaaaagaagcgtcccaaggcagcggcgacggcgcgttttcgactcggaaagctccccctgcacccgtatttggcggcggcattcgagggaaagacgggcaacgaaaacgcctattgctgcgcggagatcgacgaaaaattgtacgcgtttcccgcccgcgcgcccgcctatccctccaacgtctacgaatatccagtgcatcccgtggacggattttacacctttttcctccccctccgccccgaatgggcggacagggaaattgccgtgtacgccctcttcgcggacaattccgttcccgtggacgtctacctctgcgacggccacggcaagcgggaagggctactcgcaaagcttccttcctaacgctctgtttttgcggcgaaacagattcgcacaaaaatcgggaattcaatgtttcgggacgcgccctttccaaaatccatttgcataaatactaaatccgcggagatttttgaaaaatctccgcggattttgcccggcaaatcgaaatctactcaaatacgtttatgacgtagccgtctatcgtcgtaacgccgcaagtctttcctccccacggctgtatttctactttcgtaatttgattccagcctttggagataatataagaatacatcttctcgatatttttcacttgcataaaagagattgcgcgcggttcgggtttgcctttgaacagttgaaaacccgtaaacggagccaaatgggtaatttctatttcgggaagtatgtcaaaaacgactccgtataacccgtttcccagctcgtctttttccactacgttgccgtaccaccccattatttcctcaaaccacttcacggttttgctcatgtcttccgtgagataaacgggcgcattttcttttacgaaatatcccttttcggaaaatctactcatgatcttctcccttgtattcccgtttctcctgcttccacaatttgcattgttctaatcgcttgccgccgtcgccctgttcctcatcataggcgaaagtatgtaagagcgagcaaacgaactcgttgcattccccgcaatgccgctgttctttgctttcgcagcaactttttacgggacaactgtccgcccaaaaaggcttttccatctgcgaacacccctgacaacccgtttgttcgcggtatgcgcattcgtcgcacaacagaccgcatcttgactgtaccataaaacacctccgtttttacgaaagtatagcacatgaaacacgacagcggtatgtcgtcatactctatattttaacgaattattttttgcctgcttatacaaatccgctctcagtatatccggctctaaaacggttattttatcgccgaaacttaacgcccaattcagcatattctcgtaggaggcaaactctctttcaaaaatcaaattgccctgttccgactcgcggaaactatcgacgccgtattcttccacgatccgatacgtttgacttttctcaaactccgcttttaaacgatagttctttgcctctaaaaattccccgtaattcaagtcgccttcgggaatttctctatttgtaaaatactcttgcgacgttttaagtttccacaagcgattgagtttatacagcttaaatcttttatccgccgcgttataaccgaaaacataccaggaagaccatttaaaaacaatccgatacggctctatcctattctcgtgctttccccttgccgaataatactcgaacgaaatcaggcagtgcttttctattgcctgtttgaggacgtctatcttttccgtaagcgagattttataatgggaggcaagatctatgacaaagacattatcgacgatgattttatcattttttcgcgacagtctttcgataagctgccgagaatacgattgttttgaaacgctgtccaagccgttcaaaccggtgaaaaccgcttgcagctgttctttcgtaaaaagggatttatcgattttatacccctccgcaagataaacgccgcccccgtagccttgcgtgcagattatgggaatccccgccttgcataggtcgtccatatctctgttgatagtgcgcctcgatacttcaaagcgttcggcgagttcgggcgcggttgttttatcggtctgcaacagaattgtgataatgccgacaagacggtctattttcatcttaacacctcgcagatagtataaccaataacgcgacaaaagtaaagccgtgtgattgtcgaatgagagcaagttgccctgacgattcctctccaagattgtttgtcctgcaatgagtatgccaaaatcaagcgttctttgcttccctgcctctttcaggcgccgcccgattctctctccgcggacaaaaaatcgcgccctgcttctcatagttccccccgcccaacggcgaaactttttaacggcgtttttcagctggtcccgcccatcgtttcgcgcggcagaaatttattctatttccagccacgtcttgtagagtccgccgtccgcgcccgcccgataaaaatcgcacagcacgacgcccgaaggcaatctcagctcagccctgcctccctctcccctaatcatctccgcattttcgaaatcggaaaaacggagcgcgggcacgcgcatttccgccagcctttccgccgtcgtaaagcctgttccgccgttcaaacgggaaaaggcgcgattgagcgaaagatcgtaagcgaagaggataggtccctgatagacgctgtattttcccgcgtactcctccttgcccgcgataaaacgcgcggaaaagtcaaaacatatttccgcgtcgcccgcgttcgggatacggacgtagacgcccgcgcccgtttcgctttctttcccgttcagacgcagagaggtccttttagaccacgagggcacgcgcacaaagatcccccgcgtttccctttcggcgcggcaggagatcttcacttgattcccgaagggatattctcccgagatcgctatctccccgcccgcccaaacgagtcggcaaggctcgaaattgttgatataaatccccttttcgtcctccgtgaccgcccattccgccatttccgcgacgccgcggggaaaattgaccgaacagcagttgagcatgggcgcgcccggtcggctctgaaaatcgcagccgtgaaagtttgcgagtttttccccttccatgggggtgtcgtaagtcgcccaggcgcccgaaggcgaaacggcgcccatcgcggcgttgtagtgcgcggtttcgagaaaatcgacgagagaaagttctcccgtcaggcggtacagttccaaaacgagcgcgtcgaacgccacgacgcagcaggtttccacgacgccgttttgatagggtgtgccaatcgcctgttcccccgtcgaaaatccgcccgtattgtgcacgtccgtttcgaggatgctttcgacggtggctttaagcgcggcgagatatttccgctcccccgtccccttatacatttccgcaaagcccatgacgacgtgcaggctttcccagcgcggctttctgcaatcgcagaacctgccgccccgcgccgcccattccagccagcccccgctctccccgcttcccatatccgcttccgcggcgcgcgcgaaagcgaggtattcctcttttcccgtccgattgtataagcgtccgaacacgtgatacaccgccaggttcatttccgaacagcccgtggaaacgatattctttttgccgttgtaaaaggtattcatcaacaaggccgccatgcgctccacggcctcgaaatatctctcgttccccgtttcttcgttccagagcaaaagcccgtacatgatatgatagtgcgcccagcagtcccatgtccagggacgcttgtcgggcgtctgcggcagggagcccgtgaatctcgtttcccgcgaatagcagccgagatacccgtcctcgtcctgacgggcgagaagcctgtcgataaaaccgaccacgtattctttcaaggcttcgtcccccgtttccaaatagacgaaataggcgctcgtcagatattttcccgcaaattctcccgaccaggccaaaagatcccgatagggctttgcgtcgcggtcccgaaacatcgtcaaaatagcgggattcgtttccgcgatccctttcagccagcgttcggaaatgtttttacaaagctccgcggtgacgccgcgggcgtcgaagcgcgaaaagttcggtctttttctcatctcgttattctccccctccctccaaaagcacttcgctgttcgtcccgaaaaagacatccccgcgggcgcagagtttgtcgagcgtccgcttcaacgcctcctccaagcccgaaaaacattcgtactcgtaggcgtgtccccagagaaaaaacagcagcggctgttcgggcgatccctccgcgagcaaaaactcgtccgtcaaacgttgcatctgctctgtttccgcttggtgtacggtgggaggaaggcgcagaaagcgctccttcggcggcagggaaaaggaatgggacgcgtcaatcgtgcgcgcgaatttcaccttcgtgcgccggccgagaatctccgccgtgcgctcgtcgttgttcacgcccccgcaggggtatgccatgccgtaaacggggcgggaaaaccattcttccagcgtccgcctgtcctcttccgcctcccctgccgcttcctcctccgaaagggaagtcagattgcggtgcgtaagcgtatgcgccgcgacctcctgcccccgatagacctctttcgcctcttctttcgtccagcggcggttatgcagcaagacgccgttgcagacaaaggactccgtcctgcccgcaagtcccgtgtttaagttgaaagtcgctttcagcccgtaactttcaaggagcgctatcagtttcgcgtcctgttcgattccgtcgtcgaagctcaaagtaaacgccttgtattttccctgccacatatttttctttctcttcctttttacgtttttcgtcacgtcttttctcccgacgcgctttgacaaagagaggaaagtttcctttcccctctccgccgcttttcctcgtcgttattatatcacgccaggttctttttttcaatcccttttttcttttttttcgataaaaacgacatcggatttatttgcgcctttttttggagagcgcgacgaccgccgcgccgatccccgcgaagggcagaacgccgacgagcgagccgttacagccgccgcagcccacgttcgtcgaaccgccgcccgaggaagaatcttcgggaacaatctgtttggcctccaaagtgaagataagttccgcgctgccgccctcggtgacgagcatcagactgcgttcgcccgcggcgatctcttcaaagacgctgcccttgacggtgagtttgccgttcgcgtacgaatactcctcttcgcgcagcgcaagtccgtccaccgtgacggaaacgatctgcttgccgtacagctcggcgtctatgatcagatcctcgccctgcttgacggtatattcgcccgtaatcgcgggaggagcgtccttgacggtcacttgcacggaagccgaagcgatgctcgtcacggtaagctcgtattctcccgccaccaaagcttccatgacggacgctttgacggtgagtttgccgttcgcatacgaatattcggacgcggagagcgccttgtcgcccaatttcacggcggttatctcttttccgttcaattccagatcgacggagaaatctcccccgacgctcttttcgtaaagagcggcttctccgaaaacgggcgtggaatcggaaacggcgatcgtaaacgcgccctgcgcgcccgaagcggtggtcagcgtaaattcatgattccccgccgcgagatttttgagataatcgtacttgaacaccagcttgccctgcgcgttgagataaaattccgtacccacgaggtcggcgtcgcccagggaaatctttgcaacgtcgtagcctttgaggtccacgtcgaacgcgagttcgttcttctccgccttgtcgaaggaaagcgcggacgtgggcagttcgggcgaagtgtccaccaccttaaaggaaagactgatctcgttgcccttggaagtggcgacggtcagcgtattgtcgctgccgagcgcgtactttttacagaactcctcggtcagatccatcctcgtatagccgagcggcgtggaagagagggcgtaatccgttccctcgatcaaagcggtatcgcccagcttgacggaggtgatgtcgaatacgcggcacagatcgaggaggtaatagggaacgctgcccgcggcgaggtcgtaattgccgctgccgctgacaaaggcgggatacatttccgatttcacctcgatgttgtcgagataccacgcggtgtccgcgttttccttagccgagctgaacacgatatacgccgcggcgtctttgccgaaattctctcccgtatagaagaaggacagcgtcagcgtataccagccgttccccttgtccgtcaccgaccagctggcgtcgtgcgtctgcctgccgtcgtccgtccgtttgccgtgcacgagatctatctccatatagaagatctgcgtatccgcaccgttttcgtaaacgttgcctttcataccgagaacggtgccgttttcgggcttccaatccagggaaacggtgtgccatctatccttcgtcagcgtattcagcctgccctctctcgggttaaactgaaacatatcccgcagcacttcggacgccgcatcggggttgacgaatttgatcatgcggttgtcgccctcgtccacggtaaagatattctgataggcggggtccataaagctgttctgatagaaggtatccttcgccgcctgatccccgtttaaatcgggcatggcggagaaatccatctccttcaccgttcccgaagccgcgtcgcccacgacgatctccgccgtcgcggcgtttccttccgcgctctcggcagtcaagacgtaggtgcccgccgccagccctttcaggacgctttccctgacggtcagaaatccgtccgcaaacgcgtactgctcgctcgtcaaaacggtatcccctatcttgacggaggcgatgtccgcgaaagtagccgccgtgacgaaatcgccgcccgtcgccttgttgtagaaagaggacttcttattgagccccacttcctcggctttcttctgtttcgccatcgaataatcgtcgagataaaatcccgtgtccttattcgtgttagcagcctcgggatcggaagagagcatatagaaatagttgaacagccatccgtccgtgccgtacaggtatacggtgaggtcgtatacgccgtcctgataggcgcattccgccttgatgagcatcccgttcgcgttcttttcctccgtcaccgtaccgtctttgttgagatagacgaattcttttatgtcggaaggagattggaagcccacggacattttttcccagttgccgaacggctttattttcatctgatagcggtagatagtttccgtggaggtgacgcccgtcttgcccgaatcgagataggcgttgcccttctgccagccgccctcggcggcggaaaagaactcgtagaccgctttcatgcagcggctttcgcccactccgttttccgcgatgcctatctgcgcgcaggtgcccgcgaatcccgtcgcgtgatacatggggtcgctgccggacgtttcgaggggcacgttgttgaaatccgccgcaaacaccgtcttgtattctcccgtcacgtcgggggtatcgggagtatcgggcgtatcgggagtatccgagcctttttcggaaattttcagattgtcgaaatacaatcccgtatccttggcggcattggctccgtccgcgtccgaggagagcatattgatcatcagtttgaactttccgcccagcccttttatcaccgctttcactttaaagacgtttcccgtcttcgtaatcgcgcagctctcgaaaattttatcggcgccgtaatccgcatattcgtgcgttccgtcgcttttgagaatgatctgagaattgatatcgatattttccgcgccgatctgagagagcaggcaattcgcctgcgccacttttccgaaaaacgccgtttcaaattccaggacgtactgtttccccgccttcatctccacgttcagattgttttcattggtgtagagcggctctttctgccagccgccctcggcggtggaccagaaatcatagacggcttttaagctcttgccctcaatcccgtcgcccgccttggtggacgcggaggcgatgcccgcaaagccggtggcgccgaacacggcgtcgttgcccgaaagcccgggcgcgacggagagggaatatacggaattttccccttccgaaatgtcgaatcccgaaatgcgaagtcccgtattgttctccgcgttcgccgtttcgtagtcggacgtcaccacgctccattcggaagtgagatagctccccgtgccgcgggcggtaaattccaccttccaccatccgtccgtactcctttgcgccgaggaaagggtgatgtatttttccgtaccgtaattggacgcttctgcgttgccgtcgggacggaaggtgatgacggaattgaaggaatccgtgttctcccctcggagcatcaaaacggtgctggcgatcaagccgtaagcgttgaattccagcgagtacgtatacgttttcgccgtatccgtagcggacattcccgcgcggccggtgtcgatatacagcatggactgctgatatccgttgtcgtaaaaggtgtacggagcctcgatataggacgcggtggactgcacgacggaacgggtcgtgcccgcgatggcggtggcgccgtaaatctcgtcgcccgtcgccgtcacggcgaggttttcgaagtccgcgccgtaaagcagcgtatcttccgcgtccgcgttcatccgaaatccgcgcgtccccgcaaaggcgccgcttaaaatcgctgcgccgcagaatacggacaagaccgccaaagcggcacgcctgtttttgttgtttctcatggtttttttccctcccgatatgaatcgatttctatttttacggctcttccgccgtataaatctttttgaaacagttgtttttttgttctgattgtagtataatttttacatgggaaagcgcggaaacgtcctgcgcgctttcaatacggctgaggatttgttttatgtatatcatccataacgaaaaggtgctcacctatatcgactatcagcccgtctataagggtctgaacgtgacggaattcggcgaggaaacgaacgactgcgattcccacaacagcgccctctgctatcgccacaatcacatcgtgcatttcgtgctcgaagggacggggtgcttttatcgggacggaaagacgttctctctttccaaaggcaaggcgttcgtcatcacgcccgaaaatctcattcgctacgaggcggaaaaaggaaagagctggacgtactgctggatctccttttcgggcaccgactgcgacacgctcttcgaacaatgcggctttacggacgaaacggcggttttcgatttcgaggacgaggacattgcgcctttgaaaaaatatctttccgtcctgcgcgagggggccgtgacaaacgcgcccgtctttgccctctccgtcggcgcgatgtgtttcgaagttttgagaaactgcgccgcaaaactgcgcagcggcgagccgaaagatcagggaatgtcctcctccatcatcgacaccgccgtggcgtatatgcaggcgaatctgcacaaacccatgaacgtttcccagctctgtcgggagcttggcatctcccgcacctatttctccacgctgttcgaatccaccttgaagcagccgccctatcaatacctgcaaaatctgagaatccagcgcgcgagcgagcttttgctgagcgacaaaaatctgcacgtttacgaggtggcggaaatggtcggcttctcttccacggcgcaattctgcaagacgtttcataaaattctcggctgccgcccctcgcagttccgcgtcaaatattcgaaatcggcacagtagcgtcccgcaaaatccggctttatcggcaaagcgaggcgcaaacattgcctgcgtcctcggtttccttcgagcttcaaaagcgtcccgtccccctctttcggcgcggaagttctatcgagagagcggaagcgggaaaaacgcggttttctctttctccgcgcgcttttcaggaaagcacggaaggaagttttttctgcggccgcctatcgatgccccgacgaaacttctcaaaaagttcgcacggcgttttttacgattccccgccgttttttgacagacgttcgcagggaaacgcgaaaaagataattgaaaaatcctatttctgtaatttccgacaagcaggcgggaaacgccgattaaaaatctttcgaaaatcttatttctgcaatttcccgcacgccttggggaagcgttgattatttaaaaattttatctctgtaattctcggcggacgttcgggcgaaagcgcggacgcccgctttttttcgtccgcggcatccgccgcagccctattttcgcgttcctgttttgccgctcgctatcccgtccgacgttttttgcttttcccgacaaatgtccgttcagacgctcgcctgttccgccgtgcaaaatttcgtccgaacgttttttctcttttcagaggatcctttcgttcagactcttacactttgccgagcaggatcccgtccagacgcttttccgccgcggaaaaatcgggacagttcacgaggcggtgctttcccgacccgtcgggaacaaacgcggatacgcccctctcgtctatcgtcacccgccccggctccgagagggtgaacacgccgtcggcgccgaagatcgccacataggaagccactaaatcccagctgtcccgattgccgtgagagtgtacgaaataggattccgcgacgggattttttctgtccttttcgatgagcacgccgcccgtgtgaatgtgccatccgacgagatagtgcgccaccaaaacgggcacgggacactcttcgaacaccgtcctcgccccgccgatatccaccttgatattgcactcggcttccatcttttccgtaccgaaccaaacttcgggcacttcctcggacgggaaaaagcagcccatcaaagagagcgcctttgcctcccgcgccaaaagttccctgcccgaaaggggggaaatatcgtccccgccgctttttaaaagggcggcgatgttgatacagcacccgaccgcgacgatcgtgattttctctcccgtattttccgccagcgtccgccggagcacccgcacggcgtcctcgggcgcatttcctccgttcgctttataggcgttgtcgtaaactgccgcaatgtgcctgccgtaggacttgacataaaagcccggatcctccccgggcggcgtcctcttcgtctgcccgatcggcacttcgcggccgtaccagcggtttatcgcgtccgcgcagcccgccgcatacgggcttgccgtgctcagcgtcacggcgaggagcttcgcctttcccgcgcgctcgcattcgtgcacgatcgcaagcgagcccgtgtcgtcgcagtcgccgccgatatccgtgtcgaaaataattttctccatatccttttaaacacctctgtttgcctctacgttcgacgtttccgtcttttcgaggaaagatacgcggacgcccttcaaaacgctcgcagcccccttaaaaagagtctgaaaacgttttgaaaagcaaccgtcttttatcccttgacgccgccctgcaaggaaatgccctttgcaaacactttggttcccaaaaagtacatgacgacggacgggatagccatgaggacgctcgccgccagcagcatgggagtgtcctgtttgccctgcgtcgtctgggcgcgcagcatattgagtccgagggaaatattgaatttttcgggagttctcagatagatcaaaggtcctaaatagtccccccagatgcccatggcggtgaagagcaccatcgtggcgatggcgggcacgcagttgggcaccaccaccgcccacagccgcacaaaggaattggcgccgtccatttccgccgcctccatgatttcgttcggaatgccgcgcatattctgtttgaacatgaacgtgtaataggcgctgccgccgatgctcggcaggacgagcggccagaaggaatcggtaagccccagcctcgcccagatgatgtaggaagggatcatcgtcaccgcccaggggatcatcatcgtgcagagaagcaccatgaaaaatccgtccgcgatcttgcagcgaaattttgcgaaaccgtaggcgacgaaaatggtgctgaccgtgcagatcacggtattggaaaggatgagtacaaacgtgttccctatccagcgaaagaaattcgcgtccgcctgaaagacgcgggcgtaattgtcgaacgcccagatcttgggcagaaagcggaattgcaggctgtaatattcgtcgtacgtcttgaaggaagacagcaccatcaccacggtgggcaggatcatgaacacgcccaccaaagagagcagcgcgtaaaagacgatatttttgcgcagggagcgctttttgcggctcgccagcgtctttacccgttcgggctgcgggggcgccgcagacggcgcgccgttcgttatttgtaaagtttccatatcagtcaccgtccgcgtaataaacttttttgccgccgaacttaaagaagacgaacgtgacgaggagcaccagcagaaacacgatccacgcataggcgctggcgtaccccatcatgtgatccaccatcgcgtaattgtagatctgcaaggtggcggtcatggtggcggtgcccccgcccagcatcatcatggggccgtacgcctgcaagccgccgatgatatccatgatgagaagatagaaaatggtcgggctgatcatgggcagagtgacgtgggtaaacttcttccaggcgctcgccccgtcgatgtccatggattccaaaagctccgtgggcacgcccgccacggcgggcagcagcatggtgatctttccgccgatcccgctccacaccgccatgacgatgaggctgttcatcgcgtttttatagcccaagaaattaatcgaatccatgccgaaagtagtcagcatactgttgagaatgccgtatttcgcgtacatggactcccagagcatggtgcccgcgataaagggcagcacggcgggcagatagtagagcgtctgaaaaaacctcttgcatttgggcaccgaattgatgacgagcgaaaacgccagccccgccgacattccgaagatggtcgtggcgcccatgaatacgaacgtgtttttaaacgtcttgaaaaagtatcgctcgtacttgaagaggtcgatataattctgaaatttcacaaacttcggcgtccccaccatctgataggagcaaaagctcatatagagagaatagagcatcgggaataccccgaagcagagaaaccccaccatccacggactgatatagcccaaaaactgcaaggtcgtcttcttttcctttttcatgtcttatccccgtattccgggcggcagggaagcggcaaattacatccttcgccgcagccctgcccctccgttttgccgattggtttccaaaaggcgcgcacagctcagttctccgcctgctgcgcttgtcggacgcgcttgttgatttcgtaatccagaacgtcccagaactcgtcgaaactcatcgcgccttcgagatattcgcccgtgtacgtcagttcgatattttcgaaagaagcctgcgaacagtacgggttgcggtcgatgaccaccgccttcgtcagcgattcgtaaaacagccccgtcgccttgaatttgacgggattcgtgttcacttcgggatcgagcatatactcttccgcatactttttgagcgcggggaagttgttgcactttttggcgtcctgttccccgtaatattcgagataccattcgacaaatttgaacgccgcgtccttcaccttggaacgggaggacacggaaaagccgacgcagcccgtcgtgtagggcttgctcgtcatccccttctccttgacgggaggatacgccacgccgaggtcgagtttatccaggccgtaaaaatcgacgcagtagagccctcccatcgtcatcgccagctttccctgcgcaaagatgggatagaaggtggagcccgtattgttcacttcgttggcgcctaaaatgtcgtaataatatctgacgacgtcctgcaccgccttggtgtcgaaagtggattgataggtgacgggatcgaaccaggacagccccgcgttggtgatgaactgcgccagcactttcgcctcggcaagcccgggcaggaaagaatactgcgtgatattcgcccccgaacgctttaaaagctgatcgcacagcgtttcgaactccgcgaaagagaggggatccgctatcccgtccccgtccgaatccctttcgatgacggcgagctgctctttcgtaaacagggcgcggttgtaaaggagcatggtgtccgtcgtccagtccttcatcacggcgtacgtcttgcccgtgccaaattttttagtggcggggtcgtaggcgtaagcctgcgtgttgatgtcccaaacgtcgtccaaagccaccttctccgacgcctcgaaatagccgtccagcggttcgagataacccgcggagaggaagggataaatttcgcccggctccatgccgaacacgtccgcttccgttctgcccgcaaagtcgttcaacaaattggtgtagaaagaccccgtcgaaatttccgtctgtacgcgaatattcggatactttacgtaaaaatcctcttcgagcgcctttttcagcttggaattggtttccgcgtcgttaaacgaataatagcgcacgacggtctttttgtccccgccgctgccgaacgtgtcgtcttccgaatcggaaacgttgctctgtccgccgccgcttgaatcggacgttccgcctccgcacgccgcaaagccgaaaagcatccccgcggccaaaagtacagacaaacctttgatgtattttctcatcgataaaacctccgttttttctctttcaatcgccgtttgcaaaaaacgaaggcggggaaagcaactctttccgacccgaccgccgccgttttttttgttcctctccgccgacgaagcggagcttatcaaatatttttgtttgttgtgttccgcaacaaacagccccatggggctcatttcctgtcgttttttactttccaaacgctcgttctcttttttaggagcgaatgccttttccgtattttgcgaacggtcgtttttttaagaaatgaaaaggacctgcgcggcgttccttgatttttgaaaacgctcgttctctttcaaaagacaggggaagagcgtcgcgcagttcttttcccgccgcgctccgtttgacgagagaggaagaagggttgggggaaggaaaacggagcgcggcggctatgcgccgattccgaatttccttcccgttcgttccgcgaacgcttttctttgtcccttcccgcctgtttcagtcctctttcgccctcgtttttaacggctataaagaacgtcctgcgaaatctgatacgcgtgtccttgggtgatgacgggcgtcgtctgtcccgtgggcgtttccactctgtcgaaggtgacgtcgtcgatggcgatggccccgtaattgtgcacgccccacataaagtaataattgtccgcgttgcccgtcgtaaactcgtattccaccgagtagaccttgcctacctcgtagccgctcttccattcgaaaatgcctttatcgtgctggaaggaaccgtcttcgcgggcaaggcagtagaactgtccgttttcctccgatttcacgtcctcgatgactaaaaacttgaatctcacgcgataggtggtgtttgccgaaaatctcatatccgcgagattggtgcggcagaacacgttgaactcatacgcgggagagagcggatcggtattgaggatatagcaggaataattgccgctgatggtatatctgtttctgcggatgatgcccgtggagcgatcgccggggaacatacagccgccgttgaacacgcccgcctcgaagttctccacgacgcccttttcatccacgtcgatgttcttgtccgggaccacgttatgcgcgatctcttccgcgtccgccgcatgggaataatcggtggaaatgcgggcgagggagatgttccggatcgctacgccgcccatattgcggacgccgaacacgagattccacccttcgccgtattctcccgtattgaatacgtaggaatatttgacgtaaccgtaatcggcgggggtatagaaagagccgatacggttgaggctgaacgactcgatatagccttttttgtcgtttgcgtccgccgcgggatcggtcagcgccacatagaagaagccgccgcccgaaatttccgccaccgtcgccgcgtcgaacgtgatcatgtacgtcgcgtgcgcgtccagacgctctttgagctgcaagccgtccgcccagttctgagtgatcgtgctgcggatctcataggagccgtcctcctttttttccgtataatcgggattgatgcggaaggaagccgaaacggcgtccgccgtcgttaccgaaacgttgtctatcgcgatcggcgccgcgtcgtttttgcagccgaaggcaagcgagtattccttgccgtcgtcgggcaccgtgatcgtcgcgctcctgtgggaaacgtcgttagaaacgtccagccattcgtaggagtccccccacgtctttccctccttggaataggcgcccacgagatagcggctgtcgtccgtgatggagatgtcctccttcgccttatccgtcctgtaatcgtaagaaatatgatacgtcttgccgttttcgaggtagccgccgtaagcgaacgcgccgctgccgccgcccaccaaagccttgctcgaatccaccgtcacgaggcggtctgtaatttttcccgcgcccgtcaccgtatacgtcttcgtgccgtcgatcttatccgtttgggagagatcctccgccgctttgtccccgacggtcacttccccgagataatatttgttctctccgtcgttgcccgcgatgggaagctcgattttcggcgttcccttttcgtcggaaacggcgaatttgagcgtataggcgcccttgggcagactgtcgggaagggtgtaggaaagagggaagaaatgcggctcgccgccgtttatcgaaacgggattgaatctcgcgtccgtacccgtatagacggtttcgcccgccgcgttttcgagatagacgctcagatcgtaatcctgccagcatctgcccatcgcctgattgctccacagcgtgttgagatacagtttgtcgcccgccttcacctccgcggaatactgcattttatcgggcaccaggcgatagcccatcatgcggttgaagtagtccacgagctctctttcctgcttgaccactacgtcgaaatcctgcgccacccagccgatgaccgtctgatagttcacccgccatttatggagagcttcgttcatcgcctcgaaaaggggatagggatcgtcgtcgccgtgcttgtaatagccgtcgccgatctcgcccaaaaggggcagccccgtgttgagatagaaatagtctaccgccatgcgctgatcgtactcctgtaaggcgaacgcgatgccgtcgcggcggaacgtgatgttttcgagctgcaaaacgtggtcgtaacccatataatacatgaagtcgtcgtacgtctttgcgttgttgacgccccacatattgtttaaaaattcgtaagtgcaggagatgacgagcagtttgtccccccaggcttcccgccaggcgtctatggtgtcgcagagcgcggcggtgcgttcctccacgctgttgtatgtattccagcccgaatgccattcgcccaccatgccgtagccgcgcagttccaccacctcgatggcgtcgcggtaaggatagtcctccgccgtgtaatgtcccgcaaattccgtcaggaattttctcagctcttcctgatagacggtgctcgaaaggtcggcgtaaatgtccccgctgttcaccaccttcggcacgttgtaaggctcctcgaacagccaggcgggacagccgttgactacgccctgattgagttccaaaccgtccgtgcaaaggcgcatattgatggtcttgccctgcttcgcccaatattcgatggtttcgtccatgacgctccaatcgtagttgccgggagtttcctcgaacaccgaccagcccgtggagagagaaacgctcttcacttcggggaaagtgcccttgtagccgagggagggcagcccgccccagagcggctcttcgagaatgacccagccctgcccttcgttgtccgcgcagagattgttcgtttcctcaaagcccaccgtcttataggcgcccttcacgttttgactgccgtacactttgacggtgttttcccccaccgtcttgtccccgaggtattcctttttctgcaccgtcggcgcatcgccgcccgaagaggacggggaagacgaggcggaagaagtcccgcccccgccgcaggcactgagcagcatcaacgacgaaagcagcgccgcggaaagtttccatgatttctttttcataaatttaccccctgttcaggtgattttgttctcgctcctttcgtcctcaaagaacgaaaggtatctcgccaaagacgtccctttgagaggttttccccaaggtacgccccgctttctactttcagtatatcatcaaacgcccttcatttcaagtagcatatgtttttaaatattgtgcttttgttctgttttttgtttcctgccaaacaggcgcccgcgccgctttccgggattcccgcggaaagagagcgaaacgccgcggcgcctttttataaaggggttccgctctgccgccctccgtttgcgcggcgaagaaaaaggaaaaacgcgcttttatgtcgtatttttaaatgcgctgctcttattctcccccaaagagagtacaaaagcggtatttcttattgtgggttacgataggaaaagaataacttgcaaccgtcctttcattgtttaccacaaaaaaatcacgcccgcaatgatatgatgtttgcccccctatatcccgcaggacgcctcatttacagacaagacaaacatcatttaaaattaatcttgtctgactcattataatattttacctcaatgtaagcattcatctcattgtcagttcatcatttgacaatagtgcaaatggcgggcgggcaggcttgtccaaatagtagtatgcaacagatgtgtagtcgtcatatcgcggacctgtccacccaaggttatccattttcatgcaaaattccttgtcgaaataaattgcatcggttacgtgccaacgataaagcataaatcttttttgtgcattgtactgttcctgaccatcccctgttatggcaaacataccaacgtattgcccgctataagtctgatattttttgatttttatgtcgtttccaaaggcgtaagaaccgcaaaaatagtcttccgttccggtataattgatggacggatacgtttcgccgtcaatatacatttttgcttcgccctcaacccaacacgtgttatgtccgttgagaccgacagaaagcgtgacgccgacaaacctgcctttgccgtgtacattctcaagaacggtatagctttttccctttgtaacaggatgctcttggtgatatgtagcatggaaatacgagatgttttcgggtacagcacctttccatccggtaatcatataatacatccccagtttgtcgtcggaacgattttcgatggtgattttgcaattcttccgaaaaggcatctcaaaataagcgtttcccgctctgccgggagcaagaagcaacagcgcggaattcaaatagggaaatcgtccgtcgcaatccgtaaagttttcgtcataggcgcatcccaaaaacgcggaaagcggagcttccacactcggaaacgcattgttttcccaataaattctaaggataaatgcatgattgacatcccccgtgaaccacatgtgggaaatcatcccgggaccgtcaacgtcgcaaagcgtaacttcattgcggggttcaaccatgatcattggacggagtttttcacaatcttttccccttgtgccgccatttcggatacccgtcgggttttcggcggaaaaagcaaaagtggttttgtcgtttaataaatacataatcgctccttcatttcattttgatatttctgaccaaacttttattatgccatagcatatttttggttttttcaagttgattggcggagggatgcaaaaaatcatcacagactttcattcatgatgatttttattcctatgcggttgttttgcatttctccgttaagaataccgcgttttttcgaaagactttcttctttccctttaaaaaaccgtttttcttataaaagcggcagttcttcccctcttttccctttccgaagaaagagaaatcgccgcctttttcggcacagggaaaaaccgagtcccgctttttgcgattgcggcgcgatccgccttccgcaaatttctttcgggccttaaaagcgctctaccgtttctccgcgtgcacggccagcaaagcgccgccttttcttctcgattcctcggcgcgtatcgccatcagatgactctccacggaatcttcgagtcgggtgggcgcgtcctcctccccgcagaggactttatagaattcctctatgagtccgttgtcgccgccgccgtggttgtgccctccctccaagagcacgttgacgtctatcgtttccacgggtcggttgaaacgctttatagaaatgacgttcaccccttcgtccatgtcgatttgtccttccgtgcaatagaatttcataattcgcccgccgcctgcggtaaacgccgtcatgcgcaggtttgccttgatgccgttgaaaaaccgcatttcgacgatctggtgatccacgacgtcgttgtcgcaggcatacacgcagcggccgtacggccccgtttctatcgctttgcggatattggcttccgtgagggggagctcggtcgtcagcacgttgtacggccagcagttgtcggggctgccgacgctcttccagttgcctatgtagatattttccgcgctgtacgtacaggtatggacgtatttgcagtcggtgcacctgtccgaggctccctgcggctgacattcgcggcggaaatgtctgaggtcccccatcgaggaaagcgcttcgcatctgccgcccgcgtagtattgcaaaaggtcgagatcgtgacagcacttttgcaggatcatgggcgacgactccccgctgttgcgccaatttccgcgcacgaagctgtgcgcctgatgccagtagcacacctgctcgacggagtctatcatcaccagttctccgcagctcttcccgtcgaggatctctttcaatttgacgtacgcgggcgcatagcggagaacgtggcacaccaccactttaccgccgtatttttcgtgcgcggcgagcagccgcgcgcattccgcctcgctgcccgtgacgggcttttcgaggagaacgtcgtagccgagctgcaacgccttttcgcattgacggacgtgatcgttatccatggtagcgatgacgagcgcgtccgcgcgttttgccgcaaaaaattcctcttcgcgggagaacagcgcgtccgcctttacgccgaaaataccgccgtactttttgagcttcgcttcgttgacgtcgcacagcgccgctatctcgaacctgtctttctgatccgccatgatccgcccgtaagcctccgccccgcgcgaaccgcagccgatgatcgcaatactgaatttttttatttccatatcattccctgcctttgcggatttcccgcaattttgttttttcttttctccgtccgctcgctccctcgaacgcgcccgacacataggcgcgccgaaaaagccttaccctatctccccgctttcaacgcttctccccttccttgcaaacgcggttactttgcgaagacaaaacggagcgcgtttctttcgtattgtccctatttgccgcgcggtcttacgcgttttcccgataaaaaacgcgcaatcgacgacaaagaggcttttcgggaggtcaaaaatccccttcgaggcgcaattttcccaataggcggatgtcccgcgacgacgcgcccgccgctattttgtaaacgccgccgctgaccgcaaatcgatgatagacgactgagtaaaacgcaaaatcgctcgggcgaagggaaaaggacacccgttttttttctcccgccttcaagaataccttttcaaaggctttcagttcccgtccgggacgttcgacgggggcatggcaaggctcaacgtaaatttgaacgacctccgcgcccgcggtttccccttcgttcgtcagcgtcagcgacacttccgcgcccgcgtccgtctgtacgagggaaaaatcgctgtacccgaaacgggtgtagctcaaaccgaatccgaagggaaagagcacgggaagatcataaaaatcgtaatgccgatagcccgccagcaccccttccttataccgttcaaaaaagccgttcccgcgctcctcccccgtcggcgtatccgacagggaaagggggaaggtttccgacagctttcccgacggattcgtttctccgctcagcacggaggcgagagcttcgttgattttttcgccgccgaagcccgcgtagacgatcgccgctaccctgtccgcccacggcgtcatatccaccgccgcgcccgattccacgacgacgattacgtttttgttctcttccgcaagcgcgaggatgagtttttcctgttcgggcggcaggcgcagggaagaacggtcgtaactctccgtttccgtgagctgattattccccgctacgacgatcgccgcgtcgctttcgaaggcggcaagccgcgcttttttgacgcccgtcgactgacaaagagccaaagggagcgtgcagctcgaatagctataccccgcaagatagggaaattcgccctgcggcagacgctttttcagttccgcagacaggggagagggcggcgccataagcgtcacgcgggcgctgccgccgcccgtacaggaaggcttttccgcaagttcgcccgccacaagcacccgaactttgccttttaagggcaagaccccgtcgttttttaagagtacgatgccttcccttgcggcgtcgagggctatcttttcccgttccgcgacgggcagcgcctttcgccgctcccctgccgcctcctttttctttaacagcgacaagatgcgctcgacgctgtcctcgacgtcggcttgcgcaatcgcgcccttttccagaccttcctttaagttgtccaaagaagcgggcgcatggggaaattcgatgtccagcgtcgctttcagagcgcggctcctgtcgtgcaccgctccccagtcggaaatgacgacgccgttatagccgagcttttcccgcaaaatttctttgag

SEQ ID NO: 2179 - DNA, 4715 bp, Unknown
  16S sequences of unknown bacteria
ccaatgtctttctgttctcctgaatcattgcatacacttttgaccaggctccaaccagacagccctgcacaaagtcttctggatatttctcaattggcatatctgtcgggaagtatcctctttcaccaaccacattctgaatatcccattctgttacacgattcgtcaccataaggtccatgagtgctttcggaacattctcttccttcgagtactgcagcactaaatagtccggtgttttagtagcagtttcttttggagccgtatttgcagatgcagaagctggctgattcagcggaagctcctgctggaccggatttgtaatatcctgcaccggctgactctttctctcttcgactggatttactttcggtgaagtaaccggttcgatgattgatctgatcgatgcatactcaaacggaacttcttctggtaaaccgtaccggttctttgcatcccagcatggatgatggctggtgtacatgaccctctttccaccctgagctttattcttgcccttctgagaaccctgaccatccacatttacaacaatagtcttataattggcaaagagaaccatgtcagcccattcttttgccaacggagcggtctgggatgatgtcttttttcccagcttcaactcccatcgatcataggatcccatttcatccggctgctcaaatttacgcatctgtgcatgcgccgtaagcactacattcacgccagcttcaacaacctcttccagtgcattcagaaatcttccaaattcttccttggcatatacataaccatttccatatccgaaatcttccacgcctttcttcccgtaccgggcacacagatctgcaacacacatctgctccgcccaatctacagtatcgatcactagcgttctgcagatggatggattctgtcttacatatctgatctggtccattaacatctgccagctgctggctttttcaaatcgagctacatccatgtccttggtgctgccttctgtatcgataaatactggctgcgggaactgtgctgcaaaagttgattttccaattccttcaggtccatagatcaaaactttctttgaactggggatctttcctgtgataatattcattaaaaatcacctgctttccatgtaggagtactctgtaccggttcttctgccggtcctgcatctgctccaacaacataaccgtcttcgatgataaggctgcactcgcctccggtactgactcttgttgcaatcgcctgcagaccttccgcctccagccagtggttaaattcctgcattgtttccacatccatctgttccagcttatccagaagaacaaatccacactgaggattcaacttccggataatagctgtggaaactttcatctgatcagctccggacattccatcccatttctgacctttatagatcagttccccatcctctactgacagctcatccagaggaagatctgcactggcaagaagatcatttttctgtttccggattttttcaatatcatttgtcagagccatatactgattttcgtactgcttggcatcctcttccgccttttccttatccagatttgcccggactttacggttgatttcttcgacctctgaaatattctgctcaagctctgcagtagattcatcatgcagatccaccgcgtccatccgggcaatctgcagatcgttctgtacctgtgtctgctgtttcagtaaagcttccatctgctcgttaatctgctgcatcttttcttccagtttgtgaagattctcccgttttctctggttctcaccatttctggctagaatctcttgctgctgatgaatcaattctgataccgacaccaattcttttggtacctcttcaaaatatggcatttctttggcaaactttgctttctgatcagcaatacgaccgaccgcctggcgctcattgaactttgaagtttcctcataattcagcttcgccaactgctcatccacaccaatgattttcaacaatgtctgagctttctcttttccggaggaagccatgaactttggaagatctaatgccagctgttcaacgaaactgtccaacaactgctgacctgccttctgtccgcttggatccgtcactttcagatcactgttctttcctttccgctccaccacaattccattgttcagcgtcaccttcagagagggtggaatcacggatccttctctctgtggattcgatggcctgaatcggttgccaccaagtacccatgcaatggaatccagaatagatgttttcccctgattgttacgtccccccaggactgtcagcccgttctgtgtgggaacaatcttcactgcacgtacacgcttgacattctcgatctcaagactgttgatttttacactttccatcctcttttccatcctctctttctgtggtgcatgctattacctgtctattcagacctttacctatcttatctgccaacacttttgatgttggagaaagttccgcaaatgcttcttccacagacctaagtgcaaataaaattaccggaaggtctttctccgggaaagactgcaccagttcaacaattaaattggcgtaaactgtcgctgcttcctcaataacttttgcaaaatcttcatcagttttggtattaaaaatctcaggtaaaagtgcctttgttggtttttccattttcccttatcctcctactttgaaatcactcttctctggccggacttccggctcaggatcaccatcgataccgatccgtcatccaggaccatccagttatctggtaacagcccggctctactgattgccttcttctgtgccagtgtcggcctttccggtctcagttttcccattctccgctcctttccgtctctttgacagacccacataaatcgttccaactgtcgcgcccatctcatctgcgatctgctcagcactccagccagccttgtccagggcttctatctttccccagtccagtttcttcctggcggaggttttaccccccccccgcctctttcggcggttccggagcatcggtgcccctgcagatctctggctcctcgatcgcaaactcaagctttagcagatcccgcagcagcactgcactgtccagcgataccggacggataatatagacatctttaccatcctcgatggcatccagcgctgcctctctgttgatcatcttcaagttcatttcccatacctcacttcccatgcaatctttccagctcagcagctcgctccagaatctcactggcatagctgctgatcacaccattttcatatgcccggatcccgagcttgtccgagtacccggcgttataaaacataagtgccggagctgcctcgccatatttctcgatcagatcttccaggatgctgaccccgaccctgatattgtcgtacggatccatcagatccagacagttaagctcctgggctctccgccagtggatgatctgatccacctgcataagacctacacagtcaccattgactgcagtcggatcccagctggattcccgctcaattacagcctccaccagctccgggtagatcttggaatccaggcagatcagctcaatgtattccgtccagtcatcctgccggctgtgctcggcctgtacgatcaacgccaggccgaagcaccacatcagtaaaattagaacaatagttcctaccactcttcgcattcgtcctcctgttcatcatcctctaaagttgccagttccactacaaagaggataagcagaagcaatccgggtaccgcctgccacagctgcacatcaatcccggacaggtagcccagcgatgctataaatgtgataaattctgttaatctcttaagcactttcatccttttttctcttttcttcctccagaagcaagccctgatacagggtgttggacacccgctgcatgatcttcgcccgctcttccggcggaacacagcacgaatcatccatgataatgtgggtgtgaccgatcataaattctttctgcataagcctctcctttcatgtgacctgttgacttgttacatcatatgtaaaaccggttgtacatctttcttagtggcagagctggaaaaactccatacccctatgaaaccagctctgcgactgctgcagtaataaaccatgggaaaagatactgagtattctttgggcatctgcagctataccctagtggacctgccgggattcgaacccgggaccgtctggttatgagccagatgctctacccactgagctacaggtccttgcggcaccttggtagatgccatttgcttctgttatttagttgtgctatcctctccttacaggctcccgccagagccaagtacgaaagaaaggagataaacatatgcaattaactcgtgatgcagataaacttgcttgttccatgtataagttctatctggaaagacgaaaaaatggtatcgacaaaaacaatgctcgtcattttgatttttctgaaataaaatccatcaaatgctgttcttcatggattgatccggatatcaaagcaactgttgctgaactggcacgtgcaaacctcggaactatgtacttggacggcggattttttgcaaatgataatttcatcatttatatggaaaatcgtttcattaatgggcttaagggagtatcccaaagtttgtgtaaacctccaaactgatgtaagataaaattac

SEQ ID NO: 2180 - DNA, 8444 bp, Unknown
  16S sequences of unknown bacteria
attttttactccttccttgtccgaattgtacttcataccggttatttgacatttcttcttttatcaccttccttccacctccatcttaccatatttctccgtcgatttcaattgttgaactcttaatttctcctaatttttcgtcaaattcacaagtgatctgaaaatttgcgcaaaaaaatcggccgatggaaccggccgcattgtacagttttccgtctttcgccccaatggctgcgcgcccgcgggcaaagcgcaggcgcactgcaaagcctgtttgcagtgcgcccttgctatgtcttagtcttttccctgcccgtagtggttctttacgaagtcctgcatgatggcaatattctcgtccgagatcgggatcggcttgccgccggcggcctcgatcatgtaaagaatacgcgcagcgatctccaggaccttgcaggtgcggaatgcgccgtccatatcgccgcccactgcgacagcgccgtgggagcggaccaggcaggtattcgctttctcgccaagagctgccacgacagcgtctgccagctcctgactgcccggcagggcgtagggcgtggtgtgacaggtatcccccatgatctgggccgcttcgtccatgaaaaggggaatgtcctttccctggcaggagtagaccatagaataggtgggatgggtgtgaatgaccgcattcacatcctttctggcacgatagaccgccagatgcatcccggtttcaatggtgggcttgcgcgtgccctgcacgatcttgccatccagctccgcgacgacgacatcgtcgacggtgatggtgtcatactgcatggcactgggcgtcagatagaccagacccgtctccggatcacgggcgctgatattgccccaggtctcaacggtcagccccgaattggccattctcaggccgctctctacgataagcttgcgataatccatagtaaactgtcctttttacgagttcgttcaattactcaacgtactgaacatagtcgtcgaagtattcctgtgcattggtcttgtcgatgacgccggtgccggtgtcgatcttctgctcggcttcgccgccgtcgaagatcttcagcatctgcgcgacgccctgccggcccatctctgccggatgctgtgcgatgtccagaacgaaggagccgtcaatgacatactgcagcgcctgtgcctggccgtcgtagccgatgatgtcgaccttgccctccaggttcgcgtccttgacagcggacagcgcgccataggccatgccgtcgttgcagcagaagatcagctgcaggtcggggttggccgtcaggatgttctgcaccgcggtgtagccctggtcggtctcccagttcgccgtctgggtcgcaacaacgtcgagataggtttcgccgacgcctgccaggaagccttcgtaacggtcgactgcattggtctggccttccacgccggtcaggattgccgtcttggtgccttcgtcatagttttccgcgacccattcgccagccagcttcgcgccgttgaagttgttggtgccgtagtagggcaggtcccaatccaggtcgatgcgggtctgctcggagatgtcggtgtcgaggatgatgacggggatcccggcgtccttacattccttcagggggttgtacaggccctcagaggaagcgggaacgaggatgatgccgtccacgtcctgggcgatgaagttttccaggatgttgatctgctcgtcaacggatgcgtgctcggagccagcctggatcaggatgttgacgccctgctccttcgcctcagccttggctgcgttggcaacgacgacgtgatactcgttgttcagcgtcatgccgcagaagccgatggtcttgtctgcataggcgccggtggtctcgctgccggaggaagcgggggaaccgtttgcgtcggggttatcggagccggtgctgtttgtgttcttctctccgcaggcggccagggtgaagagcatgaccagtgcgagaagaattgcaagtgttttcttcattttgtttttctccaatctttttatttatttttaacgctgtgacgcgttaaatatggtgtgggccgccgcctattctgcacccggcgcggcgtgaccgggagaatgcttgcgattactctgccttgcgctccttagacttatccatgtagaccgcgccgacgatcacaaggccggagatgatggtctgccagtggacggagatattcaaaatctgcaggccgcaggtcagcatgccgaggatcagcgcgccgacgaaggtattgagcaccttccccttgccgccggacagggagattccgccgatgacgcaggaggcgatggcgtccatctcgtagccggagccggtattggggtccgcgacgaacagacggctcagcagcatcagaccggcgatcgcagagaagacaccggccaggacatagacgccgacctccagctgcttgaccttgacgccggacagcttcgcggccttgacgttgccgcccagggcatagacccggcggccgaagcgggtgtaggtcatgacgaagaagatcagtgcatacagcacgatcacatacaaaatggaaatgggcatggaaccgaagagcttggtgcccatgatatttgccaggggaaccgggagaccggtgatggatttgccgccgttggtcagataggccaagccgcgggcgatattcatcgtgcccagggtggcgataaaggccgggaccttgccgcagctgatgatcacgccgttcaccaggccgatgagcgcgccggctgccaggccgatcaaaaaggcgactgcgatcggcacgccgttcttaataaacagggcggcaaaaatgccgacaaagccgatgacggagccagcggaaaggtcgatgccgccggtcagaatgaccagggaagcgccgatggccacaacggccacacagctggactgggaaatgatattctggatgttccgcagggtcagaaagtccttcccggcgattttacagacgatcgtaaagcagatcagaataagcaccgcgccgatgtacagggcaaaggaggaaacatctactttctttttcgcgacggtttcgtttttcatgcgtcttttctcctctcaaaatgcgtaagacaaaactttttcctgggtcgtggaggcgtcgttttccaggacggtacgcagcgcgccttctctcatcacagcgatccggtcgctgagccggatgacctccaccaggtcggaggagatcaggatgatgctcgccccgtttttgacaagctccagcatgatctcgtagatctcatcccgggcgccgacgtcgatgccgcgggtcggctcgtcaaagatatagacatccgcctgggagagcagccacttggcgatgacgaccttctgctggttgccgccggagagctcctccccggccatgtccgcgttgtacgctttgatcttcagctttttgatgtaatccgcagtgacggtgcgcagcttactcttatggaccaggggcgttccgagcttgtccaggttcggcaggctgacattttcaaacagcgggtggatcagcaccaggccctcgcccttgcggtcctcgctgagatagacaacgccgcgcttggccgtctcggccacgctggtgggcagctccttgcccagatacttgatgctgccggtatggcggtacgcaccgatgatgcacttggcgatctcgctgcgccccgcgccaaccaggcccgagaagccgaggatctcgcccttgtgcagttcaaaggagacatgcttgacccggttcctgtagcacaggtcccggacctccaggacgacctcgtccgttcggccggggtttgcgaccttctcaaagctgatatcccggccgaccatcatgcgggtcagcgcagcctcggtgatatcctcaatgttttgcgtcccgacatagcagccgtcgcgcaggacggtgatgcggtcgccgatctcaaagagctccgccatacgatgggagatatagatgatgcccatgccattggcccgcagctcctggatggttttgaagaggatctcgacctccttatcggtgatagaggccgtcggctcatccaggaccaggaccttggcattgttggagatcgccttggcgatctcgaccatctgctgctgggcgatgctcaaggagccgaccagggtccggggatcgaccttcaggccgacgatatccagataccgctgcgtctgctgaatctgccgtttgcggtcaaagcagatgcccttggtaaattccttgccgatgaaaacattttcatagatgggcaggtccggtatcatgttcagctcctggtacacgacactgacgcccgcctggatgcttttggacggcgagttgttgaccagcggcttgccatcgaggatgatctcgccgctctccaggcaatacgcgccggataggatcttgatgagagtagatttcccagcgccgttttcgcccaggagacagtgtacctctcccctgcgcacatcaaaattcacatcgctcagaacctgaatcccatggaagcttttcccaatgtgcttcatttccagaactttttcgctcacaccgtattcccctttctaagcaaatcgcttgcagtattcctgcgccaggccgcgcagatcctgctttggctcgaagcgctttgtctcgatgctgctgcgcaggatgccgcggatctgcgaaatggtgatgcccgcctcgtgctgcggcagctgcgccgcaaggcagcccagggacgtgctctcgttgctgccggtaatgaccgggcgggccagcacatcggcgaccgtctgattctgcagcagattgcgggagccgccgcctgcaatatagaccgccgggaaccgcttgcccgccagcttctccagcgttgcacagacctgggcgtagctgcaggccagagatacctggtagctgcggatgaccgtcggccagcttgccgtgccggtcacgccgccgtgctcctgcaggtccgcgcggatggcgccgctcatgctggcggggttgaaaaaccgcgcggcattgacatcaaagagcgggatgctgcccgcatgcccctccgccatggcgctgaattcgctccagccgatctgctcgccggtctccgcttcgtattccggcttgagccgctgattgataaacatcccggcgttgttgcgcagcagtgtgatcttgccgaaggcgccgacctcgttggtcaggttgccctgcagggcgatctcatggatgaccggctccggcagctccgtcccgaccagggaccaggtgccagagctgacaaagaggaagtcctcctccgccgccggaacggcgaagaccgccgccgccgtatcgtgggacggcacgcagacgaccgggatctcataggaaatgcccagctcccggcaaatcgacggcagcacattgccgatgaccgtgccatgctccccgatggggcagaacaggtcctccgaaatgccaaaccggcggcacatgctggggctgacccttcttgtgcgggcgtccataaactgggtcgtggagagctcgctgggctcgtttcgcatctggccggtaaacatataattcaaaatatccggcaccatcagcagcttatccgccgcctgcagcttgtggggcatccgttttttcatcccggccagcagataggccgagttgatcttatcgcagacgatgccggtctccagaaacatctgcttgcgcgccgccgcgtcaaacgcagcaagctcgcgctcgccgatggtattccgataagccagcggcgcccccagcgaatagccctcggcatcgtacaatccgaagtccaccccccaggtgcagatgcccagggagtcgattttatccacgcggcgcgcagcctcccgcaggccctgcttcagattctggaaaatggccaggaaatcccagtagaagatcccgtccacctcgatcatctggttgggcacctggcagaccacgtccatggtgagccgttcgccgtcatagctgcccagcaccacgcgataggaggagttgccgcaatcaaatgcgaccatgtgcttcatcgttttcatcggctgatttcctctccgtatctctcattcttcttgcgcttctgtcttgcttttctcttttcatgctatctcataacaaatcattggatccgcgctgaaacgccgtattctgccgcccagggcaaaatatgctgcagcgcctcgcgcttgagggattttccgccccccatggcgtaatcccggcccaggcccgtgtacttgggcaggcccagccggtgatagggcaggaacacgacctcgacctgcagcctctgccctgccatataggcaaggaagccgcgaatggccgcctcgtcgtcattgcagcccgggatatagggatagcgcacggaaatattgcccgggaaattttccagcagccagtgaagattttctaaaatctgccggttgtcgtggccggtcagggccttgtggcgggcggggtcgatgtgcttaaaatcatagaaaaacgcgtctgcctgcgctgccgcctgctgcaggctctccagcggtacaaagccgcaggtctcgaccagagacggcacctgctgcgcccgcagcgccgccgcggcctcggtgaggaacgccgcctgcagaagcggctcaccgccgctgaaggtcacaccgccgccgctgcgcaggaaaaaggccttgtccttcaaaacctcctgcaccagggcatctaccgtgtatttcatgccctgcagcttccgtgcattgatatagcagccacgcacacaggccaggcacagggtgcacttggcgcggtccgtgatatagccgtagccctcccggcgggagatcgccccctgggggcaggtctcgacgcactggccacactgcacgcacacgttgccaatgtgcatgatctccggcgctgccagctgcgattccgggttggcgcaccatttacagcgcagcccgcagcccttgaggaagaccacggtacgaatgccgggcccatcctcgttgctgccgcgctcaatattaaagacggtaccttctaacgctgtatgctccatgggtcttgctttcttctttcccggggtgcaatggtaccccggtttttcagcatcaaagctccagctcgctgcggctgatgacatcctcctgcacatcggcagccagggtcgtgaacagggcgctgtagccggagacgcggaccatcagatccttgtacttttccgggttcttctgggcctcgcggtagaccgcattgctcacaacattgaactggatctgctcgccgtatttgtcgaagaatacgcggatcagatcgcagacccgctgcttcttctcccggctgtccagcgcggacttgagcagacgcatattgaagatcgcgcccttctggatccactgggttggcagcttggagacagacatcgtcgccgccgttgcgccgttgcgctcgctgccattggccggagaaacaccgttgttgaccggggcgccgtttttgcggccctccggggtggcgcagatgctgcggccgaaggcgacgttgccgctgaccgggctctggctgtaggagaagcagcagggcaccgggcccttgccgtacttggagctcttatattcataacgcagcgtcttgccgatgtaattctcgacggcgacggtccagcgatcggcagtgtcgtcatcgttgccgtacttcggagccttgttgcgcatcatcgcctggatctgcgggccggtgggcgtcgtggtcatatcctcatagttggtctcgcaggcgtgcaggagctgcgccatcgtcaaaaccttctcgtcaaagacggcgtatgcaatggcagccagcgcatcgccggtgctgatggagcccgcggtggggccgccgtcgacggagtagatggagccgccctcgaccaggtccataccgcggccaatgcagtcggcgaccagcgaagcgcggaaggcgttgatgtccttctcgcagtgaatttcgtcgttgatatgctcgcagaccggcagcaggtccataaaataccgcagctgggtcagataattctcaaacacctcatccatattcttgcaggatgcgaagggacgcggcggcgcggcaaagcgatagccggtcttggtgtccaggccgtcgtgcatggcgatatccagcaccttctcgacgttcagccacgggcccttggccgcaaagtcccacttgccggggatggacgcctcgatgcagccatcggggacccagttgaccaggtcctcctcgtcggtgatgccaaggtcccgcagggtacgcataaaggccttgtcgttataaaacgccggctggccgccctggtgcttttccattgcctccagattgcggatgataaacgcgtcgtccgtgccgtcaaagaccttgacggagaccgacggggtaaacaggcg

SEQ ID NO: 2181 - DNA, 32759 bp, Unknown
  16S sequences of unknown bacteria
ctgcgagtcatcatccccacatcaccgcctttgcttttcctccagtataccatatatgccgcggctatgtgtaattttgtcaacagggccgtttctccggccccccaaagcgcgcgggcctgccaaggcagacccgcgcgctctgtgcggccggggcgtctgctcaaccggagacgaaggcggccagcagcttgagcgtgttgtccaggccggagacgtgcgtgcgctcgtagccgtgggaggcgaagacccccggtccgatcagcgcgtggcggaagttgtggccggagaacagggaggcgtccgcatccgaggcgtacatggggtagacgtccaccgcatacttcaggttgttgtccttggccagctcgatcaggcggccggtcatctcgtagttgtagggccctcggctgtccttggcgcagatggagaccatcgtctcgtcgcaggtgaggtcgtcgcccacgcagcccatgtccacggagaggatgtcctcgacgtcctcgggcaggcccgcgcagcagccgtggcccacctcctcgtgcacggtgaagaccaggtagatcttgcgcgagagcgtgaggtctgaggaggctgccatctttgccagggccagcagcacggaggcggaggccttgtcgtccaggtggcggctcttgatgtagcccgagggcgtgtgcaccgcgcgcgggtccagggagatgaagtcgcccacctcgatgcccagggcgcgcacttcgtccttggaggagacgttctcgtccagcacgacctccagcgtcgtatccccgcgcgtgacggccgggatgtccttgtagacgtgggaggcgggcgtggtcaggtagaaggtgcccgtgtaggtccggccgtcccgcgtgtggacgacgcaggtctcgttttcgaggttgttgtccgggtatccgccgatctgcgtatagcgcaggcggccgttgggcttgatggagcgcaccatcgcgccgagcgtgtccacgtgcgccgcgacgaccaggggatggccctgcccgccgatgcagcagaccacattgcccttgtgcgtcgtatacggcgcaaagccgtagccggacagcacatccatcaggtacgccgatgcgatgtgcgtaaagccggaggggctggggatgttgaccagtttcatcaggtggtcgacggccaccgtcgtatagggatgcatgttcatcgctctttcttccttccgcaaacatagattccccataagagggaaaaacccgaagttcctctatggagattcgggttttcggaggggttttccttctttttgggggcgaattttcaatcagaccacaaagacgtagatcaggacgtagaagcacgcggagccgagcaggatgaagacgtggaagagctcgtgaaagccgaaataccggctgcggatcggcggaaacttgagcgcgtagaacacgccgcccaccgtgtacaccgcgccgccgccgaagagccagcccagcgccgccgggggcagccggtgcgtcagcggccagagcgcgatcagcgcggcccagcccatggcgatgtaaaacacggtgtagagccagcgcggcgcgtccatccagaagatcttgaggaagagcccggccagcgcgcagccccacacaatgccgaacagcacccagccccacgcgccgcgcagcgtcagaaggcacagcggcgtatacgtccccgcgatgagcaggaagatcaggatgtggtcgatgcggcggaggacgttgtgcacgcgctcggagacgtagaacagatggtaggtggtgctggctgcatagagcccgatcatcgtcgccccgaagacggcgtagctcacgacgtgccaaggggagagcgccgcgcccttgaggagaagcgccaccgttcccacgatggccagcgcacagcccagcgcatgcagcccggcgctgaccaggtccttttctcggttaaacgtcatgacgatcacctctacatctagtttttgatattatataatgcgaagaggaaaattgcaatagcgaattttgaaaaaagaaggcgagccctggagcgcgcctccggagctcgcgatgggtacaaaaaagggcaggggagcggttactcgccctgcccggtgcgtcaaaagccttattcggggatcagcacgccgtagttcccgtcctgacgggtgtagaccaggcagatctgatccgaggtcttgtcgcggaagaggaagaaggtgtggcccagcatctccatctgggagatggcctcgtccacgtccatggcgtccacgcggaagcgcttggtgcgcaccacctggggaacggcctcctcctcgggaaggaagacctcgatggggtccgcgtcgcgcttcatgcgcttggccaggcgcgtgcggtgcttgcggatctggccttcgagcttgctgagaacgctgtcgatggagacgtacatgtcgcccgtggtctcctcggcgcggaggatctcgcccggcagcgggatcgtgatctcacaggtgaagcggtggcgctccatgctcaaacggacctgcgcttcgatctcgtcgccaaaatagcgatccagcttgcccaccttcttgttgacgtagttcgcaacggagggcgagagggtcatcatgttgcgcacggtgatgttgatccgcataaatccaacctcctttatcgcccgcggggcgtagtttctgtcccctcgcgggtacagttcagaggttcgacacccatgcgcgtttctcctgcaagaaatatgaagaaatttttacgtcattttaacgaataaatcgtgacctcgtcgttggcgtagaccaccggcaggtccgcgaacagcgaggggtccgcgcccatggagagctcgtgccaggagaggaccacgtgcgtgacgccgtacttgccggcgagcgactccagcgcgccctcctgcgtgtacatggcccgcacgtccgcggcgcggtccgtgtcgtagacgccgtggaagtagaggaacgtcggcgagccctggacgatggtctgtcccgccagggaggcgaaggggttgttgtgctcgtccgccgtgagcagcacggcgtcgtccggcaggttctcgcgcgcgtactgcgccgcctccaccatgccgtccgagaagagctcgtagtccgagaccacctcccgcgcgagcgtcagcgcgccggagaccgtcccggcaaagaccaccgccgcccccatgagcgcccggccccgcatgccccgcagcttgtggtacatcgtgccgaggaacgaggcgacaaggccgcagctgatcatgtgcaccacgaagagcagcttgttgttgtcgtagttgttgggctggaagacgatgaactcgcacaccacccacagcggcagcgcgcagagccagaagccccgcagccgcttctccgagagcagcgcaaagggcagcagcagaaagaccacgccgatgttcttgatgtagaaccacaggtaggggtcctcctggttgacccagttgaaggagaggtgcagaaagcccgcgttgtccgcctgcgcgaaggtgaacttccacagctgcggaagcgcgagaaccgcggccagcagcgcgtagggcacgaactttttccagagccgggcgtccaggaagagctggcgcacgaacgcgccggcggacagcacgaacagcgccaggaacgagtgcgtgtgcaggagcggcagcccgcccgcgagaaccccgaggtacggggcgtacttccactcgcccgcaaaggccatgcggtagagcaggtacaggcagggcagcaggatggaccagccgaagagcgtcgcgcgctgggggatcagcaggtccgcgatggggttgacccagagcacgttctcgttggcgttgttggtgggcgtttcgtagtaggccgtgaagatccgcgtaaaattggaaggatcgctgcgcgcgccgtccaggaagtaccacagcgcgatgccgccgcccaggaagaacaggacgaaggccaggcaggcgcgcttttcgctctgcaaaaagcggcgcatccacacaaagtaccaggaaaacaccgcgtacagcgccaggaccatgggcaggatgtaggcaaagcgcaggtccgcccccagcagaagataggtcgaggagatgctgtcgcacaggaagggatagcccatctgcacgcccgcctcaatcgggtagagcggcgggaagacgccgttgcgcgcgatggaggtgatgaaggagaggtgcatgctcatgtccccgtagcaggactggcccgtgtgcagggcgccgtccacgggccgcaggacgtgcgtgtagagcagcacgacgctgagcagcagcgccgggacgacgcagaaggcgtgcagctttgcgctccgcgcgtccgtgcgaagggacgcgggcctgcgccggaagacgggcggcagcgcgcacggaaggacgaacagcgcaaggcccaggacctggctcaggagcgtgaacccgagcaggaaggagaagagggccggcagccacatctgcgcaaagagcgcaaggcttgcgccggctgcggcccgcgtgaggttgtcctcgcggggcaggaggagccaggcgtagcgaagccccgccgcaagatacgccgcaaggtagagaaccgaaaggacatttccgagaaattgcatggagaacctcccaaaaagcgtgcgggcggggcgttccgcccgccgccgcgcaaaaaacgcggcgaaatttaaccaggaagagtataccatacccccggaaaaacttgaagtcggcaggggaaaatgttacaatcagtgcgatagggtcgtttatccttgggacccagcgcgggaaaaccgcggttttgctttcgaaaaatgcatggctttggaggatagacaatggcaaatttcctgaaaaaactcttcggctcgtccaacgaggcggaaatcaagcggctgcgcaagatcctggacaaggtcaacgcgctcgagccgaaaatgcacgccctgcgcgacgaggagctgcgcgccctcaccccggcctttaaggaccggctgcaaaagggcgagacgctggacgacctcctgccggaggcctttgccgcggtgcgcgaggccgccgtgcgcgccatcggccagaggcccttcgacgtgcaggtcctcggcggcatcgtgctgcaccagggcagaatcgcggagatgaagacgggcgagggcaagaccgtcacctgtgtcatgcccgcctacctcaacgccctgaccggaaagggcgtgcacatcgtcaccgtcaacgactacctggccaagtaccagggcgagtggatgagcaagatctatcgcttcctgggcatgagcgtcggcctgatcctctccgggatgagcaacgcgcagcgccgcgcctcctacgcgtgcgacatcgtctacggcacgaacaacgagttcggcttcgactacctgcgcgacaacatggtcgtgcgcctgtcggacgtggtgcagcgcgagctcaactactgcatcgtggacgaggtggactccatcctcatcgacgaggcgcgcacgcccctgatcatctccggccagggggacaaggccacggacctgtacgccaaggccaacgccttcgtgctcggcctgcgccccggcaaggtcgagaccgacgagttcggcaacgagacccagaccggcgactacgtcaaggacgaaaaggacaagaccgtcaacctcaccgcggagggcgtcaccaaggcggagcggttctttaatgtggaaaacctctcggacctggagaacacggacatcaaccaccacatccaggtcgcgctcaaggcccacgcgctcatgcaccgggacatcgactacgtcgtcaaggacggcgaggtgctcatcgtggacgagttcaccgggcgcctgatggtcgggcggcgctattcggacggcctgcaccaggccatcgaggccaaggagggcgtcgaggtcgcgcgcgagagccgcacccttgccaccatcaccttccagaactacttccgcatgtaccacaagctctccggcatgaccggtacggccaagaccgaggaggacgagtttaagtccatctactccctggacgtcgtggagatccccaccaaccggcccatgatccgcgtggacgaaaacgacctggtctaccgcacgcagcaggccaagttcaaggcggtcgtggcggacatccagaagacccacgccaccggccagcccgtgctcgtgggcaccgtctccgtcgaaaagagcgagatgctctccggcatgctcgaccgcgtgggcatcccgcacacggtcctcaacgccaagcaccaccagcgcgaggccgagatcgtcgcccaggccggcaaggtcggcgcggtcaccatcgccacgaacatggccggccgcggaaccgacatcctgctcggcggcaacccggagttcctcgcccggcgcgagctgctccgccagggcatgagcgaggagctcgtcgaggaggcgcgcggctactccgacgacgcgccggaggaggtcgtcgaggcgcgcaaggcctaccgcgacctggtcgcgcagttcaagaagaccacggacgtcgaacacgacaaggtcgtgtccctcggcggcctgtacatcatcggcaccgagcggcacgagtcccgccgcatcgacaaccagctgcgcggccgcgccggccgccagggcgaccccggccgctcccgcttctacatcgcactggacgacgacctgatgcgcctctttggcggcgaccgcatcgcgcccatgatcgagaagctcggcctggacgacgaggccatcgagtacggcctgctctccaagcagatcgagagcgcgcaaaagcgcgtcgagggccgcaacttcgacatccgccgccacgtcctgcagtacgacgacgtcatgaacgcccagcgcgaggtcatctacggccagcggcgcgaggtgctctccggcgcggacgtgcgcgaccagatccagaagatggtcgacgagcagatcgagctgggcatcggcgagcactgctcggagcacagcatccccgaggagtgggacctcaagggccttggcgagtacctgaacgagctgttcacctaccccgcgggcgcctttgagaacctgagcgaagaccagtacatggacatgacggtccagaagatcaccgagcgcctcaagaaggagatctgggacgcctacatgggccttgtccacaaggccgaggaggccaaggtcgacatgggcgaggtcgagcgcgtcgtgctgctgcgcgtcgtggaccagaagtggatggaccacatcgacgacatggaccagctccgccagggcatcggcctgcgcgcctacggccagaaggacccggtcgtcgcctacaagatcgagggctacaacatgttcgaggagatggtggccaacatccaccacgacgtggtgcgcaccctctaccacgcccgcatcaacaaggtgcccgcccagcgcgaggcgccccgcgcggtcgagaccacggcctcccacgccgccccggcggccgcgcacgagggcggctccggcgcgcccaaccagcccccgcggcagatgcccgtgcacgcgcccaagaagatcggccgcaacgatccctgcccctgcggcagcggaaagaagtacaagaactgctgcggcaaaaacgcctgagaaaaccgcatcgctttccggcaggacgggagaacaaccgccctgcctttccctgcaaggagagacaaaggagaagaccagcatgaagattcaggccgtactctacgacatggacggcacgctcctggacacggaaaagctgcacaagatggcttggacgcagtgcgccgcgcagcgcggggtcgtcatcggccccgagttttaccagggcgcgatgggccgcaacctccagcgcgttttcgccctgctgcgcgagctttacccgaacatcggcgacacgcagaccctctacgaggagaaggaggcggtctgccgcgcgtggatggacgagcacggcgtgcccgtcctgccgggcgcgcacgaggcgctcggcgccctcggcgcgcggggcgtgcgccagtgcgtgtgcacctccacctcgcgggacagcgcggaaaggacccttgcggccgcgggccttctgcccaagatcgacgcgctcgtctgcggggacgacatcgagcgctccaagcccgacccgcagatcttcctgcgcggcgcgcagaagctcggcgtgccgatcgagcgctgcgccgtcgtcgaggacgcgcccgcggggatcgcggcgggcctggcctccggcgcgcgcgtgttctgcgtgcccggcctgctcgagatcccggcggaggaccttgcgcgctgcacgcgcatcggcagcctgtgggagcttgcggaccggatctaaggcgcggcgttgccaaatgcaggaaaacccgctataatggagaagattgaaaccgaagcggaggagttttcggaaaaagggagttttgcaagatgatcgtggaattggatcgatttgaacaggaagtgcgcgagctggagaagaagctggatgaaaccgcctccgcctttgacgtggacgccatgcgcgacgagctggaccagctccaccgcgagatggagcagccggacttctggaacaacctcgagcgcgcgcagaaggtcaaccagcgcatcaagaccatcaccgacagaacccaaggcatcgcggacctgcgcgcccagtgcgaggacgcgcacaccctcatcgccatgtgcgacgaggagcaggacgagagcctcgtcccggagatcgagagcgagatccaggacctgacccaaaagatcggcgcgctctacctctccacgctcctgcgcggggagtacgacgccaacgactgcatcctctccctgcacgcgggcgcgggcggcaccgaggcccaggactggacgcagatgctctaccgcatgtacacccgctatgccgagcgccacggctaccaggtgcgcgagctcgacttcctggagggggacgaggcgggcatcaagtccgtgaccttcgaggtcaagggggagaacgcctacggctacctcaaggccgagcgcggcgtgcaccggctggtgcgcatctcgccctttgacagcgcggcccggcgccacacctcctttgcctcgctggacgtcatgcccgtcctgccggacgacggcggcatcgtcatcaagcccgaggacctgcgcatcgacacctaccgcgcgggcggcgcgggcggccagcacgtcaaccgcacggactcggccgtgcgcatcacgcacatcccgaccggcatcgtcgtccagtgccagaacgagcgcagccagatccagaaccgcgagcaggccatggccgtgctccgcgcgcgcctggtcgagctgcgcgagcgcgaaaaccaggagaagatgagcgagatcaagggcgagctcaagaagatcgagtggggcagccagatccgctcctacgtcttccagccctataccatggtcaaggatcaccgcaccggctttgaggttggcgacatcgacagcgtcatggacggcgacctggacggcttcatcaccgcctacctgcagatgctctaaagcactgcttcgatcttacgaggaggcgcgacactatgcgaaagacctttgccgcagtgctctccgcccttgcggcatggctgctgctgctctccatggcgctgctgggcgtcttcatctgcacgacgtcccgcagcttctacgcgtatgaatacgcgaagtacggccaggccgagaccatcggcatcagcgacgagggactcatgcgcgtgacaaacgcgctgctcgactacctctggggcagccgcgacacgctggacatgcaggccgagatcggcggcgagatgcgcgaggtcttttccgaccgcgaaaaggcccacatggtcgacgtgcgcaacctcgtaatcctcgcgcgcaccgtcatggtggccgcctttgtcgcgggcgctgcgctctgggtcgtgggctgcttcctcgggaaaaagaagccgggcggcgtgcgcgccagcggcatcgggtacctggccggcgcggggacgctggtcgcggccacggcggcgatcgtcttcctcgcgatgcaggacttcaccgcggtgttcatccgcttccacgagatcttctttaccaacgacctgtggattctcagcgcggacgatatgctcatccagatggtgccggagcccttttttgcggactgcgcggcgctgatcgccgcggtctttggcgtgggcgcggccgcgaccatcgcgcttgccatcgtcatggtcgtgcgcgacaccctgggccgccgcccccgcggccccaagccggcggcggagagcggcgcggacggcgagaaagcggattgggacatccgccccgtcggcgggggagagcggggatacttccgcatcgaccgccccgcggacgcgcaggagcgccccgacgcccgcgagatcttcgcgcgcatgggcctggatgaggaggaagaggacgaggaggagaccctccccgtcgaccgcctgcgcgaggcggcgctgcgcacggagcgcaagcccgcccctgcaagcgcccccgcctggccgaaggagccggaggaggaggcgcccaccgtgcaccggccggcgcgctttaccggcgatttccccgcgcggctggacgaccaggacctctccgtgcgcctggagatgaagctggacctgcgcgtcgagcgcagcgcggacggcgagctcaccctcgccatggaccccggccgaaagccggagatcacgctgcgcagccagcccggccggctcgacttcaccgtcgaggacgtgccggagctctccgcgggcgcgcccgccgcgctcccgcggacggcgcagccggagccggccgagccgaaaccggccgcgccggtcgcggaggcggcggaatccgcgcccgactcctgggagggggccgacgccgtgcccgtcgggccgcggcgcccggtggagcccgcgccctcgccggaggaactgctccggcaaatggatgaactcatgaagggatttccccgaaacggcaaggaggaagagggccgttgacctatctggaaaccgcaagacaaagtgtggaggcgaacaagggccgggaggacatccggctgctggccattgagacctcctgcgacgagacgagcgcggccgtgaccatcggccggacgcagcgctcgctggtcatcgcctcccaggtggagacgcacgcgctctacggcggcgtcgtgccggagatcgcctcccgcgcgcatgtcgaggccctgccgggcgtcgtgcgccgcgcgctcgaggaggccgagaccgcgccggaggacctggacggcgtggccgtgacctatggcccggggctcgtcggcgcgctgctgtgcggcgtgtcctatgcaaagggcttcgcctaccggcacgggctgccgctggtgcccgtgcaccacatcgaggggcacatctccgcggcgtatttggcgcacccggaccttgcgcccccgttcctggcgctggtggtctcgggcgggcacagccacctcgtgcgcgtcgcggactacggccaccacgagatcctcggccgcacgcgggacgacgccgcgggcgaggcctttgacaaggccgcgcgcgtgctgggcctgccctatcccgggggcccggccatcgaccgcctggcccgcgagggggacgaccgcgccctgcccctgccccgcgcccggcaggagggctacaactactccttcagcggcctgaagaccgcgctgctgcaggccgtggcccgcatggagaagcagggcgcgcgcccgagcgacgcggacatcgccgcgtccttccgccgcgcggtggtcgagcagctcgtggacaaggcggagtgcgccctgcgcgacacggggctcaaaaagctcgtcctggccgggggcgtggcctgcaattcgctgctgcgcgcccgcgcaaacgaggcctgccaacgcctcggcgcgcgcgtgttcctgccgccgcccatcctctgcacggacaacgccgccatgatcggctgcgccgggtactatcgctaccgggaggggcgcattgcggacctggacctgaacgccgtgccctcgatgccgcttcccaactgagcaaggccaaggcccgcccccgctgaaattcagcggaggcgggccttggcgatttttcgcggaccgccgcgaaggagatggaatcataaggattttttcgcccggaaaaaaagaggcgggaaaatttttttttgctcttgacaagcgggcctcggggagaagggcgaacgagcgaatttcggttttccaccgcggcgaacgtcgaaccctgtggaaaaggcaaagaaaattcgtgttttcaaggaattgcctgtggataacattgtggacagtggggataactcggaattttccccgtatgctttgaaaatctatgcaggaacgttcgggaaaatgcggaggcatattccggatttttttcgcatagagaagctatggcaaacaaaaacgcgcagaaacggggagggatttgccgtgaaaaggaagctggtcgccctggcggtgctcctggtggggctggcgggattctgggcgctgctgggcggggaggagggggcgtccgtcttcctgtcgcagccaatgccggggccgctcgcgggccgggtcatcggcgtggatgccggccatggcgggtatgacggcggctgcaccggcgcaaacggcacggcggaaaaggacctgaacctggccgtggcgctcctgctgcgcgacgagctggaggcgcggggcgcgacggtcgtcctctcgcgggaggaggacgtcgccctcatcgacccggagaacacccccggctacaagaagcgcaaggagctgacgcgccggctggagatctttgccgcggcgcaggccgagtgcgtggtcagcgtgcacatgaaccagttctccgatccctcgcagcgcggggcgcaggtcttctttcaggcgggggccgaggagggcgaactcctggcccggacgctgcagagcgccctgcgggagctggacccggacaacggccgcgaggcaaacgccggggactactacatcctgaccgggacgccctcctcggccctggtcgagtgcggcttcctctccaaccccgaggaggaggcgcgcctgtgcacgccggagtaccggcaggcgctcgccgcggccgtggccgacgggctggaggactactttgcgccgcaggagagctgaaaatccacggtccttgcaagcgccgggcgcgtgttgtatactggaggaaaaccagaagtatcggggggacctcgaatgagcgcaacctttcttgcgatggacttgggcgcgtcgtccgggcgcgccatgctcggaacccttgcggacggccggctgacgctgcgcgagctgcaccgcttctccaacgaccccgtgcgtctggccgggctcctgcagtgggacctgccgcgcctgttctttgagacgaagaccgccctcaacaaggcggcgcttgcggggatttccctgtccgccatgggcatagacacctggggcgtggactacggcctgctggacgagcgggggcgcctgctttcggacccggtcaactaccgcgacgagcgcaccgcgggcgtgatggaaaaggccttcgccgtcgtgccggaggaggagatctaccgccgcacgggcctcgcgcgcctgtcgttcaacacgctctaccagctctattcccaggtgctcgacggcgatgcgcgcctgaccctggcgcaggacctgctcttcatgccggacctgctgggctatctcttgaccggggtcaagggctgcgagtacaccatcgcctcgacctcgcagatgctctcgcccaggacgcgcacctgggaccgcggcctgctggacaagctgggcatccccgcgcgcctgctgctgcccgtggaggagccgggaaccgtccgcggccgccttttgcccgagatcgcgcaggagaccggcgcgggcgaagtgccgctcgtcgccgtggcggggcacgacaccgcctctgccgtggccgcggtgccggccgtggacgaggactttgcctacatctccagcggcacctggtcgctcgtgggcgtggagacgcgcgcgcccgtgatctccgaggaggccaaggcctttaacctcaccaacgagggcggcgtggacggcacctaccgtgtgctcaagaacgtcatggggctgtggatcatccaggagtgccagcgggagtgggggcggcgcggaatccgcctgaccttcccgcagatcgtggaggaggccgggcgcgcccccgcctttgccgcgctcttcgacccggacggggaggagttcctcaccccggggaacatgcccgagaagatcgccgcggcctgccgccgcaccggccagcgcccgcccgaaggcgtgggcgcgacggcccgcgccgtctacgagtccctggccctctgctaccgccacacggtcgagcggctcgagcaggcgcgcggccgcgcggtctccgcgctgcacatcgtcggcggcggcagcaacaacgagatgctcaaccgcttcaccgccgacgccctgggcatccccgtgctggccgggccctcggaggccacggcgatcggcaacctgctcctgcaggcgcgggcgctgggcctcgtcggggacctctgggagatgcggcgcatcgtggcggattccttcggcgtgcgccgcatcgagccgggggaccgcgcgccctgggacgcggcctacaagacctaccgggagatcgtgggccgataagagggggaggaccagcttggaacagacatcgctgtttgacgcgccgggcgaccgcagccagcccctggccgcgcggctccgcccccgcaccctggaggaatacgtggggcagaagcacctgctcggcccgggcaaggtcctgcgccgcctgatcgagagcgaccaggtctcctccatgatcttctggggcccgccgggcgtgggcaagaccacgcttgcgcgcatcatcgctcagcgcacgcaggcggagttcatcgacttttccgccgtgaccagcggcatcaaggagatccgcgccatcatgcagcgcgcggaggaggggcggcgcctgggcgtgcgcacgatcctctttgtggacgagatccaccgcttcaacaaggcccagcaggacgccttcctgccctacgtggaaaagggcagcatcatcctcatcggcgccacgaccgaaaacccctcctttgagatcaacggcgcgctcctgtcccggtgcaaggtgttcgtgctgcaggcgctgcgcacggaggacctggtggagctcctgcagcgggcgctgaccgacgagcggggcttcggcgggcaggtcgtgcacatcgcgccgaacctgctggaatccatcgccgtctttgccaacggcgacgcgcgcaccgcgctcatgacgctggagatggtcgtgctcaacggcgacatggacgcaagcggcgaaaccaccgtcaccgaggagacgctcgcccagtgcacctcccgccgctccctgctctacgacaagaacggcgaggagcactacaacctcatctccgccctgcacaagtccatgcgcaattcggacccggacgcggcggtctactggctggcgcgcatgctggaggccggggaggacccgctctacgtggcccgacgcgtcgtgcgcttcgccagcgaggacgtgggcctggccgatccccgcgcgctggagctcgccgtcgccgcctaccaggcctgccacttcaacggcatgcccgagtgcacggtgaacctgacgcaggcggtggtctacctctcgctcgcgcccaagtccaacgccatggaggtcgcctacaacgaggccaagaaggacgcgctcgagcagctggacgagcccgtgcccctcgtcatccgcaacgcgcccacgcgcctgatgcaggagctggactacggcaagggctaccagtacgcccacgatacgaaggagaagatggcccgcatgcagtgcctgcccgactccctcgtcggccgcgaatactaccgccccacaaacgagggcgtggaggggcgcttccgctcccgcctggaggccatcaaggcctggaaggcgggccgcgcgccgtccccgcggggcgagaaggaggccccgcagggcggggaaccaagatagcaagacccccgtgcacaattcccaggcggacgaagggagttttccctttcgtccgcctgtttttgtctttcggcccgccaaaatatacgaaggagaagatggcccgcatgcagtgcctgcccgactccctcgtcggccgcgaatactaccgccccacaaacgagggcgtggaggggcgcttccgctcccgcctggaggccatcaaggcctggatggcgggccgcgcgccgtccccgcggggcgagaaggagtccccgcagggcggggaacaaagatagcaaggccccgcgcacaattcccaggcggacgaagggagttttccccttcgtccgcctgtttttgtctttcggcccgccaaaataatggaaagtttacagagtgcagatacaacgttgatggagttctccccggcgggcggatacaatgaagttggaaaaacgaaaaaagggggaacaccggtgagaaaacaagcgcggttggtccgcggcgttgcggcgcttctgctgctcgcggcggcgctttcgcttttgtcggcgtgcagcctttcggaccttgcatcgggcggccagagcggggcggacgcggtgctgggcagcggaacccgggtgctgcgcatcctctcgggctcggagaacgccgagctggagccgatcctggaggaatacgcccgggacgcgggcgtgcgcatcgagatgacgtaccagggctcgctggacatcatgcgcgccctgggccaggaggacctcgcctacgacgcggtctggccggcgagctccctctggctgaacgtgggcgataccggccaccgcgtcaagcacgcggagtccatctccatcacgcccgtggtcttcggcatccggaagtccctggcggagtccctgggctttgtcgggcgcgaggtctccgtccaggacctgctggacgccatccgcgcggggtccctgcgcttctgcatgaccagcgccacgcagtccaactccggcgccagcgcctacatcggcttcctgtacgcattgctcggcaacccggacgtcatcaccgaggaggacctgcagagcgagacgctgaaaacccaggtgcgcgagctcttctcgggcgtggaccgctcctccggcagcagcgactggctcaaggacatgttcctcgccggcgactacgacgccatggtcaactacgagtgcctcatcatccaggccaacgaggagctgaccgcccgcggggaggagcccctctacgtcgtctacccctacgacggcctgtccatcgcggattcgcccctgggctatgtggacgccggggacgaggcgaaggaggagctcttcctcgacctgcaggcttacctgctctcggaggagacgcagagcgcgatccagcgcacgggccggcgctcgagctacacgggcgtgcgcgaagagaaccgggacgtcttccccgaggcgtggggcctgcagccggaccgcgtgctctcgcccatccggatgccggccgcggacgtgctcttcgcgtgcctgaacctctaccagacggagctgcgcaagccctcgctgagcgtctactgcctggactactccggcagcatgagcggggaggggaacgaacagctcgtctccgccatggagcagatcctcgtgcaggagaatgcagccgcgaacttcctgcaggcctcccaggacgaggtcaacatcctcatcccctttaacggcgaggtcatcgccacgtactccgccgtgggcaacgggcaagagctggaggacctctacggcgtggtccgcggccaggaggtcggcggcggcacggacatgtacgccgccgcggccgagggcctgcgcctgctgcagggctacgacctgacgcagtacaccccggccctgatcctgctcacggacggccagtccggcgggagcttttcggagttcgcccaggcgtatgcggagctcgggcaggaggttcccgtgttctccatcatgttcggggacgcggacgaggagcagctgcaggagcttgcgcagtacaccaacgcccgcgtattcgacgggcgggaggacctgacggccgccttccgcagcgtaaaggggtacaactgatgcgggaagtttcgcggatgctggccgcggcgctggcggcctgcgcggcgttcctggcgctgtttttcgccctgcggtggcacatcgccgtgtgcgcgctgctggcggtgggcgtgtactttggcctgtacttcctgctcaagcccgtgcgcaggatcgcgggcatcgcggtggaggacctgcccggcggcgaggagatgcaggccctgctcgaggaggcgcggcaggacctggaccggatccggcaggcggaggcgcggatcgacgaccctgccgtccgccgggacgcgcaggccctgcgcgagaccggggagcgcatcctcgcctacctgcacaagaacccggaaaagatccgcagcgcgcaccaattcctcacctataccctggacacggcgggcaagctcctggcgcgctacgtcgagttccgcgccaccgggcttgcgaccccggaggtccaggagatcctcgagcgcacggcaaagtccctgcccgtgctccacgcggcctttgagcggcagttcacgcgcctgatgcagggcgagctgctggacgtggaggcggacatcgagctgctgcggaagatgcttgcgatggagggagaacagccatgaagacaaagtggatcggccttgcgatcctggcggtcgtcatcgccgcggcggcagggtacgcggtcttttccgcaaacgcccaggttttggaactgaacgggtacctcgggggagaaaagatcggcctgctcgaggacgcggaggtccaggagatcttccgcagccggtatcgcctctccctggactacgcccgcgccgggtcgctggagatgatcaccgccgaccaaacgggcatgaactatctcttcccctccaaccagaccgccctggagctttatgaacaggtccagggcacgccctatcgcagcgagatcgtcctgaacaccccgattgtgctctatacgcgcacgcaggtggccgaggtcctggtcggcgcgggcatcgcctccgctgcggacggcgtctacaccgtggacatggcggcgctcgtcgcctgcatcgagcaggggacctcctgggcggagatcggcctgccggagctctacggcgacgtggccgtgggcacgaccgaccccaccaagtccaactccggaaacatgtttgccgggctcctggccaacacgctctgcgggggcgttgcggacgagaacaacgtcgaggcgatcctgccgcggctgcaggccatcttccagcggctggggtacatggagagctcctcctcggacctgtttgaccagttcctcaagaccggcatgggcgcaaagcccctgatcgccggctacgagagccagcttctggagttcgccgtgcagaaccccgacacctgggcgcagatccggggcgacatcgtcctgctctacccgacgcccacggtctggtcctcgcacgtctacatcgcgctggacgaggcgggcgccacagccattgacgcgctgctggacgaggacgtgcagcgcctggcctgggaaaagcacggcttccgcacgggtttgtacgacgcgcccggggacgtcggccagttcggcgtgcccggcatcgccgaggagatcacccaggtcgcgcccatgccggacgtggacaccatggaccgaatcatcgcagccctttcctgacggcgaagcggccgcgcacgagcaaaggagacgaacacatggcaagcgaaatcacactggatgccttgaccaagcgcaaggccgaggcgcagagcccgcaggtggagaccgcgcccacccccgcgcaaaccgacgccgtgcgccgcgcggtggaggcgctcacccccgaggagcgcgccaaggcggaggagatcaagaacggcatagacctgatggactcgcagacggcgatcctctacggcgtcggcgcgcagcgcaacctcgcggagttttcggacaacatcctggccaacgtccgcaacaaggacacgggctacgtcggcgacctgatgggcgagctggtggaaaaggtccgggacgtgggcgtggacgaggcggagggcggctttctcgacaagctgcccttcctgcgcagcgcggcgcgcgccgtgcgcaggctccttgcgcgctacgagaagatcgaggtgcagatcgaccgcatccagcgggacctggaggaggcccgcatgcagatgctcaaggacatcgccatgttcgacggcctgtacgaaaagaacctggagtacttccgcgggctgcaggtctacatcgtcgcgggggaggagaagctgcgcgagacccgggaggagacgctgccgcgcctgcgcgccgaggcgcaggccaagggcgaccccatgagtgcccaggtcgtgcgcgacttcgaggacacggtcgaccgctttgagaagaagctgcacgacctcaagctcagcaagtccatcgccatccagaccgccccgcagatccgcctcatccagaacaacgacaagctccttgtcgacaagatccagaccgcgatcctctccaccattccgctgtggaagggacagatcgtcatcgccctgggcctggcccgccagcagtccgccctgcagatgcagcgcagcgtgaccgacaccacgaacgagctcctgcagagaaacgccgagctgctcaagcagaacagcctcgacgtggcccgcgagtccgagcgcggcatcgtggacctggagacgctcaagaaggtcaacgacgacctcatctccacgatcgaggagaccatccagatccagcgcgagggccgcgccgcccgccagagcgccgaggccgagctcgccggcatcgagcagaagctgaaggacgcgctcctgaccgccgcgcaggcagattgagtttcgcccccgtttccgcaaaaaccgcccccggagccgccaacgcgcgcggcccgggggcggttttgcgcgctccggccccttgcgcggcgcccggcttgtaaagcgaggcgaaatatgctatgcttagggggaacacagagcgaatttcaacggagggggagggcaatgctcttcaacgaacgggcggagatcatcctgcagcaggtgcagctgcagtccacggtccgggtgcaggagctgagcgagctgctgcaagtctcgcaggacacggtccggcgcgacctgcgcgccatggaaaagcgcgggctgctcaagtgcgttcggggcggggcctgcctgccggagtccctttccgccttctccaacttcaagggccgcgagatcatccactccgacctcaagcgcgcggccagccgcaaggcgatcggctacatccgcgagggggacatcgtcgcgctcaactccggcacgaccaacaccatcctcgcccaggagatcgcccagcgctgccacaacatcaccgtcgtctccaacaacctggccgcggtgcgcatgctcctgcaggcgccggccatccgcgtcatcctcatcggcggcaacgtcgaccccaccgagcaatccacctacggccccatgtgcgagcagggattcgtgcagtactatccggacgtgacctttctctccctgaacgcggtcaattacaaggacgggttcacggacttccgcctctcggaggtggggatcatccgcgcgctctccgagcactcccgccgggtgatcgcggtgatggattccagcaagctcggcaagcgctccaagtgcaaggtgctggacctggacgccgtggagcggctgctcatggacgaccaggtcgccgagggcgtgcgggaaaagtaccgggaaaagggcatcctcatcgagtgaatcgcgcgcagcggcgttgaatgaaatcgagagaatctatacagttcctagacacggcgggtccggcggggattttttctccgccgcgcccgcccttgcttttcctgccaaaaccccggaattccggggtttttttgctgctcaaaagggaaaagatgcgttaacggcgagtttactcggcattgagcctttcttgcttgaatgtgcggcatattcagggtaaaaacataccgaaatcagcaaaaagacgcaagggtctgcaagaggaggcaaccgcatgacggggagaatggaggccgtgatcttcgactgggcaggaacgaccgtggactacggctgttttgcgccggtggaggcgtttcggcaggcgttccgggaggtggggatcgacccgaccgcagaggagctgcgcgggccgatgggcctgtccaagcgccagcacgtgcagaagatgttcgagatgccgcgcatcgccgcgtgctttgagaaggcgcagggccgcccctggcagaacggggacgcagagagcgtctaccgccgcagcgaggcgctgatccttcgcctgctgccggactttgcgcagcccctgccccacgtgcgggaggcggtccaagcgctgcgcgcgcagggcgtcaagatcggctcgaccacgggctacaacgacgagatgatgcgcgtggtggttccggcggccgaggccgcaggctaccgcccggactgctggttcagctccgattccacgggcggaatcggccggccctatccctacatggtcttccgcgcgctggagaagctgggcgtttcctcggtgcgcgcggcggtgaaggtgggggataccgcagcggacatccgcgagggacggaacgcgggccttgtgaccgtgggcctgatcgagggcagctcgctgatgggcctttcccaggcggagtacgaagccctgccggaggacgtgcgccagcgggagatcagccgcgtgcgccgggcctacgcggactgcggcgcagaccacgtcctgctcaacctcagcggcctgcccgcgctgctggacgaactcggatataccgcgcgctagcgctgtatataaagccccaaggacaaaagacgacatcggattttggaaaggagccgaaaacatgaacctcaagaagattctctcgctctccctgagcgccgtcctgctcgtggccctgcttgccggctgctccgcgcccgcggaagccccggccgccaccgacgcgcccgcggcaacggatgaggcgcagagcgcggcgcccgaggcgaccgagcccgccgcggccgagcccgccgcgaccggggagaccaccgggaactatgcagataccatcaccatcgtctggtaccccaacgagtccgccgaggactacgaggtcgcccgcgaggagtggggccgcctgatcgaacaggccaccggcaagaaggtcgagcagaagctgaccaccgactacgccatcgccatcgagtccctggccaacggcaccgcgcagatcagcttcatgggcgcgcagggctacatcgaggccaagaacgccaatgacgcggtcctgcccctgttcgtcaactccggcgcctccggcaccctggacgacgcgctctactacagcttcctggccgtcaagaagggcaacgagggcgagtacgcctccggcgacacctactccatcgacaacatccagggcaagcgcatctcctttgtgtccaacagctccacctccggcttcaaggttccgaccagctccatcatctcgcacttcagcgatctgggtctgaccgaggacgacctgatcgagggcggggacgacatgttcttctcccaggtgctcttcggcggctcgcaccagggctcggccttcaacctcatgagcgaccgctcggacgtctccgccttctgcaacacggaaatcgcgccctatgcggactgcgttgcgggcgaggcgaacaccgtgggcgccacctacgccatcaaggaggacgccagcgctccctttgacaccgtcaccggcgaggagttcgtcctcatccaggtgacgccggttctcaacgggccctttgcctacaactccgaggcgctcgacccggcggacgtaaaggccatacaggacctgatgacctccgacgaagtcgccaacaaccccctgatcttcgtccccgaggacagcgacggcgtgggcatgtacgaaaagaccgccaacgagcgcctgctcctggtcgaggacgcctggttcgacccgatccgcaacctcagcgaataaaggagaaagaacaatggcacttcttaccttccagcacgtgagcaagacctacgacaacgtcaccaaggcgctgcaggacgtctcgttctcgatcgaagaaggtgagttcgtgtccatcatcggcccctccggggccggaaaatcgacactgctgcgatgtgtcaaccgcctggtggacgcatcgcagggtgcgattttttttgacgggcagaacgtcaccactgcggacaaaaagcagctgcgggaaatccgaatcaagaccgcgatgatcttccagcactacaacctcgtggaccgcctgaccgttgtggagaacgtgctccacggccgcctggggcagaaatcgaccctcagcggcgtcgtcggccagtacacggaggaggagaaggcggaggccttccgcatccttgcggagatgggccttgccgagacggcctacaagcgctgtgacgagctctccggcgggcagaaacagcgcgtgggcattgcgcgggcgctgatgcagcaccccaagctcatcctctgcgacgagccgatcgcctccctggaccccaagtcctccaaggtcatcatggaccacctcaaggccatcaaccagaaccagaagatcacgtgcctagtcaacctgcaccaggtggacgtcgcgatgaagtactccgagcgcatcatcggcgtcacggccggccgcatcgtctacgacggccccacggcgaacctcacgcaggacgtcatccacgaaatctaccagtccagtgagcacgacctgatcaccgacgtgcagggggcgtaaagcacatgcagatcacaaagcaaaccaaggccaatctggacatcttccagcgcaggaagatcacctatacgctcgtcttcctcgtgctgatcgcggtgtttgcgggcgcgtccctcgtctcggagttcaacctcctggacggtgttgcctccttccccgcggcgatgcagtggatcatctccaacctgatcccggacgccgaggccatcgagcgcatccccaagatcctctcggagctgatggagacggcgctcgtctccgtggcggtgacggtggtcgcggcggtgctggccttcttcttcagccttctgggctccaacatcacgcgcgtcaaccgggtggtcaagcgcgtcgtgcgcatcgtggcggcgtttttccgcaacgtgccggacgtggtctgggcgatgctgctgatgttctcctttggacagaacatcctgaccgggttcttcgcgctgttcttcacgaccttcggcctgctcacgcgcgccttcatcgagaccatcgacgaggtcagctccggctgcgtcgaggccctggacgccacgggcgccaacttcctgcagaaggtcttccagggaatcctgccctcgtccatgccgggcgtcatcacctgggtgctctacatgatcgagaccaacatccgctcctcgacgctcatcggcatcctgacggcaacgggcatcggctatctgttcgacctctactataagcgcctggacttcgcctcggcaagccttgtggtgctctccatcgtggtgctggtcctcgtcatcgagaccgtctccaacaaggtaaggaaggtgatcctgtaatgaacgaaaccgtagccatccccgcgggcaagccctcggaacccgggcgcggggagcgggaggccgtcgagcggaacatcgtgcggacccgctcgggcaagatcaagatcaagggccgcaaccggagccagacggccatcaccgccctgtgcctggtgctgctgggcatcaccgccgtggcctttgccacctttgacaccggcagcatcgactttggccaggccgtgctcgacacgctgcacaacatccgcaccgtcttcctcgagccggagctcgtgcgcgacacggtgggcggcgtgctctaccagttgcttgtgaccttctgcctgggcatcctctccaccatcatcggcgcggtgctggccttcttctgttcgctgctgtgcgcgcgcaacatcgcccaccccgcgtgcgtgaacgccgtaaagagcgtcgtggcggtcgtgcgcgcggtgccgacggtcctgtgggtgctgatcttcgccgtctcggcagggctgggcagcgtcgcggcggtcgtgggcctgaccttccacagcttcgcgtatctgacgaaggcgtatgccgaatccatcgaggagatggaccccggcgtcatcgaggccctgcgcgccaacggcgcgagctactggcagatcgtctgtcaggcgatcgtgcccacgaccatcacctccatgatcgcctggaccttcatgcgctttgagatcaactttgccaacgccgtggccatgggcgcggcggccggcgcgggcggcatcggcttcaacctcttcatggcgggcagcttctactttgacctgcacgagatggggatgctgacctacatcgtcgtcatcgccgtggttctgctggagatgctctccaccaagatcaaggccaaggtccgctaaaaaaaggggagcggcgcgccgcgccccagcgatggaaaccaacacaaagcgaggaaaacctatggaaaagagacgcatttcgaggattttggccagggccgacggggcggccgtcaagcgcctggccgacgagatcaaagccgtgcagtcgcccgtcatcgtcaaggccccggaaaagtccctggccatgatccggatgcgggagccggtccaggagagcctgttctacctgggggaagtcatcgtctgcgaagcgatcgtggaccttgcgggcaaaaagggcgtcgcggtcctgatgggcgacgactttgacaaggtgctcgacatggcggtcatcgacgcggcctgcaacgccggcgtcttcgcccgctacgacgagctggaacggctcgagcgcgagcagaagatccaactcgaaaaggagcgcgccatgttcctgaagaccatggtcagcttccactccatggattcggaggtggccccgtgaagcagctgcacacattcgacgaggttttcgattcccagaaggtgttccgcaaggcgctggaggtcctctccaaccccggaagaactctctccatcgccgggcagagcgagaagctctacggccagcagcccggcctgctggccctggccatgacgctgctggacgcctcggtgtccttctgcgcgccggacgacgcggagctgaccgagcagattctcctgcacacgcacgccgcgcccgtggacgcgcaggaagcagacttcctcttctgcacgcgcgcggagaacctggccgcctgcatcgaggccgccaagtgcggcacgctcgtcgatccccacacgggcgcgacgatcctcgtccgcgtgccgcaggaggagagcgtccgcgtgcggctgagcggcccgggcgtggacggcgcgctcgaaaccgaggtgccccgcgacgtgctcgcagccatccggacgcggaacgcgcaggcgtacgagtatccccagggcgtggacttcttctttctcctgcccggggacgcgatcctcgccatcccaagacttgtcagaatggaggaagtgtaatggcctatgtagcggtatccggcggcgaagaggcgatcgaggccagcatcgcgctcttaaactactatcggagcggcacggataaggacctggacctcgaggtgatcgaggagaagatgagcctgctcgtcgaccgcgtgatgagcgaggcgggcctttactccaagcggtacgcggccctggctctcaagcagtgcgagggctcctcggacgaggccgtgttcctgctgcgcgcctatcgctccaccctcaagcgcagctacgacacgcgcgttgtcagcaccaaggacatgcgcattgcccgccgcatttccgcggcgttcaaggacatccccggcggccaggttctcggcgcgacctatgactatacccaccgcctgatgaacttttccctggagacggaggatgcccctgccctgcagaagaagatgcgcgacctcgtgcagagccagacgcccgtcgaggcgccggacagcccccgcgtctccgacaccctcaaggacgaggggctgatcgaccgcttcccgacgaacgacgagaagccctttgacgtcacgcagaacctgctggagttccccgcgccccgcagcgcgcggctgcagaccctgtcccgcgcggacacgggcttcatctccggcctggcgtattccgtgctgcgcggctttggccaggtgcaccccaccgtcggcgagctgcgcgtgggcgccgtcgagctggaggtgccgtacctggagaacccggaggagagcctgtacatcggcgacgtgctgctgaccgaggtcgaggtcttcaacgaggccgacgacaagaaccagctcaagctctcctgcggctacggcgcggtgttcggccgcaacgagaacaaggccatcgccatggcggtgctcgaccacgagctgagcaccaccggcgacttccccacgcagaacgacgagttcgtcctgatgcacggcgacagcctggagatgaacggcttcatctcccacctgaagctgccgcactacgtcaccttccagtccaagctggacgcggtgcgcaagacgcggaggaaaacgacatgatggacaaacagagcatggaaaaatataactatgccttcctggacgagggctccaagcgcgagatccgcagaagcgtgctcaaggccgtggccatccccggctaccaggtgcccttcggctcgcgcgagctgcccatcggccgcggctggggcacgggcggcattcagctcaccctctcgctgatcgggccggaggacaccctcaaggtcatcgaccagggcagcgacgagagcgtcaacgccgtcaacatcaagaagttcgtgcgcatgtgcacgggcgtgcccgtgaccacccgcacccaggacgcgaccctcatccagacgcgccaccgcgttccggagatccccctgcgcaacgaccaaatcctcatcctgcaggtgcccctgcccgagcccctgcgcgtcgtcgagccgcaggagagcgtcaccaagaagatgcacgccgagtcggactacgcggccatctggctccagctctacgagagcctggtcaagtacggcaaggtcaccatctccgcggaatacccctgcctggtcgaggaccgctacatcatgaaccccagccccatccccaagttcgacaaccccaagctccacgaggcggactgcctctacctcttcggcgccgggcgcgagaagaagatctacgccatcccgccgcacaccaaggtcgtctccctggcctttgacgacgtgccctttgagcgggagagctttgcgggcaagaagtgccgcctgtgcggaagcacggatacgtacctagacgagatctacgactccgcaacgggcgagaggtactaccagtgctccgatacatcctattgccgggaggtgcgttccaagtgcaaatgaggcttcaggaaacgccggtcttgagcgtgcagcatctcaccgtgcgctacggagagggctgcccgcactgccttgccgggggcaagctcgaaaagaaccgctgccccaagtgcggcacggtctacgccgcaaacgacatctccctggacgtctaccccggcgaggtgctgggcatcgtcggggagagcggatcgggaaagtccaccctcatgcagagcctgtactttgacctggagcccacggccggccaggcgttcctgcagaacttccacgagggaaagaagagcatctgggacgcctccgccgccgaaaagcgccacatcaagaacacgctgatgggcatggtctaccagaaccccatccgcggcctgcgcatggactactccgccgccggcaacatcgccgaaaagatcatcgccgccggctcccgcaacgccgggcagatgaccgagcgcgccaaggagctgctctcggccgtggagatcctcacctcccgcatgagcgaggcgccgcggaacttctccggcggcatgcagcagcgcgtccagatctccaaggccctggccaacaacccctccctgctcctgctggacgaggtcaccacgggcctggacctctccgtgcaggcccgcgtgctcgacctcatccgcaagatccgcgcgcgctatggcatctccatcctgctcgtctcccacgacctggccgtcatccggatgctggccgaccgcaccgtcgtcatgctcgacggccgcatcatcgaaaagggcctgacggaccagatcctcgaggacccgcagcaggcctacacgcagcagctcgtctattccctgctgtaagaagaaggaggagccacatgatcgccatcaagaacggacgcctggtcctgccggaccgcgtgcaggacggcaagatcctcgtcctcgtggacgaccgcatccgcggcatcgaggacgagatcccgcagggcgccgaccgcgtcatcgacgcgcacggccgctacgtgctgccgggctttctcgacatccactccgaccgcatcgagcagttcatcctgccccggcccacggcccggttcgactttgagctcgccctgaaggagtgcgagcgcgagctcctgcaccagggcatcacgaccatcttccactccttttccctctacaaggacgagaagttcggcaagagccccctgcgcacgctccagagcgtgcgggagatggccgccctcatccgcgacatccacgaccgctaccacctcatccaccaccggttccatctgcggctggagatcgacaacctggacgcctacgacatcgccgtggacatgatcgagcgcgggctcatccacgagatctccttcatggaccactcgcccggacagggccagtacaaggacctggccatctaccgcacggcgctggccaagtacagcggcatggcggaggaggactacgacttcgaaggattcctggagcgggaaaagaacaaggagatgctctcctttgcccagctgcgggaccttgcgcgcctggcgcacagccgcggcatcgccgtggcctcccacgacgacgacacgcgcgaaaagctcgacctcaaccgcgaaatcggcgtggacatcagcgagttccccatcaccatcccggccgcgcagtacgccaagtccctgggcttctacacggtcgtcggcgcgccgaacatcctgcgcggcggctcccactcgggcaacatgtccgcggccgaggcggtgcaggccggctgcgcggacatcctctgctcggactactacccgccggccatcctgcacggggtcttcctgctccacagcaagtacggcctgccgctccccgaggtggtgcgcaaggctacgcgcaacccggcgctggccgtgggcctgcctgactacggcgagatcgccccggggcggaaggcggacctgctcatcgtggagattctggacaactatcccgtcatcacccacgtcctggtggacggccgcgcaacctcgcgggtcgagtacaggaggtaagacaatggcaattctctccatcgagcacctctccaaggagttctatatccacaacgcgcaaaagcgcatccgctcctgccaggacatcacgctgcgcctgcaggagggggagtttatcggcatcgtcggcctctccggcgcgggtaagtccacgatcctcaagtgcatccaccgcacctacctggccacgaccgggagcatcgtctacgacagcctcgccttcggccccatcgacctgacccaggccaccgagcgcgagatcctctacctgcgccgcaacgagatcggctacgtctcccagttcctgcacgtcatgccccgcaccacggccaaggagcacgtcatgaacgcgctgctggagctgggcacggacagcgccgaggccgaggcgcgcgccgaggagatgctgcgctacttccgcctgccggaaaacctctggtccctgtacccgaacaccttctccggcggcgagcgcctgcgcctgaacctggcccacaccatggtcaagcagccgcgcctgatgctcctggacgagccgaccgcctccctggacaacaagaccaaggtcctggtcaaggacatgctcatgcagctcaaggaaaagggcaagagcatggtcggcatcttccacgacctggagttcatggacggcctgtgcgacaaggtcttcaacatttcggagggaacgctgcaatgattcgagcagatctgcacatgcactcccgcgtctccgacgggagcgataccatcgaggagctggcccgcgaggccgcggccgcgggcctggacgccatcgccgtgaccgatcacgacacgctcgagggggccggccagatcccggagggcctgcccgtgcgcgtcctgcccggcatcgagatctcctgctttgactacgcggcgaacctgcgcgtgcacgtgctcggctacggcgtgcaggaccgggaggcggtcgagcgcttcgtccaccccctgctgctcgcccg

SEQ ID NO: 2182 - DNA, 4039 bp, Unknown
  16S sequences of unknown bacteria
gctcagcgcaagacgctggtgcacgatatggagtgcatcgagaccctggcccgggtcgataccctgtgcgtcgataaaacgggcacgatcacggaaaataagatgatcgtgcaggatatcgtccctttgtgcccggagcggtacgaggcttcggatatccgcatgatcatggcggattacgtttttgccatgcaggacgataacgataccatggtcgccctgcggcggtatttcaccggcgaggtccggcaaaaggccatcgagacgatgccctttacctctgcgaaaaaatacggcggcgtcagctttgacgccgaggagacataccttctgggcgcgccggagatgctgctgcagagccgctatgacgagatcgcgccccaggtcgaggagtacgccagccagggctgccgcgttttgctgctggccctgtatgatggcgcgctgtcggacgaggccgtcgactgtgggaagctgttcccgctgtcattgatcctgctcaataacaagatccgcgccaacgcgccggagacgttccgctattttgccgagcagggggtgcaggtcaaggtcatctccggtgataacccggcgacggtcgccaatgtggccatgcgggctggcatcccggacgcggacaaggccgtcgacgcccggaccctgacgaccccggcggaggtcaaggccgccgcactgcaatacactgtcttcgggcgcgtgacgccgaagcagaagcggatgctggtggatgccatgaaggccgccgggcggaccgtcgccatgaccggtgatggtgtcaacgatgtcttggccctgaaatccgccgactgcgccgtagctatggcctcgggcagcgacgtcgcctgccaggtctcggatattgtgctgctgaattcggacttctcgtccatgcccagtgttgtgcaggaggggcgacgggtcatcaataacatcgagcgctccgcggcgctgtatctggtgaagaatattttctccttcgttctggcgtttatcaccctgtttgcgacgctgccgtaccccttcaccccggcgcagctgagcctggtcagcgccctgaccatcggcgtcccgtcgtttgtcctggccatggagccgaataagaaccgggtcacggggcattttatgcgcaatgtcatcacccgcgccctcccggcggcgctgacggatatcgttttgatcgtcggcattctgctgttctatgtggcgttcaagctggatgtcggggcgctttcaagcatttgcactgcggtgatgggcatggtcggcctgctgatggtccatgagacgagcaagccgtataacaagatccgcacggcgatgatgatcttcgtctgcgtcggcttcgtcttctcgttcctgttcctcaagacatttttcaccatctcggccctggcgtggtcggatgcgttgatcctgatcgtcttcctggccctggccggtccagccatgcggcagatgcacgccctgaccgaccacctcggcaagctcctacagcgcgtggcacaggcgccgaaaaagaaaacgcggaaggcttaaaatctgagtgcatcaaagcatatcaaaaaaagagacgcaccgcggtgcgtctctatttggtgttgaaatcacttactgcttcgtgaagaccaaggggaagaggtcgtcgatcgtctcggcggcatcggcgaaatcgaggacatcaccggtgagctcggtgaaggtcagtttgccgttttcgagggtgtaggtgatatagtcatcgtcagagaagtcgtccttgtcttcctcgaggaagagcttgtcttctgttgccttgtagtagccggtgtcgctatcctcttccagcatctcaagcaggtcgtcctcgtcgaacatggtgatgatctggccgacgtagtcggagatggtggagccggtctccttttcaaaggccgcgtcgatctcttcgcgagtgaggtctgtgtcccccacggagtcatagatgacgtcttccaacagggtggagcagccttccaggtaggtccggagggatgccagggtagcgtcgctgtctaatttcagtgtgaaggtgccgtcatcgctcagcgtcagtgtgaagggagcgacaagcgtcaggccttcgaggtcttcctcggccagaccagcctgcgccatggattcgttgatgattgacgacatgtccatttcggtggtgtaggtaccgctcaggtcaggggcggatttgccgcagccgaccagtgccagcagcatggtcagtacgactaggcagagtgcgagtgattttacacgtttcatagggtttttcctttccaatttttgcaagatacataaatttattttaacatagcatgtaatacttgtcaacctgcaaaaactccattccctatctctgcgctaggggagaaaatgctgcgagaaagggtttgacaaagtatttgcgatagggtagaataatacaatagaatttataggatatcaagggccgggcgcgtttgacccggccaattggagtggactatgttacgtgaagtcattctggatacattgatcgacagcgcacggctgctgccgtttttgtttgtggcgtacctggccatcgagctgctggagcactacgcgggggacaggacggaccgcctgatgcagcgggccgggcggtacggcccggtcgtcggggcgctggtcggcgtcgttccccagtgcgggttttcgacggtggcggcgaatttatacgctggcggcgttgtctccttggggacgctcctcgccgtcttcctctccacgtcggacgagatgctgccggttatgatctcccggcaggcgccggtggggctgattctgaaaatacttggctttaagattgtggccgccgttgtgtcaggctttgttgtcgacctggtctggcggcgcagggggcagcacccggcgcatatccacgagctatgtgagcacgagggctgccactgtgaggacggcgttttaaaatccgccctgcggcataccgtcaagattttcctgttcctgcttgtcatcatgttcgccgtctcgctggcggtggcgtatatcgggacggacgcgctggcgggcctggttttgaaccggccggtcatcgggccgctgctggcgggtctggttgggctcatccccaactgcgccgggtcggtcttgatcaccgagctgtatctgcagggcggaatgcaggcgggggcgatgctctcggggctgatggtcagcgcaggcgtcggcgtcctggtcctgtgccggatgaaccacaactggcgagagaatctcgcgatcatcggtttgctctacggtgtctccgtcgtttttggctgtgttgcgggcatgctgccgattttttaagggtaaaactatttgaaacttaaattccccgggaagtgatttcccggggaatttttataaggtgcagcctgtgggggcttgttatgcgccgataaagttttcggtgtagtagaccccgtagtcggagctgttgaggtatgcgatgccggtgcccatctgggtgaagccgctgtccagaatattggcccggtgcccagcggaattgacccaggcgttgtgaacgtcgatgccgttcacctggcctgcggcgatgttttcaccgcagctgtagaagctgacgccctgcgcttcgacccggtcccagggctggctgccgttgcggccagtgtgatcgaaatagtggttggcggccatatcggcgctgtggagccgggcggaggtggcaagcttgtcattccagcttagaatgcgctggccatggtaggcgcggaaggcgttgacgagatggaagtctacccgggcttcgcccgccagaagcgtcgtcacatcgcctcggagggtcggattgtaggatttggcctgaacccagatgcagtggaagcgtccgccgtcgtttttgtcggtgagggcggcaaagtagcaactgctgctggcgggcaggtcggggttgtggtccagcatactgtagccctggtagtagaagcccgggccgctacacgatagatcggaagagcgg
